(19) United States
(12) Patent Application Publication
(10) Pub. No.: US 2026/0109980 A1
(43) Pub. Date: Apr. 23, 2026

(54) RNA-GUIDED DNA INTEGRATION USING TN7-LIKE TRANSPOSONS

(71) Applicant: The Trustees of Columbia University in the City of New York, New York, NY (US)

(72) Inventors: Samuel Henry Sternberg, New York, NY (US); Sanne Eveline Klompe, New York, NY (US)

(21) Appl. No.: 19/202,829

(22) Filed: May 8, 2025

Related U.S. Application Data
(63) Continuation of application No. 16/913,299, filed on Jun. 26, 2020, now Pat. No. 12,331,292.
Application No. 16/913,299 is a continuation of application No. 16/812,138, filed on Mar. 6, 2020, now Pat. No. 10,947,534.
(60) Provisional application No. 62/815,187, filed on Mar. 7, 2019.
(60) Provisional application No. 62/822,544, filed on Mar. 22, 2019.
(60) Provisional application No. 62/845,218, filed on May 8, 2019.
(60) Provisional application No. 62/855,814, filed on May 31, 2019.
(60) Provisional application No. 62/866,270, filed on Jun. 25, 2019.
(60) Provisional application No. 62/873,455, filed on Jul. 12, 2019.
(60) Provisional application No. 62/875,772, filed on Jul. 18, 2019.
(60) Provisional application No. 62/884,600, filed on Aug. 8, 2019.
(60) Provisional application No. 62/902,171, filed on Sep. 18, 2019.

(51) Int. Cl. C12N 15/113; C12N 9/22; C12N 15/10; C12N 15/63; C12N 15/90

(52) U.S. Cl. CPC C12N 15/113; C12N 9/22; C12N 15/102; C12N 15/63; C12N 15/902; C12N 2310/20

(57) ABSTRACT

In certain embodiments, the present systems and methods use Tn7-like transposons that encode CRISPR-Cas systems for programmable, RNA-guided DNA integration. For example, the CRISPR-Cas machinery directs the Tn7 transposon-associated proteins to integrate DNA downstream of a target site (e.g., a genomic target site) recognized by a guide RNA (gRNA).

### CROSS-REFERENCE TO RELATED APPLICATIONS

[0001] This application is a continuation of U.S. application Ser. No. 16/913,299, filed Jun. 26, 2020, which is a continuation of U.S. application Ser. No. 16/812,138, filed Mar. 6, 2020, now U.S. Pat. No. 10,947,534, issued Mar. 16, 2021, which claims the benefit of U.S. Provisional Application No. 62/815,187, filed Mar. 7, 2019, U.S. Provisional Application No. 62/822,544, filed Mar. 22, 2019, U.S. Provisional Application No. 62/845,218, filed May 8, 2019, U.S. Provisional Application No. 62/855,814, filed May 31, 2019, U.S. Provisional Application No. 62/866,270, filed Jun. 25, 2019, U.S. Provisional Application No. 62/873,455, filed Jul. 12, 2019, U.S. Provisional Application No. 62/875,772, filed Jul. 18, 2019, U.S. Provisional Application No. 62/884,600, filed Aug. 8, 2019, and U.S. Provisional Application No. 62/902,171, filed August Sep. 18, 2019, the contents of each of which are incorporated herein by reference.

### FIELD OF THE INVENTION

[0002] The present invention relates to methods and systems for modifying DNA and other nucleic acid and for gene targeting. In particular, the present invention relates to systems and methods for genetic engineering using engineered transposon-encoded CRISPR (cluster regularly interspaced short palindromic repeats)-Cas systems.

### SEQUENCE LISTING STATEMENT

[0003] The text of the computer readable sequence listing filed herewith, titled “COLUM_38167_312_SequenceListingCorrected”, created Dec. 23, 2025, having a file size of 4,542,358 bytes, is hereby incorporated by reference in its entirety.

### BACKGROUND OF THE INVENTION

[0004] The CRISPR-Cas system is a prokaryotic immune system that confers resistance to foreign genetic elements such as plasmids and bacteriophages. The CRISPR/Cas9 system exploits RNA-guided DNA-binding and sequence-specific cleavage of a target DNA. A guide RNA (gRNA) is complementary to a target DNA sequence upstream of a PAM (protospacer adjacent motif) site. The Cas (CRISPR-associated) 9 protein binds to the gRNA and the target DNA and introduces a double-strand break (DSB) in a defined location upstream of the PAM site. Geurts et al., Science 325, 433 (2009); Mashimo et al., PLOS ONE 5, e8870 (2010); Carbery et al., Genetics 186, 451-459 (2010); Tesson et al., Nat. Biotech. 29, 695-696 (2011). Wiedenheft et al. Nature 482,331-338 (2012); Jinek et al. Science 337,816-821 (2012); Mali et al. Science 339,823-826 (2013); Cong et al. Science 339,819-823 (2013), all incorporated herein by reference. The ability of the CRISPR-Cas9 system to be programed to cleave not only viral DNA but also other genes opened a new venue for genome engineering.

[0005] However, there are currently large limitations and risks associated with the use of CRISPR-Cas9 and other programmable nucleases for insertion of large gene cargos into eukaryotic genomes. Gene integration with CRISPR-Cas9 requires introduction of DSBs and the use of synthetic repair donor templates carrying appropriate designed homology arms. DSBs, which are necessary precursors for CRISPR-Cas9 mediated HDR pathways for gene integration, are known to pose hazards for cells. DSBs at off-target sites introduce off-target mutations; DSBs can provoke a DNA damage response (Haapaniemi et al., Nat. Med. 24, 927-930 (2018), incorporated herein by reference); DSBs can lead to selection for p53 null cells, which have increased risk of tumorigenesis (Ihry et al., Nat. Med. 24, 939-946 (2018), incorporated herein by reference); and DSB repair at on-target sites can cause large-scale gene deletions, inversions, or chromosome translocations (Kosicki et al., Nat Biotechnol. 36, 765-771 (2018), incorporated herein by reference). Homology donors work with the highest efficiency when supplied as recombinant AAV vectors or ssDNA, but these are also extremely laborious to produce (see e.g., Li et al., BioRxiv, 1-24 (2017), incorporated herein by reference). Furthermore, cloning of dsDNA donor templates with homology arms can be time-consuming and tedious.

[0006] In addition, gene integration with CRISPR-Cas9 and donor templates relies on homology-directed repair (HDR) for proper integration of the donor template. However, HDR efficiencies are known to be extremely low in many different cell types, and the DSBs that precede HDR are always repaired in heterogeneous ways across a cell population: some cells undergo HDR at one or both alleles, whereas far more cells undergo non-homologous end joining (NHEJ) at one or both alleles, which leads to small insertions or deletions being introduced at the target site (reviewed in: Pawelczak et al., ACS Chem Biol. 13, 389-396 (2018), incorporated herein by reference). This means that, across a cell population (e.g., as would be edited in a therapeutic or experimental application), only a small percentage of cells undergo the desired site-specific gene integration, whereas a far greater percentage undergoes heterogeneous repairs. The endogenous machinery for HDR is virtually absent in post-mitotic cells (i.e. non-dividing cells, which do not undergo DNA replication), such as neurons and terminally differentiated cells. Thus, there are no options for precise, targeted gene integration in these cell types.

[0007] Many gene therapy products, either commercialized or in clinical trials, use randomly integrating viruses to ferry therapeutics into the genome of patient cells (Naldini et al., Science 353, 1101-1102 (2016), incorporated herein by reference). With the present methods, these therapeutic genes are precisely integrated into known safe harbor loci within the genome, where stable expression can be assured, and risks of insertional mutagenesis are entirely avoided (Bokhoven et al., J Virol. 83, 283-294 (2009), incorporated herein by reference).

### SUMMARY

[0008] The present systems and methods for RNA-guided DNA integration obviates the need to introduce DSBs, and thus precludes the above hazards. The present systems and methods have significant utility in genetic engineering, including mammalian cell genome engineering.

[0009] In some embodiments, the present disclosure provides for a system for RNA-guided DNA integration, the system comprising: (i) an engineered Clustered Regularly Interspaced Short Palindromic Repeats (CRISPR)-CRISPR associated (Cas) (CRISPR-Cas) system, where the engineered CRISPR-Cas system is derived from a Type I CRISPR-Cas system and comprises a guide RNA (gRNA), where the gRNA is specific for a target site; and, (ii) an engineered transposon system derived from a Tn7-like transposon system, where the engineered transposon system comprises TnsA, TnsB, TnsC and TnsD/TniQ.

[0010] The present disclosure provides for a method for RNA-guided DNA integration. In some embodiments, the method may comprise introducing into a cell: (i) an engineered Clustered Regularly Interspaced Short Palindromic Repeats (CRISPR)-CRISPR associated (Cas) (CRISPR-Cas), where the engineered CRISPR-Cas system is derived from a Type I CRISPR-Cas system and comprises a guide RNA (gRNA) specific for a target site; (ii) an engineered transposon system derived from a Tn7-like transposon system, where the engineered transposon system comprises TnsA, TnsB, TnsC and TnsD/TniQ; and, (iii) a donor DNA to be integrated, wherein the donor DNA comprises a cargo nucleic acid flanked by transposon end sequences; where the engineered CRISPR-Cas system binds to the target site, and where the engineered transposon system integrates the cargo DNA proximal to the target site.

[0011] The method may comprise introducing into a cell one or more or all of the components of the present system.

[0012] The present system may comprise (i) one or more vectors encoding the engineered CRISPR-Cas system, and, (ii) one or more vectors encoding the engineered transposon system, wherein the CRISPR-Cas system and the transposon system are on the same vector or on at least two different vectors.

[0013] The engineered CRISPR-Cas system may comprise Cas6, Cas7, Cas5, and Cas8. In one embodiment, the stoichiometry of Cas6, Cas7, Cas5, and Cas8 is 1:6:1:1. In some embodiments, the Cas5 and Cas8 are linked as a functional fusion protein. In some embodiments, the Cas5 and Cas8 are separate.

[0014] The CRISPR-Cas system may comprise a Type-I-F variant CRISPR-Cas system. In some embodiments, the engineered transposon system is derived from a Tn7-like transposon system of Vibrio cholerae, Vibrio cholerae, Photobacterium iliopiscarium, Pseudoalteromonas sp. P1-25, Pseudoalteromonas ruthenica, Photobacterium ganghwense, Shewanella sp. UCD-KL21, Vibrio diazotrophicus, Vibrio sp. 16, Vibrio sp. F12, Vibrio splendidus, Aliivibrio wodanis, and Parashewanella spongiae. In some embodiments, the engineered transposon system is from a bacteria selected from the group consisting of: Vibrio cholerae strain 4874, Photobacterium iliopiscarium strain NCIMB, Pseudoalteromonas sp. P1-25, Pseudoalteromonas ruthenica strain S3245, Photobacterium ganghwense strain JCM, Shewanella sp. UCD-KL21, Vibrio cholerae strain OYP7G04, Vibrio cholerae strain M1517, Vibrio diazotrophicus strain 60.6F, Vibrio sp. 16, Vibrio sp. F12, Vibrio splendidus strain UCD-SED10, Aliivibrio wodanis 06/09/160, and Parashewanella spongiae strain HJ039. In an exemplary embodiment, the engineered transposon system is derived from Vibrio cholerae Tn6677.

[0015] The engineered CRISPR-Cas system may be nuclease-deficient.

[0016] The present system may further comprise a donor DNA. The donor DNA comprises a cargo nucleic acid flanked by transposon end sequences.

[0017] The integration may be about 40 base pairs (bp) to about 60 bp, about 48 bp to about 50 bp, about 48 bp, about 49 bp, or about 50 bp, from the 3′ end of the target site.

[0018] The cell may be a eukaryotic cell or a bacterial cell. The eukaryotic cell may be a mammalian cell, an avian cell, a plant cell or a fish cell. The mammalian cell may be derived from human, primate, cattle, sheep, pigs, dogs, mice or rat cells. In one embodiment, the mammalian cell is a human cell. The plant cell may be derived from rice, soybean, maize, tomato, banana, peanut, field pea, sunflower, canola, tobacco, wheat, barley, oats, potato, cotton, carnation, sorghum or lupin. The avian cell may be derived from chickens, ducks or geese.

[0019] In some embodiments, the systems and methods involve integration of the donor DNA without homologous recombination.

[0020] The target site may be adjacent to a protospacer adjacent motif (PAM).

[0021] In some embodiments, provided herein are systems for RNA-guided DNA integration, the system comprising one or more vectors encoding: a) an engineered Clustered Regularly Interspaced Short Palindromic Repeats (CRISPR)-CRISPR associated (Cas) (CRISPR-Cas) system, the engineered CRISPR-Cas system comprising: Cas5, Cas6, Cas7 and Cas8; and b) an engineered Tn7-like transposon system, the engineered Tn7-like transposon system comprising: i) TnsA, ii) TnsB, iii) TnsC, and iv) TnsD and/or TniQ.

[0022] In some embodiments, the CRISPR-cas system is a Type I-B CRISPR-cas system. In some embodiments, the CRISPR-cas system is a Type I-F CRISPR-cas system. In some embodiments, the CRISPR-cas system is a Type I-F variant where the Cas8 and Cas5 form a Cas8-Cas5 fusion. In some embodiments, the TnsD or TniQ comprises TniQ. In some embodiments, the systems further comprise a guide RNA (gRNA), wherein the gRNA is specific for a target site. In some embodiments, the systems further comprise a donor DNA to be integrated, wherein the donor DNA comprises a cargo nucleic acid sequence and first and second transposon end sequences, wherein the cargo nucleic acid sequence is flanked by the first and second transposon end sequences.

[0023] In some embodiments, the first and second transposon end sequences are Tn7 transposon end sequences. In some embodiments, the CRISPR-Cas system and the Tn7-like transposon system are on the same vector. In some embodiments, the engineered Tn7-like transposon system is derived from Vibrio cholerae Tn6677. In some embodiments, the engineered CRISPR-Cas system is nuclease-deficient. In some embodiments, the one or more vectors are plasmids.

[0024] In certain embodiments, the at least one cas protein of the CRISPR-cas system is derived from a Type V CRISPR-cas system. In some embodiments, the at least one cas protein is C2c5. In some embodiments, the at least one cas protein of the CRISPR-cas system is derived from a Type II-A CRISPR-cas system, and wherein the at least one Cas protein is Cas9. In some embodiments, the engineered CRISPR-cas system and said engineered transposon system are from a Type I CRISPR-cas system and transposon system, and wherein said system further comprises a second engineered CRISPR-cas system and a second engineered transposon system, both of which are from a Type V CRISPR-cas system and transposon system.

[0025] In some embodiments, provided herein are methods for RNA-guided DNA integration comprising: introducing into a cell: i) an engineered CRISPR-Cas system, and/or one or more vectors encoding the engineered CRISPR-Cas system, ii) an engineered transposon system, and/or one or more vectors encoding the engineered transposon system, and iii) a donor sequence comprising cargo nucleic acid sequence and first and second transposon end sequences, wherein, when one or more vectors are employed, the CRISPR-Cas system and the transposon system are on the same or different vector(s), wherein the cell comprises a nucleic acid sequence with a target site, wherein the CRISPR-cas system comprises: (a) at least one cas protein, and (b) a guide RNA (gRNA), wherein the CRISPR-cas system binds to a target site, and wherein the transposon system integrates the donor sequence downstream of the target site.

[0026] In some embodiments, the at least one Cas protein comprises Cas5, Cas6, Cas7, and Cas8. In some embodiments, the at least one Cas protein is derived from a Type I CRISPR-Cas system. In some embodiments, the at least one Cas protein comprises Cas5, Cas6, Cas7, and Cas8. In some embodiments, the Type I CRISPR-Cas system is Type I-B or Type I-F. In some embodiments, the Type I CRISPR-Cas system is a Type I-F variant where the Cas8 and the Cas5 form a Cas8-Cas5 fusion. In some embodiments, the transposon system comprises TnsA, TnsB, and TnsC. In some embodiments, the transposon system is derived from a Tn7-like transposon system.

[0027] In some embodiments, the transposon system comprises TnsA, TnsB, and TnsC. In some embodiments, the Tn7 transposon system is derived from Vibrio choleraea. In some embodiments, the transposon system comprises: i) TnsA, TnsB, and TnsC, and ii) TnsD and/or TniQ. In some embodiments, the at least one Cas protein of the CRISPR-Cas system is derived from a Type V CRISPR-Cas system. In some embodiments, the at least one Cas protein is C2c5. In some embodiments, the at least one Cas protein of the CRISPR-Cas system is derived from a Type II-A CRISPR-cas system. In some embodiments, the at least one Cas protein is Cas9. In some embodiments, the one or more vectors are plasmids (e.g., only one plasmid). In some embodiments, the engineered CRISPR-cas system and said engineered transposon system are from a Type I CRISPR-cas system and transposon system, and wherein said system further comprises a second engineered CRISPR-cas system and a second engineered transposon system, both of which are from a Type V CRISPR-cas system and transposon system.

[0028] In some embodiments, provided herein are systems for RNA-guided DNA integration, the system comprising one or more vectors encoding: a) an engineered Clustered Regularly Interspaced Short Palindromic Repeats (CRISPR)-CRISPR associated (Cas) (CRISPR-Cas) system, the engineered CRISPR-Cas system comprising: Cas5, Cas6, Cas7 and Cas8; and b) an engineered Tn7-like transposon system, the engineered Tn7-like transposon system comprising: i) TnsA, ii) TnsB, iii) TnsC, and iv) TnsD and/or TniQ.

[0029] In some embodiments, the CRISPR-Cas system is a Type I-B or Type I-F CRISPR-cas system. In some embodiments, the CRISPR-Cas system is a Type I-F variant where the Cas8 and the Cas5 form a Cas8-Cas5 fusion. In some embodiments, the Cas5 and Cas8 are expressed as separate non-fused proteins. In some embodiments, the one or more vectors are plasmids.

[0030] In some embodiments, the systems further comprise a guide RNA (gRNA), wherein the gRNA is specific for a target site. In some embodiments, the systems further comprise a donor DNA to be integrated, wherein the donor DNA comprises a cargo nucleic acid sequence and first and second transposon end sequences, and wherein the cargo nucleic acid sequence is flanked by the first and second transposon end sequences. In some embodiments, the donor DNA is at least 2 kb in length (e.g., 2 kb . . . 5 kb . . . 10 kb . . . or more). In certain embodiments, the CRISPR-Cas system and the Tn7-like transposon system are on the same vector. In some embodiments, the engineered Tn7-like transposon system is derived from Vibrio cholerae Tn6677. In some embodiments, the engineered CRISPR-Cas system is nuclease-deficient.

[0031] In some embodiments, provided herein are methods for RNA-guided DNA integration, wherein the method comprises introducing into a cell: a) one or more vectors encoding an engineered transposon-encoded CRISPR-Cas system comprising: i) an engineered Clustered Regularly Interspaced Short Palindromic Repeats (CRISPR)-CRISPR associated (Cas) (CRISPR-Cas) system, the engineered CRISPR-Cas system comprising: A) Cas5, Cas6, Cas7, and Cas8, and B) a guide RNA (gRNA), wherein the gRNA is specific for a target site; and ii) an engineered Tn7-like transposon system, the engineered Tn7-like transposon system comprising: A) TnsA, B) TnsB, C) TnsC, and D) TnsD and/or TniQ; and b) a donor DNA to be integrated, wherein the donor DNA comprises a cargo nucleic acid sequence and first and second transposon end sequences, and wherein the cargo nucleic acid sequence is flanked by the first and second transposon end sequences, and wherein the engineered transposon-encoded CRISPR-Cas system integrates the donor DNA proximal to the target site, and wherein the transposon-encoded CRISPR-Cas system and the donor DNA are on the same vector or on at least two different vectors.

[0032] In some embodiments, the CRISPR-cas system is a Type I-B or Type I-F CRISPR-cas system. In some embodiments, the CRISPR-cas system is a Type I-F variant where the Cas8 and Cas5 form a Cas8-Cas5 fusion. In some embodiments, the one or more vectors encode the engineered CRISPR-Cas system, wherein one or more vectors encode the engineered Tn7-like transposon system, and wherein the CRISPR-Cas system and the Tn7-like transposon system are on at least two different vectors. In some embodiments, the donor DNA is integrated about 40 base pairs (bp) to about 60 bp 3′ of the target site. In some embodiments, the donor DNA is integrated about 48 bp to about 50 bp 3′ of the target site. In some embodiments, the donor DNA is integrated about 50 bp 3′ of the target site.

[0033] In some embodiments, the cell is a eukaryotic cell or a bacterial cell. In some embodiments, the eukaryotic cell is a human cell. In some embodiments, the engineered Tn7-like transposon system is derived from Vibrio cholerae Tn6677. In some embodiments, the engineered CRISPR-Cas system is nuclease-deficient. In some embodiments, the target site is adjacent to a protospacer adjacent motif (PAM). In some embodiments, provided herein is a cell with the systems described above and herein.

[0034] In some embodiments, provided herein are kits comprising: a) one or more vectors encoding: i) an engineered Clustered Regularly Interspaced Short Palindromic Repeats (CRISPR)-CRISPR associated (Cas) (CRISPR-Cas) system, the engineered CRISPR-Cas system comprising: Cas5, Cas6, Cas7 and Cas8; and ii) an engineered Tn7-like transposon system, the engineered Tn7-like transposon system comprising: A) TnsA, B) TnsB, C) TnsC, and D) TnsD and/or TniQ; and b) at least one component selected from the group consisting of: i) an infusion device, ii) an intravenous solution bag, iii) a vial having a stopper pierceable by a hypodermic needle, iv) a buffer, v) a control plasmid, and vi) sequencing primers.

[0035] In some embodiments, the one or more vectors are plasmids. In some embodiments, the Cas5 and Cas8 are expressed as separate non-fused proteins. In some embodiments, the CRISPR-Cas system is a Type I-F variant where the Cas8 and the Cas5 form a Cas8-Cas5 fusion. In some embodiments, the kits further comprise a donor nucleic acid sequence, wherein the donor nucleic acid sequences comprise a cargo nucleic acid sequence and first and second transposon end sequences.

[0036] In some embodiments, provided herein are methods for inactivating a microbial gene, the method comprising introducing into one or more cells: a) an engineered transposon-encoded CRISPR-Cas system, and/or b) one or more vectors encoding the engineered transposon-encoded CRISPR-Cas system, wherein the transposon encoded CRISPR-Cas system comprises: i) at least one Cas protein, ii) a guide RNA (gRNA) specific for a target site that is proximal to the microbial gene, iii) an engineered transposon system, and iv) a donor DNA, wherein the transposon-encoded CRISPR-Cas system inserts the donor DNA within the microbial gene.

[0037] In some embodiments, the microbial gene is a bacterial antibiotic resistance gene, a virulence gene, or a metabolic gene. In some embodiments, the donor DNA comprises a cargo nucleic acid sequence and first and second transposon end sequences. In some embodiments, the cargo nucleic acid sequence encodes the engineered transposon encoded CRISPR-Cas system.

[0038] In some embodiments, the one or more cells are bacterial cells, and wherein the introducing comprises contacting an initial cell containing the transposon-encoded CRISPR-Cas system with a recipient cell such that the transposon-encoded CRISPR-Cas system is passed to the recipient cell via bacterial conjugation.

[0039] In some embodiments, the at least one Cas protein comprises Cas5, Cas6, Cas7, and Cas8. In some embodiments, the at least one Cas protein is derived from a Type I CRISPR-cas system. In some embodiments, the at least one Cas protein comprises Cas5, Cas6, Cas7, and Cas8. In some embodiments, the Type I CRISPR-cas system is Type I-B or Type I-F. In some embodiments, the Type I CRISPR-cas system is a Type I-F variant where the Cas8 and Cas5 form a Cas8-Cas5 fusion.

[0040] In some embodiments, the transposon system comprises TnsA, TnsB, and TnsC. In some embodiments, the transposon system is derived from a Tn7 transposon system. In some embodiments, the transposon system comprises TnsA, TnsB, and TnsC. In some embodiments, the Tn7 transposon system is derived from Vibrio cholerae. In some embodiments, the transposon system comprises: i) TnsA, TnsB, and TnsC, and ii) TnsD and/or TniQ. In some embodiments, the at least one Cas protein of the CRISPR-Cas system is derived from a Type V CRISPR-cas system. In some embodiments, the at least one Cas protein is C2c5. In some embodiments, the at least one Cas protein of the CRISPR-cas system is derived from a Type II-A CRISPR-Cas system. In some embodiments, the at least one Cas protein is Cas9. In some embodiments, the engineered CRISPR-cas system and said engineered transposon system are from a Type I CRISPR-cas system and transposon system, and wherein said system further comprises a second engineered CRISPR-cas system and a second engineered transposon system, both of which are from a Type V CRISPR-cas system and transposon system.

[0041] In some embodiments, provided herein are methods comprising: a) contacting a sample with: i) an engineered transposon-encoded CRISPR-Cas system, and/or ii) one or more vectors encoding the engineered transposon-encoded CRISPR-Cas system, wherein the sample comprises an input nucleic acid sequence comprising: A) a double stranded nucleic acid sequence of interest (NASI), B) a double stranded first flanking region on one side of the NASI, and C) a double stranded second flanking region on the other side of the NASI, and wherein the transposon-encoded CRISPR-Cas system comprises: i) at least one Cas protein, ii) an engineered transposon system; iii) a first left transposon end sequence; iv) a first right transposon end sequence which is not covalently attached to the first left transposon end sequence; and v) a first guide RNA (gRNA-1) targeting the first left and first right transposon end sequences to the first flanking region, and b) incubating the sample under conditions such that the first left transposon end sequence and the first right transposon end sequence are integrated into the first flanking region.

[0042] In some embodiment, provided herein are methods comprising: a) contacting a sample with: i) an engineered transposon-encoded CRISPR-Cas system, and/or ii) one or more vectors encoding the engineered transposon-encoded CRISPR-Cas system, wherein the sample comprises an input nucleic acid sequence comprising: A) a double stranded nucleic acid sequence of interest (NASI), B) a double stranded first flanking region on one side of the NASI, and C) a double stranded second flanking region on the other side of the NASI, and wherein the transposon-encoded CRISPR-Cas system comprises: i) at least one Cas protein, ii) an engineered transposon system; iii) a first left transposon end sequence; iv) a first right transposon end sequence which is not covalently attached to the first left transposon end sequence; v) a second left transposon end sequence; vi) a second right transposon end sequence which is not covalently attached to the second left transposon end sequence; vii) a first guide RNA (gRNA-1) targeting the first left and first right transposon end sequences to the first flanking region, and viii) a second guide RNA (gRNA-2) targeting the second left and second right transposon end sequences to the second flanking region; and b) incubating the sample under conditions such that: i) the first left transposon end sequence and the first right transposon end sequence are integrated into the first flanking region, and ii) the second left transposon end sequence and the second right transposon end sequence are integrated into the second flanking region.

[0043] In some embodiments, the methods further comprise: c) contacting the sample with: i) a first primer specific for the first left or right transposon end sequence, ii) a second primer specific for the second left or right transposon end sequence, and iii) a polymerase; and d) treating the sample under amplification conditions such that the NASI is amplified thereby generating amplified NASI. In some embodiments, the methods further comprise: e) sequencing the amplified NASI. In some embodiments, the sequencing is next-generation sequencing (NGS).

[0044] In some embodiments, the first transposon left or right end sequence comprises a first adapter sequence, and the second transposon left or right end sequence comprises a second adapter sequence. In some embodiments, the methods further comprise: c) contacting the sample with: i) a first primer specific for the first adapter sequence, ii) a second primer specific for the second adapter sequence, and iii) a polymerase; and d) treating the sample under amplification conditions such that the NASI is amplified thereby generating amplified NASI. In some embodiments, the methods further comprise: e) sequencing the amplified NASI. In some embodiments, the sequencing is next-generation sequencing (NGS). In some embodiments, the first and second adapter sequences are next-generation sequencing adapters. In some embodiments, the transposon left end sequence comprises a first UMI sequence, and the transposon right end sequence comprises a second UMI sequence.

[0045] In some embodiments, the at least one Cas protein comprises Cas5, Cas6, Cas7, and Cas8. In some embodiments, the at least one Cas protein is derived from a Type I CRISPR-cas system. In some embodiments, the at least one Cas protein comprises Cas5, Cas6, Cas7, and Cas8. In some embodiments, the Type I CRISPR-cas system is Type I-B or Type I-F. In some embodiments, the Type I CRISPR-cas system is a Type I-F variant where the Cas8 and Cas5 form a Cas8-Cas5 fusion. In some embodiments, the transposon system comprises TnsA, TnsB, and TnsC. In some embodiments, the transposon system is derived from a Tn7-like transposon system. In some embodiments, the transposon system comprises TnsA, TnsB, and TnsC.

[0046] In some embodiments, the Tn7 transposon system is derived from Vibrio choleraea. In some embodiments, the transposon system comprises: i) TnsA, TnsB, and TnsC, and ii) TnsD and/or TniQ. In some embodiments, the at least one Cas protein of the CRISPR-Cas system is derived from a Type V CRISPR-cas system. In some embodiments, the at least one Cas protein is C2c5. In some embodiments, the at least one Cas protein of the CRISPR-cas system is derived from a Type II-A CRISPR-Cas system. In some embodiments, the at least one Cas protein is Cas9. In some embodiments, the engineered CRISPR-cas system and said engineered transposon system are from a Type I CRISPR-cas system and transposon system, and wherein said system further comprises a second engineered CRISPR-cas system and a second engineered transposon system, both of which are from a Type V CRISPR-cas system and transposon system.

[0047] In some embodiments, provided herein are methods for RNA-guided DNA integration in a plant cell comprising: introducing into a plant cell: a) an engineered transposon-encoded CRISPR-Cas system, and/or ii) one or more vectors encoding the engineered transposon-encoded CRISPR-Cas system, wherein the transposon-encoded CRISPR-Cas system comprises: i) at least one Cas protein, ii) a guide RNA (gRNA) specific for a target site, iii) an engineered transposon system, and iv) a donor DNA, wherein the transposon-encoded CRISPR-Cas system integrates the donor DNA proximal to a target nucleic acid site in the plant cell.

[0048] In some embodiments, the plant cell is a cell of rice, soybean, maize, tomato, banana, peanut, field pea, sunflower, canola, tobacco, wheat, barley, oats, potato, cotton, carnation, sorghum, lupin, Solanum lycopersicum, Glycine max, Arabidopsis thaliana, Medicago truncatula, Brachypodium distachyon, Oryza sativa, Sorghum bicolor, Zea mays, or Solanum tuberosum. In some embodiments, the plants cell is of Petunia, the genus Atropa, Rutabaga, Celery, Switchgrass, Apple, Nicotiana benthamiana, or Setaria viridis. In some embodiments, the plant cell is a cell of a monocot or dicot plant.

[0049] In some embodiments, the integration of the donor DNA confers a change in one or more of the following traits to the plant cell: grain number, grain size, grain weight, panicle size, tiller number, fragrance, nutritional value, shelf life, lycopene content, starch content and/or ii) lower gluten content, reduced levels of a toxin, reduced levels of steroidal glycoalkaloids, a substitution of mitosis for meiosis, asexual propagation, improved haploid breeding, and/or shortened growth time. In some embodiments, the integration of the donor DNA confers one or more of the following traits to the plant cell: herbicide tolerance, drought tolerance, male sterility, insect resistance, abiotic stress tolerance, modified fatty acid metabolism, modified carbohydrate metabolism, modified seed yield, modified oil percent, modified protein percent, resistance to bacterial disease, resistance to fungal disease, and resistance to viral disease.

[0050] In some embodiments, the transposon-encoded CRISPR-Cas system integrates the donor DNA into the genome of the plant cell. In some embodiments, the one or more vectors encoding the transposon-encoded CRISPR-Cas system are introduced into the plant cell via Agrobacterium-mediated transformation of the plant cell.

[0051] In some embodiments, the donor DNA comprises first and second transposon end sequences. In some embodiments, the transposon system is a bacterial Tn7-like transposon system. In some embodiments, the transposon-encoded CRISPR-Cas system comprises TnsD and/or TniQ. In some embodiments, the transposon-encoded CRISPR-Cas system comprises TnsA, TnsB, and TnsC. In some embodiments, the transposon-encoded CRISPR-Cas system is nuclease-deficient. In some embodiments, the transposon-encoded CRISPR-Cas system is derived from a Type I CRISPR-Cas system. In some embodiments, the transposon-encoded CRISPR-Cas system comprises a Cascade complex.

[0052] In some embodiments, the transposon-encoded CRISPR-Cas system is derived from a Type II CRISPR-Cas system. In some embodiments, the transposon-encoded CRISPR-Cas system is derived from a Type V CRISPR-Cas system. In some embodiments, the transposon-encoded CRISPR-Cas system comprises C2c5. In some embodiments, the target site is flanked by a protospacer adjacent motif (PAM). In some embodiments, the donor DNA is integrated about 46-bp to 55-bp downstream of the target site. In some embodiments, the donor DNA is integrated about 47-bp to 51-bp downstream of the target site.

[0053] In certain embodiments, provided herein are modified plant cells produced by the methods described above and herein. In certain embodiments, provided herein are plants or seed comprising such plant cells. In some embodiments, provided herein are fruits, plant parts, or propagation materials of such plants.

[0054] In some embodiments, provided herein are methods for RNA-guided DNA integration in an animal cell comprising: introducing into an animal cell: a) an engineered transposon-encoded CRISPR-Cas system, and/or ii) one or more vectors encoding the engineered transposon-encoded CRISPR-Cas system, wherein the transposon-encoded CRISPR-Cas system comprises: i) at least one Cas protein, ii) a guide RNA (gRNA) specific for a target site, iii) an engineered transposon system, and iv) a donor DNA, wherein the transposon-encoded CRISPR-Cas system integrates the donor DNA proximal to a target site in the animal cell.

[0055] In some embodiments, the animal cell is a cell of a cell of a mouse, a rat, a rabbit, cattle, a sheep, a pig, a chicken, a horse, a buffalo, a camel, a turkey, or a goose. In some embodiments, the animal cell is a cell of a mammal. In some embodiments, the mammal is an orangutan, a monkey, a horse, cattle, a sheep, a goat, a pig, a donkey, a dog, a rabbit, a cat, a rat or a mouse. In some embodiments, the animal cell is a cell of a livestock animal. In some embodiments, the transposon-encoded CRISPR-Cas system integrates the donor DNA into the genome of the animal cell.

[0056] In some embodiments, the donor DNA comprises transposon end sequences. In some embodiments, the transposon system is a bacterial Tn7-like transposon system. In some embodiments, the transposon-encoded CRISPR-Cas system comprises TnsD and/or TniQ. In some embodiments, the transposon-encoded CRISPR-Cas system comprises TnsA, TnsB, and TnsC. In some embodiments, the transposon-encoded CRISPR-Cas system is nuclease-deficient. In some embodiments, the transposon-encoded CRISPR-Cas system is derived from a Type I CRISPR-Cas system. In some embodiments, the transposon-encoded CRISPR-Cas system comprises a Cascade complex. In some embodiments, the transposon-encoded CRISPR-Cas system is derived from a Type II CRISPR-Cas system. In some embodiments, the transposon-encoded CRISPR-Cas system is derived from a Type V CRISPR-Cas system. In some embodiments, the transposon-encoded CRISPR-Cas system comprises C2c5. In some embodiments, the target site is flanked by a protospacer adjacent motif (PAM). In some embodiments, the donor DNA is integrated about 46-bp to 55-bp downstream of the target site. In some embodiments, the donor DNA is integrated about 47-bp to 51-bp downstream of the target site. In some embodiments, the Tn7-like transposon system is derived from Vibrio cholerae.

[0057] In some embodiments, provided herein are modified non-human animal cells produced by the method described above and herein. In some embodiments, provided herein are genetically modified non-human animals comprising such animal cells. In some embodiments, provided herein are populations of cells, tissues, or organs comprising such animal cells.

[0058] In some embodiments, provided herein are compositions comprising: a) an engineered transposon-encoded CRISPR-Cas system, and/or b) one or more nucleic acid sequence(s) encoding the engineered transposon-encoded CRISPR-Cas system, wherein the engineered transposon-encoded CRISPR-Cas system comprises: i) at least one Cas protein, ii) a guide RNA (gRNA) specific for a target site in human DNA, iii) an engineered transposon system, and iv) a donor nucleic acid comprising a cargo nucleic acid sequence and first and second transposon end sequences, wherein the cargo nucleic acid sequence is flanked by the first and second transposon end sequences.

[0059] In some embodiments, provided herein are kits comprising: a) the above composition, and b) a device for holding the composition. In some embodiments, the device is selected from the group consisting of: an infusion device, an intravenous solution bag, and a vial having a stopper pierceable by a hypodermic needle.

[0060] In some embodiments, provided herein are methods of treating a subject (e.g., a human) comprising: a) administering (e.g., intravenously) one or more compositions to a mammalian subject that comprises subject cells and microbiome cells, wherein the one or more compositions comprise: i) an engineered transposon-encoded CRISPR-Cas system, and/or ii) one or more nucleic acid sequence(s) encoding the engineered transposon-encoded CRISPR-Cas system, wherein the transposon-encoded CRISPR-Cas system comprises: i) at least one Cas protein, ii) a guide RNA (gRNA) specific for a target site in the genome of the subject cells or the genome of the microbiome cells, iii) an engineered transposon system, and iv) a donor nucleic acid comprising a cargo nucleic acid sequence and first and second transposon end sequences, wherein the cargo nucleic acid sequence is flanked by the first and second transposon end sequences, wherein the transposon-encoded CRISPR-Cas system integrates the donor nucleic acid proximal to a target site in the genome in at least one of the subject cells, and/or in the genome of the at least one of the microbiome cells.

[0061] In certain embodiments, provided herein are methods of treating a cell in vitro comprising: a) contacting at least one cell in vitro with a composition that comprises: i) an engineered transposon-encoded CRISPR-Cas system, and/or ii) one or more nucleic acid sequence(s) encoding the engineered transposon-encoded CRISPR-Cas system, wherein the transposon-encoded CRISPR-Cas system comprises: i) at least one Cas protein, ii) a guide RNA (gRNA) specific for a target site in the genome of the cell, iii) an engineered transposon system, and iv) a donor nucleic acid sequence comprising a cargo nucleic acid sequence and first and second transposon end sequences, wherein the cargo nucleic acid sequence is flanked by the first and second transposon end sequences, and wherein the transposon-encoded CRISPR-Cas system integrates the donor nucleic acid proximal to a target site in the genome of at least one cell.

[0062] In some embodiments, provided herein are methods for RNA-guided nucleic acid integration in a cell comprising: a) introducing into a population of cells: i) an engineered transposon-encoded CRISPR-Cas system, and/or ii) one or more nucleic acid sequence(s) encoding the engineered transposon-encoded CRISPR-Cas system, wherein the engineered transposon-encoded CRISPR-Cas system comprises: A) at least one Cas protein, B) a guide RNA (gRNA) specific for a target site in the genome of the cell, C) an engineered transposon system, and D) a donor nucleic acid that is at least 2 kb in length, wherein the donor nucleic acid sequence comprises a cargo nucleic acid sequence and first and second transposon end sequences, wherein the cargo nucleic acid sequence is flanked by the first and second transposon end sequences; and b) culturing the cells under conditions such that the transposon-encoded CRISPR-Cas system integrates the donor nucleic acid sequence proximal to the target site in the genome of the cell. In some embodiments, the donor nucleic acid sequence is at least 10 kb in length, at least 50 kb in length, at least 100 kb in length, or between 20-60 kb in length. In some embodiments, the cells are bacterial cells and the conditions comprise culturing the bacterial cells at least 5 degrees Celsius below optimal growth temperature for the bacterial cells. In some embodiments, the bacterial cells are E. coli cells, and wherein the E. coli cells are cultured at temperature of 30 degrees Celsius or lower.

[0063] In some embodiments, the cell is a human cell, a plant cell, a bacterial cell, or an animal cell. In some embodiments, the one or more nucleic acid sequence(s) comprises one or vectors. In some embodiments, the one or more nucleic acid sequence(s) comprises at least one mRNA sequence.

[0064] In some embodiments, the subject is a human. In some embodiments, the subject is a human with a disease selected from the group consisting of: cancer, Duchenne muscular dystrophy (DMD), sickle cell disease (SCD), β-thalassemia, and hereditary tyrosinemia type I (HT1). In some embodiments, the cargo nucleic acid sequence comprises a therapeutic sequence.

[0065] In some embodiments, the transposon-encoded CRISPR-Cas system integrates the donor nucleic acid sequence using a cut-and-paste transposition pathway. In some embodiments, the at least one Cas protein comprises Cas5, Cas6, Cas7, and Cas8. In some embodiments, the at least one Cas protein comprises Cas5, Cas6, Cas7, and Cas8; and the engineered transposon system comprises: i) TnsA, ii) TnsB, iii) TnsC, and iv) TniQ. In some embodiments, at least one of the following applies: I) wherein the Cas5 and Cas8 form a Cas5-Cas8 fusion protein; II) wherein the TniQ and Cas6 form a TniQ-Cas6 fusion protein; and/or III) the TnsA and TnsB form a TnsA-TnsB fusion protein. In some embodiments, the TniQ is fused to the at least one Cas protein, generating a TniQ-Cas fusion polypeptide. In some embodiments, the at least one Cas protein is Cas6.

[0066] In some embodiments, the at least one Cas protein is derived from a Type I CRISPR-Cas system. In some embodiments, the at least one Cas protein comprises Cas5, Cas6, Cas7, and Cas8. In some embodiments, the Type I CRISPR-Cas system is Type I-B or Type I-F. In some embodiments, the Type I CRISPR-Cas system is a Type I-F variant where the Cas8 and Cas5 form a Cas8-Cas5 fusion. In some embodiments, the transposon system comprises TnsA, TnsB, and TnsC. In some embodiments, the engineered transposon system comprises: i) TnsA, ii) TnsB, iii) TnsC, and iv) TnsD and/or TniQ. In some embodiments, the TnsA and TnsB are expressed as a TnsA-TnsB fusion protein. In some embodiments, the engineered transposon system comprises: i) TnsA, ii) TnsB, iii) TnsC, and iv) a TniQ family protein.

[0067] In some embodiments, the methods, compositions, and kits further comprise a second guide RNA (gRNA-2), wherein the gRNA-2 directs the donor DNA to integrate proximal to a second and distinct target site. In some embodiments, the methods, compositions, and kits further comprise a third guide RNA (gRNA-3), wherein the gRNA-3 directs the donor DNA to integrate proximal to a third and distinct target site.

[0068] In some embodiments, the transposon system is derived from a Tn7-like transposon system. In some embodiments, the Tn7 transposon system is derived from Vibrio choleraea. In some embodiments, the at least one Cas protein of the CRISPR-cas system is derived from a Type V CRISPR-cas system. In some embodiments, the at least one Cas protein comprises C2c5. In some embodiments, the engineered transposon-encoded CRISPR-Cas system is from Scytonema hofmannii PCC 7110. In some embodiments, the at least one Cas protein of the CRISPR-cas system is derived from a Type II-A CRISPR-cas system. In some embodiments, the at least one Cas protein is Cas9. In some embodiments, the engineered CRISPR-cas system and the engineered transposon system are from a Type I CRISPR-cas system and transposon system, and wherein said system further comprises a second engineered CRISPR-cas system and a second engineered transposon system, both of which are from a Type V CRISPR-cas system and transposon system.

[0069] In some embodiments, the donor nucleic acid is at least 2 kb in length. In some embodiments, the donor nucleic acid is at least 10 kb in length. In some embodiments, the one or more nucleic acid sequences are one or more viral vectors selected from the group consisting of: retroviral, lentiviral, adenoviral, adeno-associated and herpes simplex viral vectors. In some embodiments, the one or more nucleic acid sequence(s) further comprises one or more one promoters. In some embodiments, the one or more nucleic acid sequences is one and only one vector. In some embodiments, the one vector comprises one and only one promoter.

[0070] In some embodiments, the at least one Cas protein comprises Cas5, Cas6, Cas7, and Cas8. In some embodiments, the at least one Cas protein comprises Cas5, Cas6, Cas7, and Cas8, and wherein the Cas5 and Cas8 form a fusion protein. In some embodiments, the first transposon end sequence is a left transposon end sequence, and wherein the second transposon end sequence is a right transposon end sequence.

[0071] In some embodiments, the left and/or right transposon end sequence is a variant sequence that increase the efficiency of integration of the donor nucleic acid sequence compared to corresponding wild-type left and/or right transposon end sequences. In some embodiments, the left and/or right transposon end sequence alter the orientation bias of the donor nucleic acid sequence when integrated proximal to the target site in the genome as compared to corresponding wild-type left and/or right transposon end sequences. In some embodiments, the orientation bias favors tRL. In some embodiments, the orientation bias favors tLR.

[0072] In some embodiments, the first and/or second transposon end sequences code for a functional protein linker sequence. In some embodiments, the genome of the subject cells or microbiome cells comprises a target-protein encoding gene, wherein the cargo nucleic acid sequence encodes an amino acid sequence of interest, and wherein the donor nucleic acid sequence is inserted adjacent to or within the target protein-encoding gene to generate a fusion-protein encoding sequence, wherein the fusion protein comprises the amino acid sequence of interest appended to the target protein. In some embodiments, the amino acid sequence of interest is selected from the group consisting of: a fluorescent protein, an epitope tag, and a degron tag.

[0073] In some embodiments, the genome of the cells or microbiome cells comprises a target-protein encoding gene, wherein the cargo nucleic acid sequence comprises: i) an amino acid sequence of interest encoding region (AASIER), ii) splice acceptor and/or donor sites that flank the AASIER, and wherein the donor nucleic acid sequence is inserted adjacent to or within the target protein-encoding gene to generate a synthetic engineered exon that enables in-frame tagging of the target protein with the amino acid sequence of interest.

[0074] In some embodiments, the engineered transposon-encoded CRISPR-Cas system is from a bacteria selected from the group consisting of: Vibrio cholerae, Photobacterium iliopiscarium, Pseudoalteromonas sp. P1-25, Pseudoalteromonas ruthenica, Photobacterium ganghwense, Shewanella sp. UCD-KL21, Vibrio diazotrophicus, Vibrio sp. 16, Vibrio sp. F12, Vibrio splendidus, Aliivibrio wodanis, and Parashewanella spongiae. In some embodiments, the engineered transposon-encoded CRISPR-Cas system is from a bacteria selected from the group consisting of: Vibrio cholerae strain 4874, Photobacterium iliopiscarium strain NCIMB, Pseudoalteromonas sp. P1-25, Pseudoalteromonas ruthenica strain S3245, Photobacterium ganghwense strain JCM, Shewanella sp. UCD-KL21, Vibrio cholerae strain OYP7G04, Vibrio cholerae strain M1517, Vibrio diazotrophicus strain 60.6F, Vibrio sp. 16, Vibrio sp. F12, Vibrio splendidus strain UCD-SED10, Aliivibrio wodanis 06/09/160, and Parashewanella spongiae strain HJ039.

[0075] In some embodiments, the cargo nucleic acid sequence comprises an element selected from the group consisting of: a natural transcription promoter element, a synthetic transcriptional promoter element, an inducible transcriptional promoter element, a constitutive transcriptional promoter element, a natural transcriptional termination element, a synthetic transcriptional termination element, an origin of replication, a replication termination sequence, a centromeric sequence, and a telomeric sequence. In some embodiments, the cargo nucleic acid sequence encodes at least one of the following: a therapeutic protein, a metabolic pathway, and/or a biosynthetic pathway.

[0076] In some embodiments, provided herein are methods of treating a cell comprising: a) contacting at least one cell with a composition that comprises: i) an engineered transposon-encoded CRISPR-Cas system, and/or ii) one or more nucleic acid sequence(s) encoding the engineered transposon-encoded CRISPR-Cas system, wherein the transposon-encoded CRISPR-Cas system comprises: i) at least one Cas protein, ii) at least one guide RNA (gRNA) specific for a target site in the genome of the at least one cell, iii) an engineered transposon system, and iv) a donor nucleic acid sequence comprising a cargo nucleic acid sequence and first and second transposon end sequences, wherein the cargo nucleic acid sequence is flanked by the first and second transposon end sequences, and wherein the cargo nucleic acid is at least 2 kb (e.g., 2 kb . . . 5 kb . . . 50 kb . . . 100 kb . . . or more) in length, and wherein the transposon-encoded CRISPR-Cas system integrates the donor nucleic acid proximal to the target site in the genome of the at least one cell.

[0077] In some embodiments, provided herein are compositions comprising: i) an engineered transposon-encoded CRISPR-Cas system, and/or ii) one or more nucleic acid sequence(s) encoding the engineered transposon-encoded CRISPR-Cas system, wherein the transposon-encoded CRISPR-Cas system comprises: a) at least one Cas protein, b) at least one guide RNA (gRNA) specific for a target site in the genome of at least one cell, c) an engineered transposon system, and d) a donor nucleic acid sequence comprising a cargo nucleic acid sequence and first and second transposon end sequences, wherein the cargo nucleic acid sequence is flanked by the first and second transposon end sequences, and wherein the cargo nucleic acid is at least 2 kb (e.g., 2 kb . . . 5 kb . . . 50 kb . . . 100 kb . . . or more) in length.

[0078] In some embodiments, provided herein are compositions comprising: a self-transposable nucleic acid sequence comprising: a) a mobile nucleic acid sequence encoding a transposon-encoded CRISPR-Cas system, and b) first and second transposon end sequences that flank the mobile nucleic acid sequence, wherein the transposon-encoded CRISPR-Cas system comprises: i) at least one Cas protein, ii) a guide RNA (gRNA) specific for a target site, and iii) an engineered transposon system.

[0079] In some embodiments, provided herein are methods for targeting a cancer cell comprising: introducing into a cancer cell: i) an engineered transposon-encoded CRISPR-Cas system, and/or ii) one or more nucleic acid sequence(s) encoding the engineered transposon-encoded CRISPR-Cas system, wherein the engineered transposon-encoded CRISPR-Cas system comprises: A) at least one Cas protein, B) a guide RNA (gRNA) specific for a target site in the genome of the cancer cell, C) an engineered transposon system, and D) a donor nucleic acid sequence comprising first and second transposon end sequences. In certain embodiments, the introducing is under conditions such that the transposon-encoded CRISPR-Cas system integrates the donor nucleic acid sequence proximal to the target site in the genome of the cancer cell. In some embodiments, the target site is in a genomic sequence associated with an oncogene. In some embodiments, the donor nucleic acid disrupts pathogenic expression of an oncogene.

[0080] In some embodiments, the compositions further comprise a vector, and wherein the self-transposable nucleic acid sequence is present in the vector. In some embodiments, the compositions further comprise a cell having genomic DNA, and wherein the self-transposable nucleic acid sequence is present in the genomic DNA.

[0081] In some embodiments, the at least one Cas protein comprises Cas5, Cas6, Cas7, and Cas8. In some embodiments, the at least one Cas protein is derived from a Type I CRISPR-cas system. In some embodiments, the at least one Cas protein comprises Cas5, Cas6, Cas7, and Cas8. In some embodiments, the Type I CRISPR-cas system is Type I-B or Type I-F. In some embodiments, the Type I CRISPR-cas system is a Type I-F variant where the Cas8 and the Cas5 form a Cas8-Cas5 fusion. In some embodiments, the transposon system comprises TnsA, TnsB, and TnsC. In some embodiments, the engineered transposon system comprises: i) TnsA, ii) TnsB, iii) TnsC, and iv) TnsD and/or TniQ. In some embodiments, the TnsA and TnsB are expressed as a TnsA-TnsB fusion protein. In some embodiments, the TniQ is fused to the at least one Cas protein, generating a TniQ-Cas fusion polypeptide. In some embodiments, the at least one Cas protein is Cas6. In some embodiments, the engineered transposon system comprises: i) TnsA, ii) TnsB, iii) TnsC, and iv) a TniQ family protein.

[0082] In some embodiments, the transposon system is derived from a Tn7-like transposon system. In some embodiments, the Tn7 transposon system is derived from Vibrio choleraea. In some embodiments, the at least one Cas protein of the CRISPR-cas system is derived from a Type V CRISPR-cas system. In some embodiments, the at least one Cas protein is C2c5. In some embodiments, the at least one Cas protein of the CRISPR-Cas system is derived from a Type II-A CRISPR-Cas system. In some embodiments, the at least one Cas protein is Cas9. In some embodiments, the at least one Cas protein comprises Cas2, Cas3, Cas5, Cas6, Cas7, and Cas8. In some embodiments, the at least one Cas protein comprises Cas5, Cas6, Cas7, and Cas8; and the engineered transposon system comprises: i) TnsA, ii) TnsB, iii) TnsC, and iv) TniQ. In some embodiments, at least one of the following applies: I) wherein the Cas5 and Cas8 form a Cas5-Cas8 fusion protein; II) wherein the TniQ and Cas6 form a TniQ-Cas6 fusion protein; and/or III) the TnsA and TnsB form a TnsA-TnsB fusion protein.

[0083] In some embodiments, the first transposon end sequence is a left transposon end sequence, and wherein the second transposon end sequence is a right transposon end sequence. In some embodiments, the left and/or right transposon end sequence is a variant sequence that increase the efficiency of integration of the donor nucleic acid sequence compared to corresponding wild-type left and/or right transposon end sequences. In some embodiments, the left and/or right transposon end sequence alter the orientation bias of the donor nucleic acid sequence when integrated proximal to the target site in the genome as compared to corresponding wild-type left and/or right transposon end sequences. In some embodiments, the orientation bias favors tRL. In some embodiments, the orientation bias favors tLR.

[0084] In some embodiments, the first and/or second transposon end sequences code for a functional protein linker sequence. In some embodiments, the engineered transposon-encoded CRISPR-Cas system is from a bacteria selected from the group consisting of: Vibrio cholerae, Photobacterium iliopiscarium, Pseudoalteromonas sp. P1-25, Pseudoalteromonas ruthenica, Photobacterium ganghwense, Shewanella sp. UCD-KL21, Vibrio diazotrophicus, Vibrio sp. 16, Vibrio sp. F12, Vibrio splendidus, Aliivibrio wodanis, and Parashewanella spongiae. In some embodiments, the engineered transposon-encoded CRISPR-Cas system is from a bacteria selected from the group consisting of: Vibrio cholerae strain 4874, Photobacterium iliopiscarium strain NCIMB, Pseudoalteromonas sp. P1-25, Pseudoalteromonas ruthenica strain S3245, Photobacterium ganghwense strain JCM, Shewanella sp. UCD-KL21, Vibrio cholerae strain OYP7G04, Vibrio cholerae strain M1517, Vibrio diazotrophicus strain 60.6F, Vibrio sp. 16, Vibrio sp. F12, Vibrio splendidus strain UCD-SED10, Aliivibrio wodanis 06/09/160, and Parashewanella spongiae strain HJ039. In some embodiments, the engineered transposon-encoded CRISPR-Cas system is from Scytonema hofmannii PCC 7110.

[0085] In some embodiments, provided herein are methods of administering the compositions described above and herein to a subject (e.g., human). In some embodiments, provided herein are methods of contacting a cell (e.g., human cell) in vitro with the compositions described above and herein. In some embodiments, the engineered CRISPR-cas system and said engineered transposon system are from a Type I CRISPR-cas system and transposon system, and wherein said system further comprises a second engineered CRISPR-cas system and a second engineered transposon system, both of which are from a Type V CRISPR-cas system and transposon system.

[0086] In some embodiments, provided herein are methods of treating a cell comprising: a) contacting at least one cell with a composition that comprises: i) an engineered transposon-encoded CRISPR-Cas system, and/or ii) one or more nucleic acid sequence(s) encoding the engineered transposon-encoded CRISPR-Cas system, wherein the transposon-encoded CRISPR-Cas system comprises: i) at least one Cas protein, ii) at least one guide RNA (gRNA) specific for a target site in the genome of the at least one cell, iii) an engineered transposon system, and iv) a donor nucleic acid comprising a cargo nucleic acid sequence and first and second transposon end sequences, wherein the cargo nucleic acid sequence is flanked by the first and second transposon end sequences, and wherein the transposon-encoded CRISPR-Cas system integrates the donor nucleic acid proximal to the target site in the genome of the at least one cell.

[0087] In some embodiments, provided herein are methods of treating a cell comprising: a) contacting at least one cell with a composition that comprises: i) an engineered transposon-encoded CRISPR-Cas system, and/or ii) one or more nucleic acid sequence(s) encoding the engineered transposon-encoded CRISPR-Cas system, wherein the transposon-encoded CRISPR-Cas system comprises: i) at least one Cas protein, ii) an engineered transposon system, and iii) a donor nucleic acid sequence comprising a cargo nucleic acid sequence and first and second transposon end sequences, wherein the cargo nucleic acid sequence is flanked by the first and second transposon end sequences, and wherein at least part of the cargo nucleic acid sequence encodes at least one guide RNA (gRNA) specific for a target site in the genome of the cell, and wherein the transposon-encoded CRISPR-Cas system integrates the donor nucleic acid proximal to the target site in the genome of the at least one cell.

[0088] In some embodiments, provides herein are methods of treating a cell comprising: a) contacting at least one cell with a composition that comprises: i) an engineered transposon-encoded CRISPR-Cas system, and/or ii) one or more nucleic acid sequence(s) encoding the engineered transposon-encoded CRISPR-Cas system, wherein the transposon-encoded CRISPR-Cas system comprises: i) at least one Cas protein, ii) at least one guide RNA (gRNA) specific for a target site, iii) an engineered transposon system comprising: A) TnsA, B) TnsB, C) TnsC, and D) a TniQ family protein, wherein the TnsA comprises one or more inactivating point mutations, and iv) a donor nucleic acid sequence comprising a cargo nucleic acid sequence and first and second transposon end sequences, wherein the cargo nucleic acid sequence is flanked by the first and second transposon end sequences, and wherein the transposon-encoded CRISPR-Cas system integrates a copy of the donor nucleic acid proximal to a target site in the genome of the at least one cell using a using a copy-and-paste transposition pathway involving replicative transposition.

[0089] In some embodiments, provided herein are methods of treating a cell comprising: a) contacting at least one cell with a composition that comprises: i) first and second engineered transposon-encoded CRISPR-Cas systems, and/or ii) one or more nucleic acid sequence(s) encoding the first and second engineered transposon-encoded CRISPR-Cas systems, wherein the first transposon-encoded CRISPR-Cas system comprises: i) at least one Cas protein, ii) a first RNA (gRNA) specific for a first target site, iii) an engineered transposon system, and iv) a first donor nucleic acid sequence comprising a first cargo nucleic acid sequence and first and second transposon end sequences, wherein the first cargo nucleic acid sequence is flanked by the first and second transposon end sequences, and wherein the second transposon-encoded CRISPR-Cas system comprises: i) at least one Cas protein, ii) a second RNA (gRNA) specific for a second target site, iii) an engineered transposon system, and iv) a second donor nucleic acid sequence comprising a second cargo nucleic acid sequence and third and fourth transposon end sequences, wherein the second cargo nucleic acid sequence is flanked by the third and fourth transposon end sequences, and wherein the first transposon-encoded CRISPR-Cas system integrates the first donor nucleic acid proximal to the first target site in the at least one cell, and wherein the second transposon-encoded CRISPR-Cas system integrates the second donor nucleic acid proximal to the second target site in the at least one cell.

[0090] In some embodiments, provided herein are methods comprising: a) contacting a sample with: i) an engineered transposon-encoded CRISPR-Cas system, and/or ii) one or more vectors encoding the engineered transposon-encoded CRISPR-Cas system, wherein the sample comprises an input nucleic acid sequence comprising: A) a double stranded nucleic acid sequence of interest (NASI), B) a double stranded first flanking region on one side of the NASI, and C) a double stranded second flanking region on the other side of the NASI, and wherein the transposon-encoded CRISPR-Cas system comprises: i) at least one Cas protein, ii) an engineered transposon system; iii) a first left transposon end sequence; iv) a first right transposon end sequence which is not covalently attached to the first left transposon end sequence; v) a second left transposon end sequence; vi) a second right transposon end sequence which is not covalently attached to the second left transposon end sequence; vii) a first guide RNA (gRNA-1) targeting the first left and first right transposon end sequences to the first flanking region, and viii) a second guide RNA (gRNA-2) targeting the second left and second right transposon end sequences to the second flanking region, and ix) a third guide RNA (gRNA-3), b) incubating the sample under conditions such that: i) the first left transposon end sequence and the first right transposon end sequence are integrated into the first flanking region; ii) the second left transposon end sequence and the second right transposon end sequence are integrated into the second flanking region, thereby generating a transposable sequence comprising the NASI flanked by the first left transposon end sequence and the second right transposon end sequence; and iii) the transposable sequence is cut from its location in the genome by the engineered transposon system and pasted into a different location in the genome guided by the gRNA-3.

[0091] In some embodiments, provided herein are methods of treating a cell comprising: a) contacting at least one cell with a composition that comprises: i) first and second engineered transposon-encoded CRISPR-Cas systems, and/or ii) one or more nucleic acid sequence(s) encoding the first and second engineered transposon-encoded CRISPR-Cas systems, wherein the first transposon-encoded CRISPR-Cas system comprises: i) at least one Cas protein, ii) a first RNA (gRNA) specific for a first target site in the genome of the cell, iii) an engineered transposon system, and iv) a first donor nucleic acid sequence comprising a first cargo nucleic acid sequence and first and second transposon end sequences, wherein the first cargo nucleic acid sequence is flanked by the first and second transposon end sequences, and wherein the second transposon-encoded CRISPR-Cas system comprises: i) at least one Cas protein, ii) a second RNA (gRNA) specific for a second target site in the genome of the cell, iii) an engineered transposon system, and iv) a second donor nucleic acid sequence comprising a second cargo nucleic acid sequence and third and fourth transposon end sequences, wherein the second cargo nucleic acid sequence is flanked by the third and fourth transposon end sequences, and b) incubating the cell under conditions such that: i) the first transposon-encoded CRISPR-Cas system integrates the first donor nucleic acid proximal to the first target site in the genome of at least one cell; ii) the second transposon-encoded CRISPR-Cas system integrates the second donor nucleic acid proximal to the second target site in the genome of at least one cell, thereby generating a transposable sequence comprising the first transposon end sequence, the fourth transposon end sequence, and the region of the genome between the first and fourth transposon end sequences; and iii) the transposable sequence is cut from its location in the genome by the engineered transposon system and pasted into a different location in the genome.

[0092] In some embodiments, the engineered transposon system comprises: i) TnsA, ii) TnsB, iii) TnsC, and iv) a TniQ family protein. In some embodiments, the at least one guide RNA comprises at least two distinct gRNAs, each of which direct the donor nucleic acid to integrate proximal to a distinct target site. In certain embodiments, the at least one guide RNA comprises at least ten distinct gRNAs, each of which direct the donor nucleic acid to integrate at a distinct target site.

[0093] In some embodiments, the first transposon end sequence is a left transposon end sequence, and wherein the second transposon end sequence is a right transposon end sequence. In some embodiments, the left and/or right transposon end sequence is a variant sequence that increase the efficiency of integration of the donor nucleic acid sequence compared to corresponding wild-type left and/or right transposon end sequences. In some embodiments, the left and/or right transposon end sequence alter the orientation bias of the donor nucleic acid sequence when integrated proximal to the target site in the genome as compared to corresponding wild-type left and/or right transposon end sequences. In some embodiments, the orientation bias favors tRL. In some embodiments, the orientation bias favors tLR.

[0094] In some embodiments, the first and/or second transposon end sequences code for a functional protein linker sequence. In some embodiments, the genome of the cell comprises a target-protein encoding gene, wherein the cargo nucleic acid sequence encodes an amino acid sequence of interest, and wherein the donor nucleic acid sequence is inserted adjacent to or within the target protein-encoding gene to generate a fusion-protein encoding sequence, wherein the fusion protein comprises the amino acid sequence of interest appended to the target protein. In some embodiments, the amino acid sequence of interest is selected from the group consisting of: a fluorescent protein, an epitope tag, and a degron tag. In some embodiments, the genome of the cell comprises a target-protein encoding gene, wherein the cargo nucleic acid sequence comprises: i) an amino acid sequence of interest encoding region (AASIER), ii) splice acceptor and/or donor sites that flank the AASIER, and wherein the donor nucleic acid sequence is inserted adjacent to or within the target protein-encoding gene to generate a synthetic engineered exon that enables in-frame tagging of the target protein with the amino acid sequence of interest.

[0095] In some embodiments, the at least one Cas protein comprises Cas5, Cas6, Cas7, and Cas8. In some embodiments, the Type I CRISPR-cas system is a Type I-F variant. In some embodiments, the Type I-F variant is from a bacteria selected from the group consisting of: Vibrio cholerae, Photobacterium iliopiscarium, Pseudoalteromonas sp. P1-25, Pseudoalteromonas ruthenica, Photobacterium ganghwense, Shewanella sp. UCD-KL21, Vibrio diazotrophicus, Vibrio sp. 16, Vibrio sp. F12, Vibrio splendidus, Aliivibrio wodanis, and Parashewanella spongiae. In certain embodiments, the Type I-F variant is from a bacteria selected from the group consisting of: Vibrio cholerae strain 4874, Photobacterium iliopiscarium strain NCIMB, Pseudoalteromonas sp. P1-25, Pseudoalteromonas ruthenica strain S3245, Photobacterium ganghwense strain JCM, Shewanella sp. UCD-KL21, Vibrio cholerae strain OYP7G04, Vibrio cholerae strain M1517, Vibrio diazotrophicus strain 60.6F, Vibrio sp. 16, Vibrio sp. F12, Vibrio splendidus strain UCD-SED10, Aliivibrio wodanis 06/09/160, and Parashewanella spongiae strain HJ039. In some embodiments, the Type I-F variant if from Vibrio cholerae strain HE-45.

[0096] In some embodiments, the at least one Cas protein of the CRISPR-cas system is derived from a Type V CRISPR-cas system. In some embodiments, the Type V CRISPR-Cas system is from Scytonema hofmannii PCC 7110.

[0097] In some embodiments, the transposon-encoded CRISPR-Cas system integrates the donor nucleic acid sequence using a cut-and-paste transposition pathway. In some embodiments, the at least one gRNA contains an extended-length guide sequence that targets an extended-length target site, wherein the extended-length guide sequence is at least 25 nucleotides in length (e.g., 25 . . . 30 . . . 40 . . . 50 or more). In some embodiments, the at least one gRNA comprises an extended-length guide sequence.

[0098] In some embodiments, the engineered transposon system comprises: i) TnsA, ii) TnsB, iii) TnsC, and iv) a TniQ family protein. In some embodiments, the TnsA and TnsB are fused into a single TnsA-TnsB fusion polypeptide. In some embodiments, the TniQ is fused to the at least one Cas protein, generating a TniQ-Cas fusion polypeptide.

[0099] In some embodiments, the cargo nucleic acid sequence comprises an element selected from the group consisting of: a natural transcription promoter element, a synthetic transcriptional promoter element, an inducible transcriptional promoter element, a constitutive transcription promoter element, a natural transcriptional termination element, a synthetic transcriptional termination element, an origin of replication, a replication termination sequence, a centromeric sequence, and a telomeric sequence. In some embodiments, the cargo nucleic acid sequence encodes at least one of the following: a therapeutic protein, a metabolic pathway, and/or a biosynthetic pathway.

[0100] In some embodiments, provided herein are systems for RNA-guided DNA integration, comprising: a vector (or other nuclei acid sequence) comprising from 5′ to 3′: a) nucleic acid encoding one or more transposon system proteins; b) nucleic acid encoding a guide RNA; and c) nucleic acid encoding a donor nucleic acid comprising first and second transposon ends and a cargo nucleic acid.

[0101] In some embodiments, the nucleic acid encoding a guide RNA is in proximity to said first transposon end, such that self-targeting of proximal to said guide RNA is prevented. In some embodiments, the nucleic acid encoding the guide RNA is in proximity to the donor nucleic acid, such that self-targeting of proximal to said guide RNA is prevented.

[0102] In some embodiments, the nucleic acid encoding the guide RNA is within 10,000 bases of said first transposon end (e.g., within 10,000 . . . 5000 . . . 2000 . . . 1000 . . . 500, 200 . . . 100 . . . 50 . . . 20 . . . 10 bases of the first transposon end). In some embodiments, the nucleic acid encoding the guide RNA is within 1000 or 500 bases of the first transposon end.

[0103] In some embodiments, the transposon system proteins comprise one or more of TnsA, TnsB, TnsC, and TnsD and/or TniQ. In some embodiments, the vector further comprises nucleic acid expressing one or more cas proteins positioned between said nucleic acid encoding one or more transposon system proteins and said nucleic acid encoding a donor. In some embodiments, the one or more Cas protein comprise Cas5, Cas6, Cas7, and Cas8; or c2C5.

[0104] In some embodiments, provided herein are methods of reducing self-targeting of an RNA-guided DNA integration system comprising expressing the vector (or other nucleic acid sequence) of the above in cell. In some embodiments, the cell is a cell type whose fitness is impacted by maintenance of vectors.

### BRIEF DESCRIPTION OF THE DRAWINGS

[0105] FIGS. 1A-1I show the RNA-guided DNA integration with a V. cholerae transposon. FIG. 1A is an exemplary scenario for Tn6677 transposition into plasmid or genomic target sites complementary to a gRNA. FIG. 1B is exemplary plasmid schematics for transposition experiments in which a transposon is mobilized in trans. The CRISPR array contains two repeats (grey diamonds) and a single spacer (maroon rectangle). FIG. 1C is the genomic locus targeted by gRNA-1 and gRNA-2, two potential transposition products, and the PCR primer pairs to selectively amplify them. FIG. 1D is the PCR analysis of transposition with a non-targeting (nt) gRNA and gRNA-1, resolved by agarose gel electrophoresis. FIG. 1E is PCR analysis of transposition with gRNA-nt, gRNA-1, and gRNA-2 using four distinct primer pairs, resolved by agarose gel electrophoresis. FIG. 1F is Sanger sequencing chromatograms for upstream and downstream junctions of genomically integrated transposons from experiments with gRNA-1 and gRNA-2. Overlapping peaks for gRNA-2 suggest the presence of multiple integration sites. The distance between the 3′ end of the protospacer and the first base of the transposon sequence is designated ‘d’. TSD, target site duplication. FIG. 1G is next-generation sequencing (NGS) analysis of the distance between the Cascade target site and transposon integration site, determined for gRNA-1 and gRNA-2 with four primer pairs. FIG. 1H is the genomic locus targeted by gRNA-3 and gRNA-4. FIG. 1I is the PCR analysis of transposition with gRNA-nt, gRNA-3, and gRNA-4, resolved by agarose gel electrophoresis.

[0106] FIGS. 2A-2F show that TniQ forms a complex with Cascade and is used for RNA-guided DNA integration. FIG. 2A is PCR analysis of transposition with gRNA-4 and a panel of gene deletions or point mutations, resolved by agarose gel electrophoresis. FIG. 2B is SDS-PAGE analysis of purified TniQ, Cascade, and a TniQ-Cascade co-complex. * denotes an HptG contaminant. FIG. 2C is denaturing urea-PAGE analysis of co-purifying nucleic acids. FIG. 2D is RNA sequencing analysis of RNA co-purifying with Cascade (top). Reads mapping to the CRISPR array reveal the mature gRNA sequence (SEQ ID NO: 1655, bottom). FIG. 2E is PCR analysis (left) of transposition experiments testing whether generic R-loop formation or artificial TniQ tethering can direct targeted integration. The W. cholerae transposon and TnsA-TnsB-TnsC were combined with DNA targeting components comprising either V. cholerae Cascade (Vch), P. aeruginosa Cascade (Pae), or S. pyogenes dCas9-RNA (dCas9). TniQ was either expressed on its own from pTnsABCQ or as a fusion to the targeting complex (pCas-Q) at either the Cas6 C-terminus (6), Cas8 N-terminus (8), or dCas9 N- (N) or C-terminus (C). The schematics (right) show some of the embodiments being test. FIG. 2F is a schematic of the R-loop formed upon target DNA binding by Cascade, with the approximate position of each protein subunit denoted. The putative TniQ binding site and the distance to the primary integration site are indicated.

[0107] FIGS. 3A-3K demonstrate the influence of cargo size, PAM sequence, and gRNA mismatches on RNA-guided DNA integration. FIG. 3A is a schematic of alternative integration orientations and the primer pairs to selectively detect them by qPCR. FIG. 3B is qPCR-based quantification of transposition efficiency in both orientations with gRNA-nt, gRNA-3, and gRNA-4. FIG. 3C is total integration efficiency with gRNA-4 as a function of transposon size. The arrow denotes the ‘WT’ pDonor used in most assays throughout this study. FIG. 3D shows a schematic of gRNAs tiling along the lacZ gene in 1-bp increments relative to gRNA-4 (4.0) (top), and the resulting integration efficiencies determined by qPCR (bottom). Data are normalized to gRNA-4.0, and the 2-nucleotide PAM for each gRNA is shown. FIG. 3E is a heat map showing the integration site distribution (x-axis) for each of the tiled gRNAs (y-axis) in FIG. 3D, determined by NGS. The 49-bp distance for each gRNA is denoted with a black box. FIG. 3F is a schematic of gRNAs mutations in 4-nt blocks to introduce gRNA-target DNA mismatches (top), and the resulting integration efficiencies determined by qPCR (bottom). Data are normalized to gRNA-4. FIG. 3G is the gRNA-4 spacer length was shortened or lengthened by 12-nt (top), and the resulting integration efficiencies were determined by qPCR (bottom). Data are normalized to gRNA-4. The inset shows a comparison of integration site distributions for gRNA-4 and gRNA-4+12, determined by NGS. FIG. 3H is another example of total integration efficiency with gRNA-4 as a function of transposon cargo size. The stated size includes the cargo and transposon ends, and the arrow denotes the original pDonor. FIG. 3I is a third example of total integration efficiency with gRNA-4 as a function of transposon cargo size. The stated sizes do not include the left and right end sequences. FIG. 3J is a comparison of integration site distributions for gRNA-4 and gRNA-4 (mm29-32). FIG. 3K shows results following shortening or lengthening of gRNA-4 spacer lengths by 6-nt increments, and the resulting integration efficiencies as determined by qPCR (left). Data are normalized to gRNA-4. Comparison of integration site distributions for gRNA-4 and gRNA-4 (+12nt) is shown on the right. Data in FIGS. 3B-3D, 3F, and 3G are shown as mean±s.d. for n=3 biologically independent samples.

[0108] FIGS. 4A-4G are the genome-wide analysis of programmable RNA-guided DNA integration. FIG. 4A is a schematic of the genomic locus targeted by gRNAs 4-8 (top), and PCR analysis of transposition resolved by agarose gel electrophoresis (bottom). FIG. 4B is a schematic of an exemplary Tn-seq workflow for deep sequencing of genome-wide transposition events. FIG. 4C is the mapped Tn-seq reads from transposition experiments with the mariner transposon, and with the V. cholerae transposon programmed with either gRNA-nt or gRNA-4. The gRNA-4 target site is denoted with a maroon triangle. FIG. 4D is the Sequence logo of all mariner Tn-seq reads, highlighting the TA dinucleotide target-site preference. FIG. 4E is comparison of integration site distributions for gRNA-4 determined by PCR amplicon sequencing and Tn-seq, for the T-RL product; the distance between the Cascade target site and transposon integration site is shown. FIG. 4F is a zoom-in view of Tn-seq read coverage at the primary integration site for experiments with gRNA-4, highlighting the 5-bp target site duplication (TSD); the distance from the Cascade target site is shown. FIG. 4G is the genome-wide distribution of genome-mapping Tn-seq reads from transposition experiments with gRNAs 9-16 for the V. cholerae transposon. The location of each target site is denoted with a maroon triangle.

[0109] FIGS. 5A-5B are proposed models for RNA-guided DNA integration by Tn7-like transposons encoding CRISPR-Cas systems. The V. cholerae Tn6677 transposon encodes a programmable RNA-guided DNA-binding complex called Cascade, which forms a novel co-complex with TniQ. TniQ-Cascade complexes surveil the cell for matching DNA target sites, which may be found on the host chromosome or mobile genetic elements. Upon target binding and R-loop formation, DNA-bound TniQ recruits the non-sequence-specific DNA-binding protein, TnsC, based on previous studies of E. coli Tn7 likely leading to eventual formation of a large, megadalton-sized structure known as the transpososome, which comprises the TniQ-Cascade-bound target DNA, TnsC, and the TnsAB-bound transposon donor DNA. The transposon itself is bound at the left and right ends by TnsA and TnsB, forming a so-called paired-end complex that is recruited to the target DNA by TnsC. Excision of the transposon from its donor site allows for targeted integration at a fixed distance downstream of DNA-bound TniQ-Cascade, resulting in a 5-bp target site duplication.

[0110] FIGS. 6A-6F show the transposition of the E. coli Tn7 transposon and genetic architecture of the Tn6677 transposon from V. cholerae. FIG. 6A is the genomic organization of the native E. coli Tn7 transposon adjacent to its known attachment site (attTh7) within the glmS gene. FIG. 6B is schematics of exemplary expression and donor plasmids for Tn7 transposition experiments. FIG. 6C is a schematic of the genomic locus containing the conserved TnsD binding site (attTn7), including the expected and alternative orientation Tn7 transposition products and PCR primer pairs to selectively amplify them. FIG. 6D is the PCR analysis of Tn7 transposition, resolved by agarose gel electrophoresis. Amplification of rssA serves as a loading control. FIG. 6E is the Sanger sequencing chromatograms of both upstream and downstream junctions of genomically integrated Tn7. TSD, target site duplication. FIG. 6F is the genomic organization of the native V. cholerae strain HE-45 Tn6677 transposon. Genes that are conserved between Tn6677 and the E. coli Tn7 transposon, and between Tn6677 and a canonical I-F CRISPR-Cas system from Pseudomonas aeruginosa, are highlighted. The cas1 and cas2-3 genes, which mediate spacer acquisition and DNA degradation during the adaptation and interference stages of adaptive immunity, respectively, are missing from CRISPR-Cas systems encoded by Tn7-like transposons. Similarly, the tnsk gene, which facilitates non-sequence-specific transposition, is absent. The V. cholerae HE-45 genome contains another Tn7-like transposon (located within GenBank accession ALED01000025.1), which lacks an encoded CRISPR-Cas system and exhibits low sequence similarity to the Tn6677 transposon investigated in this study.

[0111] FIGS. 7A-7G are the analysis of E. coli cultures and strain isolates harboring lacZ-integrated transposons. FIG. 7A shows the genomic locus targeted by gRNA-3 and gRNA-4, including both potential transposition products and the PCR primer pairs to selectively amplify them (top). Next-generation sequencing (NGS) analysis of the distance between the Cascade target site and transposon integration site for gRNA-3 (left) and gRNA-4 (right), determined with two alternative primer pairs. FIG. 7B shows a schematic of the lacZ locus with or without integrated transposon after transposition experiments with gRNA-4 (top); T-LR and T-RL denote transposition products in which the transposon left end and right end are proximal to the target site, respectively. Primer pairs g and h (external-internal) selectively amplify the integrated locus, whereas primer pair i (external-external) amplifies both unintegrated and integrated loci. PCR analysis of 10 colonies after 24-hour growth on +IPTG plates (bottom left) indicates that all colonies contain integration events in both orientations (primer pairs g and h), but with efficiencies sufficiently low that the unintegrated product predominates after amplification with primer pair i. After resuspending cells, allowing for an additional 18-hour clonal growth on-IPTG plates, and performing the same PCR analysis on 10 colonies (bottom right), 3/10 colonies now exhibit clonal integration in the T-LR orientation (compare primer pairs h and i). The remaining colonies show low-level integration in both orientations, which presumably occurred during the additional 18-hour growth due to leaky expression. These analyses indicate that colonies are genetically heterogeneous after growth on +IPTG plates, and that RNA-guided DNA integration only occurs in a proportion of cells within growing colonies. I, integrated product; U, unintegrated product; *, mispriming product also present in the negative (unintegrated) control. FIG. 7C is a photograph of LB-agar plate used for blue-white colony screening. Cells from IPTG-containing plates were re-plated on X-gal containing plates, and white colonies expected to harbor lacZ-inactivating transposon insertions were selected for further characterization. FIG. 7D is PCR analysis of E. coli strains identified by blue-white colony screening that harbor clonally integrated transposons, shown as in FIG. 7B. FIG. 7E is a schematic of Sanger sequencing coverage across the lacZ locus for strains shown in FIG. 7D. FIG. 7F is the PCR analysis of transposition experiment with gRNA-4 after serially diluting lysate from a clonally integrated strain with lysate from a control strain to simulate variable integration efficiencies, shown as in FIG. 7B. Transposition products can be reliably detected by PCR with an external-internal primer pair at efficiencies above 0.5%, but PCR bias leads to preferential amplification of the unintegrated product using the external-external primer pair at any efficiency substantially below 100%. FIG. 7G is a schematic of the lacZ locus with or without integrated Tn7 (top), and further colony PCR analysis of Tn7 transposition experiment with gRNA4 using primer pair a (middle) or primer pair b (bottom), resolved by agarose gel electrophoresis and in FIG. 7B.

[0112] FIG. 8A-8E are the analysis of V. cholerae Cascade and TniQ-Cascade complexes. FIG. 8A is schematics of exemplary expression vectors for recombinant protein or ribonucleoprotein complex purification. FIG. 8B shows the SDS-PAGE analysis of purified TniQ, Cascade, and TniQ-Cascade complexes (left), highlighting protein bands excised for in-gel trypsin digestion and mass spectrometry analysis. The table (right) lists E. coli and recombinant proteins identified from these data, and spectral counts of their associated peptides. Note that Cascade and TniQ-Cascade samples used for this analysis are distinct from the samples presented in FIG. 2. FIG. 8C is the size exclusion chromatogram of the TniQ-Cascade co-complex on a Superose 6 10/300 column (left), and a calibration curve generated using protein standards (right). The measured retention time of TniQ-Cascade (maroon) is consistent with a complex having a molecular weight of ˜440 kDa. FIG. 8D is the RNase A and DNase I sensitivity of nucleic acids that co-purified with Cascade and TniQ-Cascade, resolved by denaturing urea-PAGE. FIG. 8E is the results from the TniQ, Cascade, and a Cascade+TniQ binding reactions resolved by size exclusion chromatography (left); indicated fractions were analyzed by SDS-PAGE (right). * denotes an HptG contaminant.

[0113] FIGS. 9A-9C are control experiments demonstrating efficient DNA targeting with Cas9 and P. aeruginosa Cascade. FIG. 9A is a schematic of the exemplary plasmid expression systems for S. pyogenes Cas9-sgRNA (Type II-A, left) and P. aeruginosa Cascade (PaeCascade) and Cas2-3 (Type I-F, right). The Cas2-3 expression plasmid was omitted from experiments described in FIG. 2E. FIG. 9B are graphs of the results from cell killing experiments using S. pyogenes Cas9-sgRNA (left) or PaeCascade and Cas2-3 (right), monitored by determining colony forming units (CFU) upon plasmid transformation. Complexes were programmed with gRNAs targeting the same genomic lacZ sites as with V. cholerae gRNA-3 and gRNA-4, such that efficient DNA targeting and degradation results in lethality and thus a drop in transformation efficiency. FIG. 9C is a graph of the results of qPCR-based quantification of transposition efficiency from experiments using the V. cholerae transposon donor and TnsA-TnsB-TnsC, together with DNA targeting components comprising either V. cholerae Cascade (Vch), P. aeruginosa Cascade (Pae), or S. pyogenes dCas9-RNA. TniQ was either expressed on its own from pTnsABCQ or as a fusion to the targeting complex (pCas-Q) at either the Cas6 C-terminus (6), Cas8 N-terminus (8), or dCas9 N- (N) or C-terminus (C). The exact same sample lysates as in FIG. 2E were used. Data in FIGS. 9B and 9C are shown as mean±s.d. for n=3 biologically independent samples.

[0114] FIGS. 10A-10E are qPCR-based quantifications of RNA-guided DNA integration efficiencies. FIG. 10A is a schematic of the potential lacZ transposition products in either orientation for both gRNA-3 and gRNA-4, and qPCR primer pairs to selectively amplify them. T-LR and T-RL denote transposition products in which the transposon left end and right end are proximal to the target site, respectively. FIG. 10B includes graphs of the comparison of simulated integration efficiencies for T-LR and T-RL orientations, generated by mixing clonally integrated and unintegrated lysates in known ratios, versus experimentally determined integration efficiencies measured by qPCR. FIG. 10C is a graph of the comparison of simulated mixtures of bidirectional integration efficiencies for gRNA-4, generated by mixing clonally integrated and unintegrated lysates in known ratios, versus experimentally determined integration efficiencies measured by qPCR. FIG. 10D is a graph of the RNA-guided DNA integration efficiency as a function of IPTG concentration for gRNA-3 and gRNA-4, measured by qPCR. FIG. 10E is a graph of the bidirectional integration efficiencies measured by qPCR for simulated mixtures of bidirectional integration efficiencies for gRNA4, generated by mixing clonally integrated and unintegrated lysates in known ratios. Data in FIGS. 10B-10C are shown as mean±s.d. for n=3 biologically independent samples.

[0115] FIGS. 11A-11D show the influence of transposon end sequences on RNA-guided DNA integration. FIG. 11A shows the sequence (top) and schematic (bottom) of V. cholerae Tn6677 left and right end sequences. The putative TnsB binding sites (blue) were determined based on sequence similarity to the TnsB binding sites. The 8-bp terminal ends are shown in yellow, and the empirically determined minimum end sequences required for transposition are denoted with red dashed boxes. FIG. 11B are graphs of the integration efficiency with gRNA-4 as a function of transposon end length, as determined by qPCR. FIG. 11C is a graph of the relative fraction of both integration orientations as a function of transposon end length, determined by qPCR. ND, not determined. FIG. 11D is a graph of the integration efficiency with gRNA-4 as a function of transposon end truncations (bottom), determined by qPCR for both orientations independently. The empirically determined, minimum end sequences required are shown as dashed boxes. Data in FIGS. 11B and 11C are shown as mean±s.d. for n=3 biologically independent samples.

[0116] FIGS. 12A-12D are the analysis of RNA-guided DNA integration for PAM-tiled gRNAs and extended spacer length gRNAs. FIG. 12A is graphs of the integration site distribution for all gRNAs described in FIGS. 3D-3E having a normalized transposition efficiency >20%, determined by NGS. FIG. 12B is a graph of the integration site distribution for a gRNA containing mismatches at positions 29-32, compared to the distribution with gRNA-4, determined by NGS. FIG. 12C shows the resulting integration efficiencies, determined by qPCR, following shortening or lengthening of the gRNA-4 spacer length by 6-nt increments. Data are normalized to gRNA-4 and are shown as mean±s.d. for n=3 biologically independent samples. FIG. 12D is graphs of the integration site distribution for extended length gRNAs compared to the distribution with gRNA-4, determined by NGS.

[0117] FIGS. 13A-13H show the development and analysis of transposon-insertion sequencing (Tn-seq). FIG. 13A is a schematic of the V. cholerae transposon end sequences. The 8-bp terminal sequence of the transposon is boxed and highlighted in light yellow. Mutations generated to introduce MmeI recognition sites are shown in red, and the resulting recognition site is highlighted in red. Cleavage by MmeI occurs 17-19 bp away from the transposon end, generating a 2-bp overhang. FIG. 13B is a graph of the comparison of integration efficiencies for the wild-type and MmeI-containing transposon donors, determined by qPCR. Labels on the x-axis denote which plasmid was transformed last; higher integration efficiencies were reproducibly observed when pQCascade was transformed last (gRNA-4) than when pDonor was transformed last. The transposon containing an MmeI site in the transposon ‘right’ end (R*-L pDonor) was used for all Tn-seq experiments. Data are shown as mean±s.d. for n=3 biologically independent samples. FIG. 13C is a schematic of the plasmid expression system for Himar1C9 and the mariner transposon. FIG. 13D is a scatter plot showing correlation between two biological replicates of Tn-seq experiments with the mariner transposon. Reads were binned by E. coli gene annotations, and a linear regression fit and Pearson linear correlation coefficient (r) are shown. FIG. 13E is a schematic of 100-bp binning approach used for Tn-seq analysis of transposition experiments with the V. cholerae transposon, in which bin-1 is defined as the first 100-bp immediately downstream (PAM-distal) of the Cascade target site. FIG. 13F is scatter plots showing correlation between biological replicates of Tn-seq experiments with the V. cholerae transposon programmed with gRNA-4. All highly sampled reads fall within bin-1; low-level but reproducible, long-range integration into 100-bp bins just upstream and downstream of the primary integration site (bins-1, 2, and 3) were also observed. FIG. 13G is a scatter plot showing correlation between biological replicates of Tn-seq experiments with the V. cholerae transposon programmed with gRNA-nt. FIG. 13H is a scatter plot showing correlation between biological replicates of Tn-seq experiments with the V. cholerae transposon expressing TnsA-TnsB-TnsC-TniQ but not Cascade. For FIGS. 13F-13H, bins are only plotted when they contain at least one read in either data set.

[0118] FIGS. 14A-14E are the Tn-seq data for additional gRNAs tested. FIGS. 14A and 14B are genome-wide distribution of genome-mapping Tn-seq reads from transposition experiments with the V. cholerae transposon programmed with gRNAs 1-8 (FIG. 14A) and gRNAs 17-24 (FIG. 14B). The location of each target site is denoted with a maroon triangle. † The lacZ target site for gRNA-3 was found to be duplicated within the λ DE3 prophage, as is the transposon integration site; Tn-seq reads for this dataset were mapped to both genomic loci for visualization purposes only, though the locus they derive from was unable to be determined. FIGS. 14C-14E are graphs of the analysis of integration site distributions for gRNAs 1-24 determined from the Tn-seq data; the distance between the Cascade target site and transposon integration site is shown. Data for both integration orientations are superimposed, with filled blue bars representing the T-RL orientation and the dark outlines representing the T-LR orientation. Values in the top-right corner of each graph give the on-target specificity (%), calculated as the percentage of reads resulting from integration within 100-bp of the primary integration site to the total number of reads aligning to the genome, and the orientation bias (X:Y), calculated as the ratio of reads for the T-RL orientation to reads for the T-LR orientation. The majority of gRNAs favor integration in the T-RL orientation 49-50 bp downstream of the Cascade target site. gRNA-21 is grayed out because the expected primary integration site is present in a repetitive stretch of DNA that does not allow us to map the reads confidently. * indicates samples for which more than 1% of the genome-mapping reads could not be uniquely mapped are marked.

[0119] FIG. 15 shows that bacterial transposons also harbor Type V-U5 CRISPR-Cas systems encoding C2c5. Representative genomic loci from various bacterial species containing identifiable transposon ends (blue boxes, L and R), genes with homology to tnsB-tnsC-tniQ) (shades of yellow), CRISPR arrays (maroon), and the CRISPR-associated gene c2c5 (blue). The example from H. byssoidea (top) highlights the target site duplication and terminal repeats, as well as genes found within the cargo portion of the transposon. As with Type I CRISPR-Cas system-containing Tn7-like transposons, Type V CRISPR-Cas system-containing transposons seem to preferentially harbor genes associated with innate immune system functions, such as restriction-modification systems. C2c5 genes are frequently flanked by the predicted transcriptional regulator, merR (light blue), and the C2c5-containing transposons appear to usually fall just upstream of tRNA genes (green), a phenomenon that has also been observed for other prokaryotic integrative elements. Analysis of 50 spacers from the eight CRISPR arrays shown with CRISPRTarget revealed 6 spacers with imperfectly matching targets (average of 6 mismatches), none of which mapped to bacteriophages, plasmids, or to the same bacterial genome harboring the transposon itself.

[0120] FIGS. 16A-16B are exemplary schematics of transposition via cut-and-paste versus copy-and-paste mechanisms. FIG. 16A is a schematic of cut-and-paste transposition. The E. coli Tn7 transposon mobilizes via a cut-and-paste mechanism. TnsA and TnsB cleave both strands of the transposon DNA at both ends, leading to clean excision of a linear dsDNA, which contains short 3-nucleotide 5′-overhangs on both ends (not shown). The free 3′-OH ends are then used as a nucleophile by TnsB to attack phosphodiester bonds on both strands of the target DNA, resulting in concerted transesterification reactions. After gap fill-in, the transposition reaction is complete, and the integrated transposon is flanked by 5-bp target site duplications (TSD) on both ends as a result of the gap fill-in reaction. FIG. 16 is a schematic of copy-and-paste (replicative) transposition. Some transposons instead mobilize via a copy-and-paste pathway, also known as replicative transposition. This results when the 5′ ends of the transposon donor DNA are not broken during the excision step, as is the case when the tnsA endonuclease gene is absent from the gene operon encoding the transposition proteins. In this case, the 3′-OH ends are still liberated and can participate in staggered transesterification reactions with the target DNA (inset, middle right), catalyzed by TnsB, but the 5′ ends of the transposon remain covalently linked to the remainder of the DNA within the donor DNA molecule, which can be a genome or a plasmid vector. This copy-and-paste reaction results in what's known as a Shapiro intermediate (middle), in which the entirety of the donor DNA, including the transposon sequence itself, as well as the flanking sequences, is joined together with the broken target DNA. This intermediate can only be resolved during subsequent DNA replication (bottom left), which results in a so-called cointegrate product. This cointegrate harbors two copies of the transposon itself (orange rectangle), flanked by the TSD on one side. Importantly, the cointegrate also harbors the entirety of the donor DNA molecule, as well as the entirety of the target DNA molecule. Thus, in cases where the transposon is encoded on a plasmid vector, the entirety of the vector is joined to the target DNA during replicative transposition. At some frequency, the cointegrate product can be resolved into the products shown at the right, either through the action of a dedicated resolvase protein (e.g., the TniR protein in Tn5090/Tn5053), or through endogenous homologous recombination because of extensive homology between the two copies of the transposon itself in the cointegrate product. Cointegrate resolution results in a target DNA harboring a single transposon flanked by the TSD, as well as a regenerated version of the donor DNA molecule.

[0121] FIGS. 17A-17C show the comparison of transposition genes in transposons that harbor Type I-F and Type V CRISPR-Cas systems. FIG. 17A is a schematic of Tn7 and Tn7-like transposons that have been described in the literature. (Panel reproduced from FIG. 9.1b and adapted from Peters et al., Mol Microbiol 93, 1084-1092 (2014).) FIG. 17B a schematic of a representative Tn7-like transposon that harbors a Type I-F variant CRISPR-Cas systems, whose genes encode a Cascade complex; the Tn6677 transposon from Vibrio cholerae that mediates RNA-guided DNA insertion is a member of this family. Note the similarities in the transposition genes found in Tn6677 and related transposons and Tn7: the tnsA-tnsB-tnsC operon is maintained, whereas the tnsD homolog known as tniQ is encoded within the operon that encodes the Cas8-Cas7-Cas6 proteins that collectively form the RNA-guided TniQ-Cascade complex. The TnsA and TnsB protein products mediate transposon excision, whereas TnsB mediates integration of the transposon into the target DNA. FIG. 17C is a schematic of a representative Tn7-like transposon that harbors a Type V CRISPR-Cas system, whose gene encodes Cas12k (also known as C2c5). Whereas tnsB, tnsC, and tniQ genes are present in these transposons, the tnsA gene is absent, indicating that these transposons do not encode the necessary machinery to mediate cut-and-paste transposition. Instead, they are likely to proceed via copy-and-paste replicative transposition, resulting in a cointegrate product rather than a clean integration product.

[0122] FIG. 18 is an expression strategy involving individual vectors for each component. Each component necessary for RNA-guided DNA integration with the CRISPR-Tn7 system from Vibrio cholerae is encoded on a separate mammalian expression plasmid. The protein-coding genes are human codon optimized (hCO), cloned downstream of a CMV promoter, and contain an N-terminal nuclear localization signal (NLS). In other embodiments, the NLS may also be introduced in tandem or at the C-terminus of the protein. The CRISPR array encoding the gRNA is cloned downstream of a human U6 (hU6) promoter, and is designed as a repeat-spacer-repeat array, which is processed by Cas6. The particular spacer sequence (maroon) is chosen to correspond to the desired DNA target site. In this embodiment, all 8 plasmids are co-transfected to reconstitute TniQCascade and TnsABC in cells, which together with pDonor, can mediate RNA-guided DNA integration.

[0123] FIG. 19 is an exemplary expression strategy involving polycistronic vectors. pTnsABC_hCO encodes human codon-optimized versions of TnsA, TnsB, and TnsC, with the NLS and T2A peptides shown. pQCascade_hCO encodes human codon-optimized version of TniQ, Cas6, Cas7, and Cas8, as well as a CRISPR array encoding the gRNA. The promoters for both vectors are shown. In other embodiments, the order of genes is changed to optimize expression, and the position and identity of the NLS and 2A peptides is altered. The CRISPR array encoding the gRNA is cloned downstream of a human U6 (hU6) promoter, and is designed as a repeat-spacer-repeat array, which is processed by Cas6. The particular spacer sequence (maroon) is chosen to correspond to the desired DNA target site. In this embodiment, both plasmids are co-transfected to reconstitute TniQ-Cascade and TnsABC in cells, which together with pDonor, can mediate RNA-guided DNA integration. The pQCascade_hCO variant (pSL1079) encodes a gRNA targeting a lacZ-specific sequence from E. coli, which is one embodiment, is cloned within pTarget for RNA-guided DNA integration experiments in eukaryotic cells.

[0124] FIGS. 20A-20C show possible delivery approaches. FIG. 20A shows one embodiment where HEK293T cells are transfected with vectors that encode the respective protein and RNA machinery to recapitulate RNA-guided DNA integration. FIG. 20B shows another embodiment in which 5′-capped (red circle) and 3′-polyadenylated mRNAs are synthesized, alongside precursor gRNAs (shown) or fully processed mature gRNAs (not shown), and HEK293T cells are then transfected with a mixture of mRNAs and gRNA. FIG. 20C shows another embodiment in which all the necessary protein and RNA components are purified recombinantly, and HEK293T cells are then transfected with purified protein and ribonucleoprotein components. The above strategies are combined with delivery of the donor DNA (e.g. as on pDonor).

[0125] FIGS. 21A and 21B are exemplary experimental strategies for RNA-guided DNA integration in HEK293T cells. FIG. 21A is a schematic of one embodiment in which HEK293T cells are co-transfected with CRISPR-Tn7 expression vectors alongside both pDonor and pTarget. pDonor contains the mini-transposon construct, harboring Tn7 transposon ends (“L” and “R”) flanking a genetic cargo of interest; pTarget harbors the target site (maroon) that is complementary to the gRNA spacer. Successful RNA-guided DNA integration involves excision of the transposon from pDonor (mediated by TnsA and TnsB), followed by RNA-guided integration of the transposon into pTarget, at a fixed distance from the target site. pDonor and pTarget may contain fluorescent reporter genes and/or drug resistance markers to enable selection of cells that undergo an integration event. FIG. 21B is a schematic of another embodiment in which the transposon is again encoded on pDonor, but a gRNA is designed to direct RNA-guided DNA integration to a site within the human genome (schematized with the red chromosome). This results in genomic integration of the transposon a fixed distance from the target site (maroon). Sequences for the plasmids represent only one possible design of the respective plasmids. pTarget_Int refers to the integration product after RNA-guided DNA integration into pTarget. The integrated transposon may be detected and further analyzed by PCR, qPCR, and/or next-generation sequencing.

[0126] FIGS. 22A-22C are exemplary experimental strategies for selecting and/or detecting RNA-guided DNA integration in HEK293T cells. FIG. 22A is a schematic of one embodiment, termed a promoter capture approach, in which HEK293T cells are co-transfected with CRISPR-Tn7 expression vectors alongside pDonor, which contains the mini-transposon construct, harboring Tn7 transposon ends (“L” and “R”) flanking a genetic cargo that includes a puromycin resistance gene (puroR) connected to an EGFP gene via a 2A peptide. The genetic cargo does not contain a promoter element and so is not expressed, unless RNA-guided DNA integration places the cargo downstream of a eukaryotic promoter element. The targeted promoter may be in a plasmid (e.g. pTarget) or the genome. Once integrated, the reporter gene is turned on, and integration may be detected via flow cytometry and/or drug selection. pA refers to a polyadenylation signal, and the promoter (black arrow) may be a CMV promoter or other constitutive or inducible promoter. FIG. 22B is a schematic in which the target site is selected so that integration also disrupts another fluorescent reporter gene encoding mCherry. In this experimental set-up, RNA-guided DNA integration leads to both an increase in GFP signal and a loss of mCherry signal. FIG. 22C is a schematic showing another embodiment in which the reporter in pDonor also contains a promoter element within the genetic cargo, such that the pDonor plasmid itself expresses EGFP and the puromycin resistance gene. In this scenario, integration of the genetic cargo into the genome, or a pTarget plasmid, will lead to expression, regardless of whether a promoter element is present adjacent to the integration site.

[0127] FIGS. 23A-23D are exemplary expression construct designs to reduce promoter number. FIG. 23A is a schematic of the previously described pQCascade plasmid (pSL0828, encoding gRNA-4) comprising two separate T7 promoters, one of which drives expression of the CRISPR RNA and a second one of which drives expression of the TniQ-Cas8-Cas7-Cas6 operon. FIG. 23B is a schematic of the engineered pQCascade-B and pQCascade-C contain only a single T7 promoter, which drives expression of both the CRISPR RNA and the TniQ-Cas8-Cas7-Cas6 operon. The CRISPR array is placed at either the 5′ or 3′ end of the transcript. FIG. 23 C is a schematic of the RNA-guided DNA integration experiments utilize pDonor (pSL0527), which contains the genetic cargo flanked by the Tn7 transposon ends, and pTnsABC, which encodes the TnsA-TnsB-TnsC operon. FIG. 23D is the results of the RNA-guided DNA integration experiments performed in E. coli BL21 (DE3) cells and quantified by qPCR. The total integration efficiency is plotted for experiments utilizing pDonor (pSL0527), pTnsABC (pSL0283), and either pQCascade-B (pSL1016) or pQCascade-C (pSL1018).

[0128] FIGS. 24A-24F are exemplary expression construct designs to express all CRISPR- and Tn7-associated machinery from one plasmid. FIG. 24A is a schematic of pTQC-A (pSL1020) which encodes the CRISPR array and TniQ-Cas8-Cas7-Cas6-TnsA-TnsA-TnsB operon from two T7 promoters. FIG. 24B is a schematic of pTQC-B (pSL1022) encoding the CRISPR array and TniQ-Cas8-Cas7-Cas6-TnsA-TnsA-TnsB operon from a single T7 promoter. FIG. 24C is a schematic of pTQC-C (pSL1024) encoding the TnsA-TnsB-TnsC operon and TniQ-Cas8-Cas7-Cas6-CRISPR operon from two T7 promoters. FIG. 24D is a schematic of pTQC-D (pSL1026) encoding the TnsA-TnsB-TnsC-TniQ-Cas8/Cas5 fusion protein-Cas7-Cas6-CRISPR operon from a single T7 promoter. FIG. 24E is a schematic of the fusion mRNA and CRISPR RNA transcripts encoded by pTQC-B (left) and pTQC-D (right); enzymatic CRISPR RNA processing by Cas6 liberates the mature gRNA without disturbing the remaining mRNA transcript which encodes all the protein components. FIG. 24F shows the results of RNA-guided DNA integration experiments were performed in E. coli BL21 (DE3) cells and quantified by qPCR. The total integration efficiency is plotted for experiments utilizing pDonor (pSL0527) and either pTQC-A, pTQC-B, pTQC-C, or pTQC-D, as shown.

[0129] FIGS. 25A-25B are exemplary expression construct designs to express all CRISPR- and Tn7-associated machinery, as well as the mini-transposon donor, from one plasmid. FIG. 25A is a schematic of pAIO-A (pSL1120) encoding the CRISPR array and TniQ-Cas8-Cas7-Cas6-TnsA-TnsA-TnsB operon from a single T7 promoter, and also having a downstream mini-transposon donor DNA, comprising the Tn7 transposon ends (“L” and “R”) flanking a cargo of interest. FIG. 25B is a schematic of pAIO-A (pSL1120) encoding the CRISPR array and TniQ-Cas8-Cas7-Cas6-TnsA-TnsA-TnsB operon from a single T7 promoter. This entire expression cassette is cloned within the mini-transposon donor DNA, comprising the Tn7 transposon ends (“L” and “R”). RNA-guided DNA integration with this construct results in the genetic components encoding the CRISPR- and Tn7-associated machinery mobilizing within the donor DNA itself.

[0130] FIGS. 26A-26B are exemplary expression construct designs to optimize promoter strength, plasmid copy number, and cargo size for all-in-one RNA-guided DNA integration experiments. FIG. 26A shows pAIO-A (pSL1120), further modified to carry one of four constitutive E. coli promoters (top), and introduction of the entire expression cassette into four distinct vector backbones (left). The resulting four-by-four matrix is tested for RNA-guided DNA integration activity in E. coli BL21 (DE3) cells and analyzed by PCR, qPCR, and/or next-generation sequencing. These experiments reveal the optimal expression level for a given copy number of the expression plasmid. FIG. 26B is a schematic of pAIO-A (pSL1120) modified to include genetic cargos ranging in size from 0.17 kilobase pair (kbp) to 10 kbp. The resulting plasmids are tested for RNA-guided DNA integration activity in E. coli BL21 (DE3) cells and analyzed by PCR, qPCR, and/or next-generation sequencing. These experiments reveal the dependence of cargo size on different expression constructs and designs.

[0131] FIG. 27 is an exemplary promoter strategy for expression and reconstituting RNA-guided DNA integration in select heterologous hosts. The all-in-one expression vector, pAIO-A (pSL1120) is further modified to carry alternative promoters (red) that are recognized and expressed in various other expression hosts, denoted in italics. In one embodiment (bottom right), the chosen promoter has broad host range activity and can be recognized in various known human commensal and pathogenic bacteria. In further embodiments, additional promoters are selected to match additional host bacterial species of interest.

[0132] FIG. 28 is the bioinformatic analysis of C2c5 homologs. After performing a multiple sequence alignment of C2c5 proteins, phylogenetic trees were constructed and visualized using the Interactive Tree of Life. Based on numerous criteria, including sequence diversity, genetic architecture, and readily identifiable transposon end sequences, five homologs and their associated Tn7-like transposon components were selected for further experimental investigation, labeled with the bacterial species information and highlighted with red arrows.

[0133] FIG. 29 is the genetic architecture of Tn7-like transposons that harbor Type V-U5 CRISPR-Cas systems encoding C2c5. Representative genomic loci from five selected bacterial species are shown. Tn7-like transposon ends (dark blue rectangles), the Tn7-associated genes tnsB-tnsC-tniQ) (shades of yellow), CRISPR arrays (maroon), and the CRISPR-associated gene c2c5 (blue) are indicated. As with Type I CRISPR-Cas system-containing Tn7 transposons, Type V CRISPR-Cas system-containing Tn7-like transposons overwhelming harbor genes associated with innate immune system functions, such as restriction-modification systems. C2c5 genes are frequently flanked by the predicted transcriptional regulator, merR (grey), and the C2c5-containing Tn7-like transposons appear to almost always fall just upstream of tRNA genes (green), a phenomenon that has also been observed for other prokaryotic integrative elements.

[0134] FIGS. 30A-30B show an exemplary experimental set-up to study RNA-guided DNA integration by C2c5-containing Tn7-like transposon. FIG. 30A is schematics of the general plasmid expression system for Tn7-C2c5 transposition experiments. The CRISPR array contains two repeat sequences (grey diamonds) and a single spacer sequence (maroon rectangle). The mini-transposon on pDonor is mobilized by transposases expressed in trans. FIG. 30B is a schematic of the lacZ genomic locus targeted by synthetic gRNAs, including two potential Tn7 transposition products and the PCR primer pairs to selective amplify them.

[0135] FIGS. 31A-31B are the experimental data demonstrating transposition with the Tn7-like transposon from Cyanobacterium aponinum IPPAS B-1202 (Cap). FIG. 31A is a schematic of the genomic sites within lacZ targeted by six distinct gRNAs; the different PAM sequences (yellow) are denoted, and the target sites are in maroon. FIG. 31B is the PCR-based detection of integration events, resolved by agarose gel electrophoresis. A single upstream primer specific to the 3′ end of the lacZ gene was used in combination with a primer reading through the left transposon end (as schematized in FIG. 30B, primer pair c2). Reactions for both the 1:10 and 1:100 diluted lysates are shown as well as a positive control (+C) run on a lysate targeting the same region with the Tn7 transposon from V. cholerae. Potential integration events are detected for the PAM sequences shown in gRNAs 4, 5 and 6.

[0136] FIGS. 32A-32C are representative pre-existing approaches for targeted DNA enrichment. FIG. 32A is a schematic outlining PCR processes for DNA enrichment. PCR amplicons are generated to enrich the DNA targets of interest, either in a uniplex format, in a multiplex format with multiple primer pairs, or with custom emulsion-based technologies such as Rainstorm. FIG. 32B shows a schematic of molecular inversion probes (MIP) annealing to the input DNA flanking the region of interest for enrichment, leading to gap-fill in and probe circularization by ligation. FIG. 32C is a schematic of the most widely used approach for targeted DNA enrichment, a pool of oligonucleotide-based probes are used to hybridize to sequences of interest, either in an array format (solid support) or in solution, followed by washing and elution steps. The figure is reproduced from: Mamanova et al., Nat Meth 7, 111-118 (2010), incorporated herein by reference.

[0137] FIGS. 33A-33D are schematics of targeted DNA enrichment using RNA-guided DNA integration with CRISPRTn7. In FIG. 33A, the input DNA, which may be purified genomic DNA, contains a sequence of interest whose enrichment is desired (blue). gRNAs are designed against target sites (target-1 and target-2) that flank the sequence of interest; the target sites themselves are abutted by a protospacer adjacent motif, or PAM, which in one embodiment for the V. cholerae CRISPR-Tn7 sequence is 5′-CC-3′. Purified TniQ-Cascade complexes bearing gRNA-1 and gRNA-2 bind both target sites, leading to recruitment of TnsC and subsequent recruitment of a paired-end complex (PEC) that comprises TnsA, TnsB, and the transposon ends (L and R). Successful recruitment leads to RNA-guided integration of the transposon end sequences a fixed distance downstream of the target sites complementary to both gRNAs. Integration both fragments the input DNA at the integration sites, while also appending transposon end sequences, and in one embodiment, adaptor sequences, that may be used for downstream PCR amplification and/or NGS library preparation and next-generation sequencing (NGS). The stoichiometry of TnsA and TnsB in the paired-end complex is not known, nor is the stoichiometry of TnsC. The transposon L and R ends are denoted by light purple and light orange, respectively; optional adaptor sequences are shown with dark purple and dark orange. The sequence of interest may be selectively amplified, e.g. enriched, in subsequent PCR steps by designing primers against either the transposon end sequences, the adaptor sequences, or both. Sample-specific indices may also be added in this subsequent PCR amplification step. FIG. 33B is a schematic of the possible derivatives of the transposon end sequences are shown. In one embodiment, the paired-end complex comprises two unique transposon ends (purple and orange), which leads to integration of unique sequences on the Watson and Crick strands of the input DNA, for downstream PCR amplification. In other embodiments, the transposon ends are further engineered, so that modified Left (L*) or modified Right (R*) ends are recognized and faithfully integrated by TnsB during RNA-guided DNA integration, leading to uniform integration of the same transposon end sequences, and thus, allowing for downstream PCR amplification using a single primer that recognizes both ends. In further embodiments, the transposon ends are engineered or modified such that one end remains ‘dark’ in subsequent PCR amplification steps, such that orientation-specific integration of the L and R ends allow for targeted amplification of only certain DNA sequences of interest for targeted DNA enrichment. The ‘dark’ ends may also simply be R and L ends that are functionally excluded during the PCR amplification step. The bottom row represents transposon end sequences that do not have appended adaptor sequences (dark purple, dark orange). FIG. 33C shows the possible target site and integration site geometries, which differ in the relative positioning of the target sites relative to the DNA sequence of interest, leading to alternative outcomes in what is retained during subsequent steps (e.g. PCR amplification of the integrated transposon ends). In embodiment 1, target-2 is retained; in embodiment 2, both target-1 and target-2 are retained; in embodiment 3, target-1 is retained; in embodiment 4, neither target is retained. In embodiment 5, the targets are selected to reside within the DNA sequence of interest, in a PAM-in configuration, such that RNA-guided DNA integration of the transposon ends occurs just outside the sequence of interest. Further embodiments combine such a strategy on one end, with a target lying outside the sequence of interest on the other side. FIG. 33D is a schematic of the library of gRNAs employed to direct highly multiplexed RNA-guided DNA integration within the input DNA, allowing for subsequent targeted enrichment of many DNA sequences of interest.

[0138] FIGS. 34A-34B are schematics of pre-existing methods of generating random fragment libraries from input DNA. FIG. 34A is a schematic of A conventional approach involving mechanical (e.g. sonication) or enzymatic (e.g. dsDNA fragmentase, NEB) fragmentation of the input DNA, which may be purified genomic DNA. Then, after end polishing and A-tailing, sequencing adaptors are appended to all dsDNA ends, and PCR amplification using primers complementary to the universal adaptors leads to DNA libraries spanning the entirety of the input DNA, which may be sequenced in later steps using massively parallel DNA sequencing, such as NGS with the Illumina® platform. FIG. 34B is a schematic of tagmentation with engineered Tn5 transposases (e.g. as with the Nextera kit) combining DNA fragmentation and adaptor insertion in a single and rapid step, allowing for considerable savings in time, cost, and labor. The transposon ends, or transposase adaptors, are directly primed in subsequent PCR amplification, prior to NGS. The figure is taken from: Adey et al., Genome Biol 11, R119 (2010).

[0139] FIGS. 35A-35E are schematics of the preparation of recombinant CRISPR-Tn7 components for in vitro RNA-guided DNA integration. FIG. 35A is schematics of exemplary expression plasmids cloned to recombinantly express and purify each individual protein component of the V. cholerae CRISPR-Tn7 machinery. Each plasmid encodes an N-terminal decahistidine tag, MBP solubilization tag, and TEV protease recognition sequence upstream of the protein of interest. FIG. 35B is a schematic of gRNA generation either through in vitro transcription from a dsDNA (shown, top) or partially ssDNA/dsDNA (not shown) template, through transcription of a longer transcript that contains self-cleaving ribozymes (middle), or through chemical synthesis (bottom). Libraries of gRNAs are generated by designing libraries of DNA templates or chemically synthesizing libraries of gRNAs. FIG. 35C shows other embodiments, in which TniQ-Cascade is purified recombinantly as a complex comprising TniQ, Cas8, Cas7, Cas6, and gRNA, using the expression plasmids shown. The pCRISPR plasmid noted (pSL0915) encodes gRNA-3 targeting lacZ, but this may be substituted with other plasmids encoding different gRNAs. In another embodiment, TniQ-Cascade is purified from a heterogeneous pool of cells expressing a library of distinct gRNAs (right). FIG. 35D shows other embodiments, in which TnsA and TnsB are purified as a heterodimer using the expression plasmid shown (left), or TnsA, TnsB, and TnsC are all purified as a co-complex using the expression plasmids shown (right). FIG. 35E are schematics of polycistronic expression plasmids.

[0140] FIG. 36 is the PCR amplification of integrated DNA for next-generation sequencing. In one embodiment, the transposon end sequences (orange lines) serve as primer binding sites for PCR amplification, after targeted RNA-guided DNA integration flanking the DNA sequence of interest (see FIG. 33). PCR primers may also include additional sequences on the overhangs, for indexing and/or appendage of sequences necessary for downstream next-generation sequencing, such as p5/p7 sequences needed for bridge amplification within the Illumina® sequencing platform. After PCR and standard clean-up steps, the sample may be used directly for next-generation DNA sequencing.

[0141] FIG. 37 is the incorporation of unique molecular identifiers (UMIs) during RNA-guided DNA integration. The transposon end sequences used during RNA-guided DNA integration (upstream steps not shown) are designed in such a way, that unique molecular identifiers are incorporated within one of the transposon end donor sequences (denoted UMI in figure, and depicted in various colors). This leads to distinct molecules of the same target sequence of interest (shades of blue) carrying unique tags, which are preserved and amplified in subsequent PCR steps that append adaptors necessary for next-generation DNA sequencing.

[0142] FIG. 38 shows the method for generating sequencing libraries by flanking the sequence of interest with the target and integration site. In this embodiment, the sequence of interest (blue) may be known or unknown, but is flanked on one side with a known sequence (maroon) that serves as the target site for which complementary gRNAs can be designed. RNA-guided DNA integration by the CRISPR-Tn7 system leads to transposon ends (orange/purple, in the embodiment depicted) being integrated ˜50-bp downstream of the target site. This arrangement allows the sequence of interest to be selectively amplified in a downstream PCR step, by designing primers that are specific for the target site (maroon) and one of the transposon end sequences (orange). Adaptors for next-generation sequencing (grey) may also be added as overhangs in the PCR step, allowing for downstream next-generation sequencing. The method may be multiplexed across many different sequences of interest.

[0143] FIGS. 39A-39B are different exemplary plasmid designs for expression of protein and RNA components necessary for RNA-guided DNA integration. FIG. 39A is a schematic of one embodiment, in which a three-plasmid approach is used to express the RNA-guided DNA integration (INTEGRATE) components. FIG. 39B is a schematic of another embodiment, in which an all-in-one single plasmid is used for streamlined expression and delivery of the RNA-guided DNA integration (INTEGRATE) components. A simplified schematic is also shown (top).

[0144] FIG. 40 is a schematic of the formation of the cointegrate product by replicative copy-and-paste transposition, and eventual resolution into the final products by homologous recombination.

[0145] FIG. 41 is a schematic of the design of an expanded construct selectable using erythromycin resistance (ErmR), which is expressed only after the construct is integrated into a transcribed genomic locus.

[0146] FIG. 42 is a schematic of an exemplary method of modulating antibiotic resistance.

[0147] FIGS. 43A-43D are the overall architecture of the V. cholerae TniQ-Cascade complex. FIG. 43A is the genetic architecture of the Tn6677 transposon (top), and plasmid constructs used to express and purify the TniQ-Cascade co-complex. Selected cryo-EM reference-free 2D classes in multiple orientations are shown on the right. FIG. 43B is orthogonal views of the cryo-EM map for the TniQ-Cascade complex, showing Cas8 (pink), six Cas7 monomers (green), Cas6 (salmon), crRNA (grey), and TniQ monomers (blue, yellow). The complex adopts a helical architecture with protuberances at both ends. FIG. 43C is a flexible domain in Cas8 comprising residues 277-385 (grey) could only be visualized in low-pass filtered maps. The unsharpened map is shown as semi-transparent, grey map overlaid on the post-processed map segmented and colored according to FIG. 43A. FIG. 43D is a refined model for the TniQ Cascade complex derived from the cryo-EM maps shown in FIG. 43B.

[0148] FIGS. 44A-44D show that TniQ binds Cascade in a dimeric, head-to-tail configuration. FIG. 44A, left, is the overall view of the TniQ-Cascade cryo-EM unsharpened map (grey) overlaid on the post-processed map segmented and colored as in FIG. 43. FIG. 44A, right, is the cryo-EM map (top) and the refined model (bottom) of the TniQ dimer. The two monomers interact with each other in a head-to-tail configuration and are anchored to Cascade via Cas6 and Cas7.1. FIG. 44B is the secondary structure diagram of the TniQ dimer: eleven α-helices are organized into an N-terminal Helix-Turn-Helix (HTH) domain and a C-terminal TniQ-domain. Dimer interactions between H3 and H11 are indicated, as are interaction sites with Cas6 and Cas7.1. FIG. 44C is the cryo-EM density for the H3-H11 interaction shows clear side-chain features (top), allowing accurate modelling of the interaction (bottom). FIG. 44D is a schematic of the dimer interaction, showing the important dimerization interface between the HTH and TniQ-domain.

[0149] FIG. 45A-45E show that Cas6 and Cas7.1 form a binding platform for TniQ. FIG. 45A is the top, zoomed area showing the interaction site of Cascade and the TniQ dimer. Cas6 and Cas7.1 are displayed as molecular Van der Waals surfaces, the crRNA is shown as grey spheres, and the TniQ monomers as ribbons. FIG. 45B is the loop connecting TniQ.1 α-helices H6 and H7 (blue) binds within a hydrophobic cavity of Cas6. FIG. 45C shows that Cas7.1 interacts via with the HTH domain of the TniQ.2 monomer (yellow), mainly through H2 and the loop connecting H2 and H3. FIGS. 45D-45E are the experimental cryo-EM densities observed for the TniQ-Cas6 (FIG. 45D) and TniQ-Cas7.1 (FIG. 45E) interaction.

[0150] FIGS. 46A-46D are the DNA-bound structure of the TniQ-Cascade complex. FIG. 46A is a schematic of crRNA and the portion of the dsDNA substrate that was experimentally observed within the electron density map for DNA-bound TniQ-Cascade. Target Strand (TS), non-target strand (NTS), as well as the PAM and seed regions are indicated. FIG. 46B is selected cryo-EM reference-free 2D classes for DNA-bound TniQ-Cascade; density corresponding to dsDNA could be directly observed protruding from the Cas8 component in the 2D averages (white arrows). FIG. 46C is a cryo-EM map for DNA-bound TniQ-Cascade. The crRNA is in dark grey and the DNA is in red. On the right and bottom, detailed views for the PAM and seed recognition regions of the map, with refined models represented as sticks within the electron density. Cas8 is shown in pink, Cas7 in green, crRNA in grey, and DNA in red. FIG. 46D is the V. cholerae transposon encodes a TniQ-Cascade co-complex that utilizes the sequence content of the crRNA to bind complementary DNA target sites (left). The incomplete R-loop observed in the structure (middle) may represent an intermediate state that may precede a downstream ‘locking’ step involving proofreading of the RNA-DNA complementarity. TniQ is positioned at the PAM-distal end of the DNA-bound Cascade complex, where it likely interacts with TnsC during downstream steps of RNA-guided DNA insertion.

[0151] FIG. 47A-47D are the cryo-EM sample optimization and image processing workflow. FIG. 47A is a representative negatively stained micrograph for 500 nM TniQ-Cascade. FIG. 47B, left, is a representative cryo-EM image for 2 μM TniQ-Cascade. A small dataset of 200 images was collected in a Tecnai F20 microscope equipped with a Gatan K2 camera. FIG. 47B, right, is a reference-free 2D class averages for this initial cryo-EM dataset. FIG. 47C, left, is a representative image from a large dataset collected in a Tecnai Polara microscope equipped with a Gatan K3 detector. FIG. 47C, middle, is detailed 2D class averages were obtained that were used for initial model generation using the SGD algorithm implemented in Relion3 (FIG. 47C, right). FIG. 47D is the image processing workflow used to identify the two main classes of the TniQ cascade complex in open and closed conformations. Local refinements with soft masks were used to improve the quality of the map within the terminal protuberances of the complex. These maps were instrumental for de novo modelling and initial model refinement.

[0152] FIGS. 48A-48E are Fourier Shell Correlation (FSC) curves, local resolution, and unsharpened filter maps for the TniQ-Cascade complex in closed conformation. FIG. 48A is a gold standard FSC curve using half maps; the global resolution estimation is 3.4 Å by the FSC 0.143 criterion. FIG. 48B is a cross-validation model-vs-map FSC. Blue curve, FSC between the shacked model refined against half map 1; red curve, FSC against half map 2, not included in the refinement; black curve, FSC between final model against the final map. The overlap observed between the blue and red curves guarantees a non-overfitted model. FIG. 47C is an unsharpened map colored according to local resolutions, as reported by RESMAP. FIG. 48D is a final model colored according to B-factors calculated by REFMAC. FIG. 48E is a flexible Cas8 domain encompassing residues 277-385 contacts the TniQ dimer at the other side of the crescent shape. Applying a Gaussian filter of increasing width to the unsharpened map allows for a better visualization of this flexible region.

[0153] FIG. 49 is a superposition of TniQ-Cascade with structurally similar Cascade complexes. The V. cholerae I-F variant TniQ-Cascade complex (left) was superposed with Pseudomonas aeruginosa I-F Cascade₁₁ (also known as Csy complex; middle, PDB ID: 6B45) and Escherichia coli I-E Cascade₉ (right, PDB ID: 4TVX). Shown are superpositions of the entire complex (top), the Cas8 and Cas5 subunits with the 5′ crRNA handle (middle top), the Cas7 subunit with a fragment of crRNA (middle bottom), and the Cas6 subunit with the 3′ crRNA handle (bottom).

[0154] FIGS. 50A-H are representative cryo-EM densities for all the components of the TniQ-Cascade complex in closed conformation. FIG. 50A is a final refined model of TniQ-Cascade, with Cas8 in purple, Cas7 monomers in green, Cas6 in red, the TniQ monomers in blue and yellow, and the crRNA in grey. FIG. 50B-50H are final refined models inserted in the final cryo-EM density for select regions of all the molecular components of the TniQ-Cascade complex. Residues are numbered.

[0155] FIG. 51 shows the Cas8 and Cas6 interaction with the crRNA. i) is a refined model for the TniQ-Cascade shown as ribbons inserted in the semitransparent Van der Waals surface, colored as in FIG. 1. ii) and iii) are zoomed views of Cas8, which interacts with the 5′ end of the crRNA. The inset shows electron density for the highlighted region, where the base of nucleotide C1 is stabilized by stacking interactions with arginine residues R584 and R424. iv) shows Cas6 interacting with the 3′ end of the crRNA “handle” (nucleotides 45-60). v) is an arginine-rich α-helix is deeply inserted within the major groove of the terminal stem-loop. This interaction is mediated by electrostatic interactions between basic residues of Cas6 and the negatively charged phosphate backbone of the crRNA. vi) shows Cas6 (red) also interacting with Cas7.1 (green), establishing a β-sheet formed by β-strands contributed from both proteins.

[0156] FIGS. 52A-52B are schematic representations of crRNA and target DNA recognition by TniQ-Cascade. FIG. 52A shows TniQ-Cascade residues that interact with the crRNA are indicated. Approximate location for all protein components of the complex are also shown, as well as the position of each Cas7 ‘finger.’ FIG. 52B shows TniQ-Cascade residues that interact with crRNA and target DNA, shown as in FIG. 52A.

[0157] FIGS. 53A-53E are Fourier Shell Correlation (FSC) curves, local resolution, and local refined maps for the TniQ-Cascade complex in open conformation. FIG. 53A is a gold-standard FSC curve using half maps; the global resolution estimation is 3.5 Å by the FSC 0.143 criterion.

[0158] FIG. 53B is a cross-validation model-vs-map FSC. Blue curve, FSC between shacked model refined against half map 1; red curve, FSC against half map 2, not included in the refinement; black curve, FSC between final model against the final map. The overlapping between the blue and red curves guarantees a non-overfitted model. FIG. 53C is an unsharpened map colored according to local resolutions, as reported by RESMAP. Right, slice through the map shown on the left. FIG. 53D shows that local refinements with soft masks improved the maps in flexible regions. Shown the region of the map corresponding to the TniQ dimer. Unsharpened maps colored according to the local resolution estimations are shown before (left) and after (right) masked refinements. FIG. 53E is the final model for the TniQ dimer region, colored according to the local B-factors calculated by REFMAC.

[0159] FIGS. 54A-54C shows that TniQ harbors a HTH domain involved in protein-protein interactions within the TniQ dimer. A DALI search using the refined TniQ model as probe found significant similarity between the N-terminal domain of TniQ with PDB entries 4r24 (FIG. 54A) and 3ucs (FIG. 54B) (Z score 4.1/4.1, r.m.s.d. 3.8/5.1). Both proteins contain Helix-Turn-Helix (HTH) domains and HTH domains are often involved in nucleic acid recognition and mediate protein-protein interactions. FIG. 53C shows that the TniQ dimer is stabilized in a head-to-tail configuration by reciprocal interactions mediated by the HTH domain and the TniQ-domains from both monomers.

[0160] FIGS. 55A-55C are the Fourier Shell Correlation (FSC) curves, local resolution, and unsharpened filter maps for the DNA-bound TniQ-Cascade complex. FIG. 55A is a gold standard FSC curve using half maps; the global resolution estimation is 2.9 Å by the FSC 0.143 criterion. FIG. 55B is a cross-validation model-vs-map FSC. Blue curve, FSC between the shacked model refined against half map 1; red curve, FSC against half map 2, not included in the refinement; black curve, FSC between final model against the final map. The overlap observed between the blue and red curves guarantees a non-overfitted model. FIG. 55C left, is an unsharpened map colored according to local resolutions, as reported by RESMAP. dsDNA is visible at the top right projecting outside of the complex. FIG. 54C, right, is the final model colored according to B-factors calculated by REFMAC.

[0161] FIG. 56 is the superposition of DNA-bound TniQ-Cascade with structurally similar Cascade complexes. The DNA-bound structure of V. cholerae I-F variant TniQ-Cascade complex (left) was superposed with DNA-bound structures of Pseudomonas aeruginosa I-F Cascade₁ (also known as Csy complex; middle, PDB ID: 6B44) and Escherichia coli I-E Cascade₉ (right, PDB ID: 5H9F). Shown are superpositions of the entire complex (top), the Cas8 and Cas5 subunits with the 5′ crRNA handle and double-stranded PAM DNA (middle top), the Cas7 subunit with a fragment of crRNA (middle bottom), and the Cas6 subunit with the 3′ crRNA handle (bottom).

[0162] FIGS. 57A-57F are the pairwise sequence identities between C2c5 homologs.

[0163] FIGS. 58A-58C is the analysis of the C2c5 genomic loci of the C2c5 homologs from FIG. 57.

[0164] FIG. 59 is a multiple sequence alignment of TnsA from Vch, Vibrio cholerae (SEQ ID NO: 141); Ecl, Enterobacter cloacae (SEQ ID NO: 1715); Asa, Aeromonas salmonicida (SEQ ID NO: 716); Pmi, Proteus mirabilis (SEQ ID NO: 1717); Eco, Escherichia coli (SEQ ID NO: 1714). Conserved catalytic residues are indicated with red triangles.

[0165] FIG. 60 is a multiple sequence alignment of TnsB from Vch, Vibrio cholerae (SEQ ID NO: 143); Ecl, Enterobacter cloacae (SEQ ID NO: 1719); Asa, Aeromonas salmonicida (SEQ ID NO: 1720); Pmi, Proteus mirabilis (SEQ ID NO: 1721); Eco, Escherichia coli (SEQ ID NO: 1718). Conserved catalytic residues are indicated with red triangles.

[0166] FIG. 61 is a multiple sequence alignment of TnsC from Vch, Vibrio cholerae (SEQ ID NO: 145); Ecl, Enterobacter cloacae (SEQ ID NO: 1723); Asa, Aeromonas salmonicida (SEQ ID NO: 1724); Pmi, Proteus mirabilis (SEQ ID NO: 1725); Eco, Escherichia coli (SEQ ID NO: 1722). Walker A and Walker B motifs characteristic of AAA+ ATPases are indicated, and active site residues involved in ATPase activity are indicated with blue triangles. Some TnsC homologs are annotated as TniB.

[0167] FIG. 62 is a multiple sequence alignment of TniQ/TnsD from Vch, Vibrio cholerae (SEQ ID NO: 147); Ecl, Enterobacter cloacae (SEQ ID NO: 1727); Asa, Aeromonas salmonicida (SEQ ID NO: 1728); Pmi, Proteus mirabilis (SEQ ID NO: 1729); Eco, Escherichia coli (SEQ ID NO: 1726). VchTniQ is aligned to members of the TniQ/TnsD family. Conserved zinc finger motif residues are indicated with blue arrows.

[0168] FIG. 63 is a multiple sequence alignment of Cas6 from Vch, Vibrio cholerae (SEQ ID NO: 153); Rho, Rhodobacter sp (SEQ ID NO: 1730); Bpl, Burkholderia plantarii (SEQ ID NO: 1731); Idi, Idiomarina sp. H105 (SEQ ID NO: 1732); Pae, Pseudomonas aeruginosa (SEQ ID NO: 1733). VchCas6 is aligned to other I-F Cas6 proteins, which are often annotated as Cas6f or Csy4. Conserved catalytic residues are indicated with red arrows.

[0169] FIG. 64 Multiple sequence alignment of Cas7 from Vch (SEQ ID NO: 151), Vibrio cholerae; Rho, Rhodobacter sp (SEQ ID NO: 1734); Bpl, Burkholderia plantarii (SEQ ID NO: 1735); Idi, Idiomarina sp. H105 (SEQ ID NO: 1736); Pae, Pseudomonas aeruginosa (SEQ ID NO: 1737). VchCas7 is aligned to other I-F Cas7 proteins, which are often annotated as Csy3.

[0170] FIGS. 65A and 65B are multiple sequence alignments of Cas8 and Cas5 from Vch, Vibrio cholerae (SEQ ID NO: 149); Rho, Rhodobacter sp (SEQ ID NOs: 1738 and 1742, respectively); Bpl, Burkholderia plantarii (SEQ ID NOs: 1739 and 1743, respectively); Idi, Idiomarina sp. H105 (SEQ ID NOs: 1740 and 1744, respectively); Pae, Pseudomonas aeruginosa (SEQ ID NOs: 1741 and 1745, respectively). VchCas8, a natural Cas8-Cas5 fusion protein, is aligned to other I-F Cas8 proteins (FIG. 65A), which are often annotated as Csy1, and to other I-F Cas5 proteins (FIG. 65B), which are often annotated as Csy2.

[0171] FIG. 66 are schematics of the occurrence of tnsA-tnsB fusions in Tn7-like transposons that encode Type I-F CRISPR-Cas systems. Gene organization of the transposon and CRISPR-Cas machinery from select transposons, including E. coli Tn7 (top), V. cholerae Tn6677 (second from top), and new candidate Tn7-like transposons from Parashewanella spongiae (second from bottom) and Aliivibrio wodanis (bottom). In the bottom two examples, there is a natural fusion between tnsA-tnsB. Genes from the CRISPR-Cas operon are also indicated (tniQ), cas8, cas7, cas6, and the CRISPR array). The protein accession IDs for the bottom two systems are denoted below the gene schematics. “R” and “L” denote the right and left ends of the transposon, respectively.

[0172] FIGS. 67A and 67B are the design and testing of engineered TnsA-TnsB fusion proteins from the V. cholerae Tn6677 transposon. Starting with the pTnsABC vector, which encodes the natural TnsA, TnsB, and TnsC operon from V. cholerae, a synthetic fusion of TnsA-TnsB was constructed based on alignments with other naturally occurring TnsA-TnsB fusions, to generate a new modified pTns (AB) (C vector, pSL1738 (FIG. 67A and SEQ ID NO: 935). E. coli BL21 (DE3) competent cells that already contained a mini-transposon plasmid donor (pDonor; pSL0527, SEQ ID NO: 7) and a plasmid encoding the TniQ-Cascade (crRNA-4) complex (pSL0828, SEQ ID NO: 14) were transformed with either an empty vector as control (pSL0008, SEQ ID NO: 3), the original pTnsABC vector (encoding TnsA, TnsB, and TnsC), or the new engineered vector containing a TnsA-TnsB fusion protein alongside TnsC (pSL1738). Integration efficiency was quantified by qPCR for both of two possible integration orientations downstream of target-4, tRL and tLR (FIG. 67B). The engineered fusion protein exhibited close to the same activity of wild-type as the pSL0283/pTnsABC (SEQ ID NO: 13) construct, demonstrating that engineered TnsA-TnsB fusion proteins are functional in vivo for RNA-guided DNA integration.

[0173] FIG. 68 is a graph showing influence of right transposon end sequence truncations on the preferred orientation of RNA-guided DNA integration, verifying results from FIG. 11C at four additional target sites. The x-axis shows the length of the right transposon end sequence. Blue tones indicate T-LR (R end of the transposon is proximal to the target site) integration events whereas orange tones indicate T-RL integration events (R end of the transposon is proximal to the target site). Truncating the right transposon end to 97 bp or shorter caused a shift towards preferred integration in the TRL orientation (˜95% of integration events) and was consistent for all target sites tested.

[0174] FIG. 69 is a schematic of an exemplary approach to generate and test engineered transposon end sequences in pooled library experiments.

[0175] FIG. 70 is a schematic of an exemplary cloning approach for generating separate transposon end libraries from an oligo pool. Right transposon end libraries are generated by digesting the insert and vector with HindIII and BamHI. Left transposon end libraries are generated by digesting with KpnI and XbaI. For library a) every possible combination of TnsB binding sites for three different positions was generated. For library b) every possible combination of TnsB binding sites for two different positions was generated. Library c) contained 2 bp mutations throughout the right flank. Library d) constituted all possible 1 bp mutations for the 8 bp right terminal end. Library e) included missense mutations affecting the three different possible open reading frames for the right transposon end. Library f) changed the distance between the TnsB binding sites in position 1 and position 2. The left transposon end library g) changed the distance between the TnsB binding sites in position 1 and 2 or between positions 2 and 3. The same spacing sequence were also separately mutated to compare the effect of distance and sequence identity.

[0176] FIGS. 71A-71G are graphs of the relative integration efficiencies for members of the ‘Right Flank Three Binding Sites’ library (library a). The two different orientations in which the transposon can integrate are shown in blue (T-RL (tRL)) and red (T-LR (tLR)). The relative integration efficiency was calculated against variant END.1.2.3 which most closely resembles the natural transposon end (END. 1.2.3 is a 90 bp truncated version of the standard pDonor of which the orientation bias is expected to be heavily skewed towards tRL). In this library, the locations of the three TnsB binding sites in the right end were maintained but their identities were changed to create all possible combinations of the binding sites. Apart from the six different TnsB binding site identities, the location of a palindromic sequence that is naturally present just inside of the transposon right end was also tested. These seven different sequences were numbered 1-7 (SEQ ID NOs: 936-942, respectively). The x-axis shows which TnsB binding site identity (1-7) was present in position 1, and 2, counting from the terminal transposon right end (see FIG. 68).

[0177] FIG. 72 are graphs of the relative integration efficiencies for members of the ‘Right Flank Two Binding Sites’ library (library b). The two different orientations in which the transposon can integrate are shown in blue (T-RL (tRL), top) and red (T-LR (tLR), bottom). The relative integration efficiency was calculated against variant END.1.2.3. In this library, the location of two TnsB binding sites in the right end were maintained but their identities were changed to create all possible combinations of the binding sites. Apart from the six different TnsB binding site identities, the location of a palindromic sequence that is naturally present just inside of the transposon right end was also tested. These seven different sequences were numbered 1-7, as in FIG. 71. The x-axis shows which TnsB binding site identity (1-7) was present in position 1, and 2, counting from the terminal transposon right end (see FIG. 68).

[0178] FIG. 73 is graphs of the relative integration efficiencies for members of the ‘Right Flank 2 bp Mutant’ library (library c). The two different orientations in which the transposon can integrate are shown in blue (T-RL) and red (T-LR). The relative integration efficiency was calculated against variant END. 1.2.3. The x-axis indicates the location of the affected bases counting from the most terminal right transposon end base.

[0179] FIG. 74 is a graph of the relative integration efficiencies for members of the ‘Right Flank End Mutant’ library (library d). The two different orientations in which the transposon can integrate are shown in blue (T-RL) and red (T-LR). The relative integration efficiency was calculated against variant END.1.2.3. The x-axis indicates both the location of the base that was changed counting from the most terminal base pair and the new nucleotide identity.

[0180] FIGS. 75A-C are graphs of the relative integration efficiencies for members of the ‘Right Flank Linker Sequence’ library (library e). The two different orientations in which the transposon can integrate are shown in blue (T-RL) and red (T-LR). The relative integration efficiency was calculated against variant END.1.2. The x-axis indicates the amino acid change caused by the mutation.

[0181] FIG. 76 is a graph of the relative integration efficiencies for members of the ‘Right Flank Spacing’ library (library f). The two different orientations in which the transposon can integrate are shown in blue (T-RL) and red (T-LR). The relative integration efficiency was calculated against variant END.1.2.3. Library f) has variable spacing, from the terminal transposon right end, between the first and second TnsB binding site. The x-axis indicates the distance between the binding sites.

[0182] FIGS. 77A-77E are graphs of the relative integration efficiencies for members of the ‘Left Flank Spacing’ library (library g). The two different orientations in which the transposon can integrate are shown in blue (T-RL) and red (T-LR). The relative integration efficiency was calculated against an unmutated truncated (122 bp) version of the standard pDonor (expected to have an orientation bias of 0.60 (T-RL): 0.40 (T-LR) based on truncation data published in Klompe et al., Nature 571, 219-225 (2019), incorporated herein by reference). Additionally, the Right Flank for all of these clones contains an MmeI recognition site which has a reduced integration efficiency of ˜40% as compared to WT. The x-axis of each graph indicates what kind of mutation was present in that specific variant. If the change affected the distance in between the binding sites this is denoted as the number of base pairs that now constitute the spacing. If the change was in sequence identity the location of the affected bases is indicated (counting from the most terminal base within the spacing).

[0183] FIG. 78 is an exemplary flow chart for bioinformatics identification and selection of candidate CRISPR_transposon systems. Each box, in the order defined by the arrows, highlights the steps used to gather a large set of candidate CRISPR-transposon systems for experimental study. Certain steps are denoted as optional, and the entire pipeline may be gated based on various seed strategies. For example, in the exemplary flow chart shown, the entire search algorithm is seeded based on the tnsB gene. In other embodiments, the search is seeded based on other transposon-associated genes, based on CRISPR-associated genes, based on the CRISPR array itself, or based on the transposon end sequences.

[0184] FIG. 79 shows the bioinformatic identification of CRISPR-transposon systems with a Type I-F variant CRISPR-Cas system, in which tnsA and tnsB are fused. The two indicated species contain CRISPR-transposon systems, in which the tnsA and tnsB genes are found in a natural fusion gene. The arrangement of the remaining components necessary for RNA-guided DNA integration are shown, as well as the NCBI protein accession IDs. For the tnsA-tnsB gene from Parashewanella spongiae strain HJ039, HHpred analysis confirmed the presence of hallmark Pfams for both TnsA (PF05367.11) and TnsB (PF09039.11 and PF02914.15).

[0185] FIGS. 80A and 80B shows the vector approach for RNA-guided DNA integration experiments involving CRISPR-transposon homologs. The gRNA and all protein components were expressed from pCQT (denoting the three modules present: CRISPR array, tniQ-cas8-cas7-cas6 genes, and tnsA-tnsB-tnsB genes), in which a single T7 promoter drives expression of a longer mRNA that encodes the precursor guide RNA and all seven proteins components (FIG. 80A). pCQT (the single-expression effector plasmid) was combined with pDonor (FIG. 80A), which contains the DNA cargo flanked by the transposon end sequences, left (L) and right (R). The two vectors encoded spectinomycin and carbenicillin resistance. FIG. 80B is a list of organisms from which the engineered CRISPR-transposon systems were derived. The column on the left indicates the organism information; the second column contains identifier information for the plasmid used for pCQT for each system (SEQ ID NOs: 855, 1623, 1624, 1625, 1626, 1627, 1628, 1903, 1629, 1904, 1905, 1630, 1906, 1907, 1908, respectively); and the third column contains identifier information for the plasmid used for pDonor for each system (SEQ ID NOs: 1614, 1615, 1616, 1617, 1618, 1619, 1620, 1897, 1621, 1898, 1899, 1622, 1900, 1901, 1902, respectively). Each pair of pCQT and pDonor plasmids may be paired, because the transposon end sequences on pDonor are recognized specifically by protein components on the cognate pCQT vector. The CRISPR transposon systems from Aliivibrio wodanis and Parashewanella spongiae encode a tnsA-tnsB fusion protein.

[0186] FIG. 81 is a graph of the RNA-guided DNA integration data for modified pDonor vector backbones. Integration efficiencies were determined by qPCR for pDonor derivatives, using the CRISPR-transposon system from Vibrio cholerae strain HE-45. Relative to pSL0527 (SEQ ID NO: 7), pSL0921 (SEQ ID NO: 1613) had a deletion in the extraneous lac promoter, and pSL1235 (SEQ ID NO: 1614) had additional extraneous sequences removed. pSL0001 (SEQ ID NO: 5) is an empty vector control equivalent to pUC19, and pSL1209 (SEQ ID NO: 1612) is an empty vector control but with similar extraneous sequences removed as are also absent in pSL1235. Plotted are the integration efficiencies for both the tRL and tLR orientations, shown in red and blue, respectively. The pSL0921 and pSL1235 donor plasmids show slightly high integration efficiency than pSL0527, and thus, pSL1235 was the design that served as the benchmark for pDonor vectors for other homologous CRISPR-transposon systems.

[0187] FIGS. 82A-82C show the PCR detection of RNA-guided DNA integration products from transposition assays using homologous CRISPR-transposon systems. FIG. 82A is a schematic of the experiment, in which target-4 within the E. coli lacZ gene is targeted for proximal DNA integration. The mini-transposon donor DNA can insert in one of two orientations, tRL (top, bottom) and tLR (bottom, bottom), and distinct primer pairs are used to detect each of the orientations by PCR. FIG. 82B is the PCR analysis of E. coli BL21 (DE3) cells transformed with the plasmids shown in the legend. For each experiment, the cells were transformed with both plasmids, grown on LB-agar plates containing inducer, and then cells were scraped, lysates were prepared, and PCR analyses were performed to detect integration products. PCR reactions were resolved by 1% agarose gel electrophoresis. The top left panel shows results for primer pairs designed to amplify tRL products; the bottom left panel shows results for the exact same set of lysates, but with primer pairs designed to amplify tLR products. The reactions tested CRISPR-transposon homologs from the following organisms: 1) negative control for the system from Vibrio cholerae strain HE-45, but lacking pDonor; 2) Vibrio cholerae strain HE-45; 3) Vibrio cholerae strain 4874; 4) Photobacterium iliopiscarium strain NCIMB; 5) Pseudoalteromonas sp. P1-25; 6) Pseudoalteromonas ruthenica strain S3245; 7) Photobacterium ganghwense strain JCM; 8) Shewanella sp. UCD-KL21; 9) Vibrio cholerae strain OYP7G04; 10) Vibrio cholerae strain M1517. FIG. 82C is the PCR analysis of E. coli BL21 (DE3) cells transformed with the plasmids shown in the legend. For each experiment, the cells were transformed with both plasmids, grown on LB-agar plates containing inducer, and then cells were scraped, lysates were prepared, and PCR analyses were performed to detect integration products. PCR reactions were resolved by 1% agarose gel electrophoresis. The top left panel shows results for primer pairs designed to amplify tRL products; the bottom left panel shows results for the exact same set of lysates, but with primer pairs designed to amplify tLR products. The reactions tested CRISPR-transposon homologs from the following organisms: 1) Vibrio diazotrophicus strain 60.6F; 2) Vibrio sp. 16; 3) Vibrio sp. F12; 4) Vibrio splendidus strain UCD-SED10; 5) Aliivibrio wodanis 06/09/160; 6) Parashewanella spongiae strain HJ039. Note that the CRISPR-transposon systems in reaction numbers/lanes 5 and 6 encode a TnsA-TnsB fusion protein. * denotes a non-specific PCR amplicon.

[0188] FIGS. 83A and 83B shows the vector layout for testing RNA-guided DNA integration with Type-V CRISPR-Cas system associated transposons. FIG. 83A is a schematic representation of the different exemplary vector layouts. Experiments are either done with an all-in-one vector (pAIO, top) or with a vector expressing the machinery (pCCT, middle) in combination with a separate donor vector (pDonor, bottom). The left and right transposon end sequences are represented with an ‘L’ and ‘R’, respectively. FIG. 83B are the plasmid ID's for exemplified vectors used for testing a type V CRISPR-Cas associated transposon from Scytonema hofmannii strain PCC 7110: pSL1117 (SEQ ID NO:1767), pSL1114 (SEQ ID NO: 1632), and pSL0948 (SEQ ID NO: 1631). ‘NT/cloning’ indicates that these plasmids encode a full-length sgRNA but that the guide has no target in E. coli and is therefore non-targeting (NT). Additionally, these vectors enable facile cloning of new guide sequences.

[0189] FIGS. 84A-84D show RNA-guided DNA integration using a Type V system. FIG. 84 A is a schematic of an exemplary for separately targeting four different sites on lacZ and one upstream in the cynX gene. Integration events were analyzed using a combination of a genome-specific primer with one of two transposon-specific primers to pull out the different orientations in which the mini-transposon can integrate. FIG. 84B shows the analysis by PCR and subsequent agarose gel electrophoresis revealing successful site-specific integration for all four guides tested with a bias towards integrating in the tLR orientation over the tRL orientation. FIG. 84C is a graph of the quantitative analysis completed using qPCR at the different target sites. These data corroborated the orientation bias uncovered FIG. 84B and showed efficient integration for all targeting guides tested. FIG. 84D is a schematic and the results from a proof of principle experiment proving that an all-in-one version of the system also facilitates RNA-guided DNA integration.

[0190] FIGS. 85A-85C are genome wide specificity of three different CRISPR-transposon systems, two Type V (FIGS. 85A and 85B) and one Type I (FIG. 85C) associated systems. Two different guides were tested for each of the systems (top and middle rows), indicated by the tSL # at the top of each plot. The corresponding target site is shown as a maroon triangle on the x-axis. The percent of reads mapping to the on-target site is shown in red next to the peaks when possible. For each system we zoomed in on the y-axis to 0.5% of reads (bottom row). The on-target specificities are given in red bolded text.

[0191] FIGS. 86A-86G show an overview of engineered vector designs to streamline expression and reconstitution of RNA-guided DNA integration. FIG. 86A is a schematic overview of the process of RNA-guided DNA integration, involving DNA targeting by a CRISPR-Cas system, and integration of donor DNA proximal to the target site by a transposon system. FIG. 86B is a schematic of the targeting of a 32-bp genomic target site flanked by a protospacer adjacent motif (PAM) by the type I-F variant CRISPR-Cas system leads to integration of the donor DNA ˜47-51 bp downstream. The donor DNA can be inserted in one of two potential orientations, denoted by the order of transposon ends closest to the target site; thus, tRL results from the right end of the transposon being inserted proximally to the target site, whereas tLR results from the left end of the transposon being inserted proximally to the target site. FIG. 86C is schematics for the three-plasmid system for reconstituting RNA-guided DNA integration. pQCascade encodes the gRNA, driven by a T7 promoter, as well as TniQ, Cas8, Cas7, and Cas6 from a single operon, also driven by T7 promoter. pTnsABC encodes TnsA, TnsB, and TnsC within a single operon, driven by a T7 promoter. pDonor contains the donor DNA flanked by transposon end sequences. FIG. 86D is schematics of a two-plasmid system for reconstituting RNA-guided DNA integration. pCQT encodes the gRNA and all 7 protein components under control of a single T7 promoter. A single transcriptional terminator lies at the 3′ end of the operon. The donor DNA is still encoded on pDonor (pSL1119). FIG. 86E is a schematic of a single engineered all-in-one (AIO) plasmid system for reconstituting RNA-guided DNA integration. pAIO encodes the gRNA and all 7 protein components, as also contains the donor DNA. FIG. 86F is a schematic demonstrating how a single long transcript derived from pCQT/pAIO, which contains the precursor CRISPR RNA 5′ of the single-operon mRNA, can be easily processed by Cas6 in Type I CRISPR-Cas systems into the mature gRNA (also referred to as CRISPR RNA, or crRNA), leaving the downstream mRNA intact for translation by the ribosome. FIG. 86G is a schematic demonstrating how a single long transcript derived from pCQT/pAIO, which contains the precursor CRISPR RNA 3′ of the single-operon mRNA, can be easily processed by Cas6 in Type I CRISPR-Cas systems into the mature gRNA (also referred to as CRISPR RNA, or crRNA), leaving the upstream mRNA intact for translation by the ribosome. pCQT in panel D is exemplified by pSL1022 (SEQ ID NO: 855) (All plasmid sequences can be found in SEQ ID NOs: 9, 848-861, and 1746-1764); pDonor in panels C and D are exemplified by pSL1119 (SEQ ID NO: 1755).

[0192] FIGS. 87A and 87B show the optimization of engineered vectors containing fewer vector and promoter elements. FIG. 87A (left panel) is a schematic overview of iterative screening of engineered vectors in which expression of the gRNA and TniQ-Cas8-Cas7-Cas6 operon is driven by one single T7 promoter rather than two separate T7 promoters. The three derivative plasmids (pQCascade, pQCascade-B, and pQCascade-C) were cloned and tested for RNA-guided DNA integration in conjunction with pTnsBC and pDonor in E. coli BL21 (DE3) cells. All three plasmid exhibit similar activities (FIG. 87A, right panel), indicating that a single T7 promoter can drive efficient production of all the necessary molecular components. FIG. 87B (left panel) is a schematic overview of iterative screening of engineered vectors in which expression of the gRNA and TniQ-Cas8-Cas7-Cas6-TnsA-TnsB-TnsC operon is driven by a single T7 promoter rather than two or three T7 promoters. The vectors pC7QT, PCQT, pT7QC, and pTQC were cloned, which have variable orders of components and numbers of T7 promoters, and then tested for RNA-guided DNA integration in E. coli BL21 (DE3) cells. FIG. 87B, right panel is a graph of the quantified integration efficiencies (measured by qPCR). pCQT has an improved efficiency compared with the other vectors. In FIG. 87A: pQCascade=pSL0828 (SEQ ID NO:14), pQCascade-B=pSL1016 (SEQ ID NO: 849), pQCascade-C=pSL1018 (SEQ ID NO: 851), pTnsABC=pSL0283 (SEQ ID NO: 6), pDonor=pSL1119 (SEQ ID NO: 1755). In FIG. 87B: pC7QT=pSL1020 (SEQ ID NO: 853), pCQT=pSL1022 (SEQ ID NO: 855), pT7QC=pSL1024 (SEQ ID NO: 857), pTQC=pSL1026 (SEQ ID NO: 859

[0193] FIG. 88A-88C is graphs of the analysis of integration efficiencies with variable vector backbones and specific gRNAs. Derivatives of the all-in-one pAIO vector were cloned, in which the exact same construct was swapped into multiple distinct vector backbones, including pCDF, pUC19, pSC101, and pBBR1. The vectors have different antibiotic resistances, and importantly, different steady-state copy numbers. BL21 (DE3) cells were transformed with each vector, and RNA-guided DNA integration efficiency was quantified by qPCR (FIG. 88A). The data show that the pBBR1 and pSC101 vector backbones are most efficient for RNA-guided DNA integration in this comparison study. The efficiency of RNA-guided DNA integration at 5 different target sites was systematically compared between the all-in-one plasmid design (pAIO) and the 3-plasmid design involving multiple T7 promoters and vectors driving the gRNA, the TniQ-Cas8-Cas7-Cas6 operon, and the TnsA-TnsB-TnsC operon. The efficiencies for the 3-plasmid system were normalized to 1, and the relative efficiencies for the pAIO plasmids plotted (FIG. 88B). The results show that in all cases, the total efficiency of the single all-in-one plasmid system is between 2-5-fold higher than the 3-plasmid system. FIG. 88C shows the assessment of genome-wide RNA-guided DNA insertion specificity by Tn-seq for the engineered all-in-one (pAIO) vectors. After performing Tn-seq based experiments to assess genome-wide specificity, the percent on-target integration was calculated by considering the number of reads mapping to the on-target integration site, versus the total number of genome mapping reads. All five gRNAs within the pAIO vector backbone directed integration at ˜100% on-target specificities. In panel A: “pCDF” is exemplified by pSL1213 (SEQ ID NO: 1751), “PUC19” is exemplified by pSL1121 (SEQ ID NO: 861), “pSC101” is exemplified by pSL1220 (SEQ ID NO: 1752), “pBBR1” is exemplified by pSL1222 (SEQ ID NO: 1753).

[0194] FIG. 89 is the Tn-seq data for the engineered all-in-one pAIO vectors. Genome-wide specificity of gRNA-1, gRNA-4, gRNA-12, gRNA-13, gRNA-17 within the pAIO vector is shown by plotting all the Tn-seq reads across the 5.6-Mbp E. coli genome. The inset at the right shows a zoom-in of the on-target peak, and tabulates the on-target specificity (line 2 of text) and the ratio of tRL:tLR orientation (line 3 of text) for the same gRNA-1.

[0195] FIGS. 90A-90C show engineered vectors with diverse promoters for RNA-guided DNA integration. FIG. 90A shows that starting with the all-in-one pAIO plasmid containing the inducible T7 promoter, the promoter was replaced with various synthetic biology promoters of variable expression strength (J series), as well as either the lac promoter or a broad host-range promoter derived from a previous study developing methods for in situ bacterial engineering using conjugative plasmids (Ronda, C., Chen, S. P., Cabral, V., Yaung, S. J. & Wang, H. H. Nat Meth 16, 167-170 (2019), incorporated herein by reference). After cloning the desired plasmids, E. coli BL21 (DE3) cells were transformed with the pAIO containing the stated promoter, and the efficiency of RNA-guided DNA integration was quantified by qPCR. The strongest J23119 promoter shows optimal activity, and integration efficiency decreases with decreasing promoter strength. Genome-wide specificity measurements using Tn-seq show that there is no change in genome-wide specificity with variable expression levels of the machinery, or with variable absolute integration efficiencies (FIG. 90B). Using the all-in-one pAIO vectors containing variable promoter strengths, RNA-guided DNA integration assays were performed in which the transformed E. coli cells were cultured at either 37° C. (red), 30° C. (yellow) or 25° C. (blue). Integration efficiencies (FIG. 90B) were then quantified after 24 hours of solid media culturing by qPCR. The results demonstrate that low-efficiency constructs, such as the weak J23114 promoter which is low-activity at 37° C., achieve ˜100% integration efficiency when the cells were cultured at lower temperatures. These experiments provide a facile experimental strategy for elevating the efficiency of integration under vector or promoter conditions that are otherwise non-ideal at elevated temperature. In panel A: “J23119” is exemplified by pSL1130 (SEQ ID NO: 864), “J23114” is exemplified by pSL1133 (SEQ ID NO: 867), “MAGIC-1” is exemplified by pSL1279 (SEQ ID NO: 1750). In panel C: T7-lacO is exemplified by pSL1213 (SEQ ID NO: 1751), “J23119” is exemplified by pSL1130 (SEQ ID NO: 864), “J23114” is exemplified by pSL1133 (SEQ ID NO: 867).

[0196] FIGS. 91A-91B show that RNA-guided DNA integration proceeds independent of specific host factors and recombination factors. Using the all-in-one pAIO vectors that contain the strong constitutive promoter J23119, multiple different E. coli strains were transformed, including MG1655, BW25113, and BL21 (DE3). The genome-wide specificity of RNA-guided DNA integration was analyzed within each genetic background, and the data plotted represent the integration events at the on-target site (FIG. 91A). In addition, the text in the upper right within each plot reports the on-target specificity (line 2), measured by comparing reads at the on-target site divided by all genome-mapping reads, as well as the orientation bias for tRL:tLR. These experiments demonstrate that the advantageous specificity profile, and the near-exclusive orientation preference for tRL, are excellently reproduced across multiple distinct E. coli strains. Using the all-in-one pAIO vector that contains the strong constitutive promoter J23119 (exemplified by pSL1130, SEQ ID NO: 864), multiple Keio knockout strains were transformed, in which the gene knockouts are shown along the x-axis. For each strain, the integration efficiency is plotted relative to the WT BW25113 strain (FIG. 91B). These results indicate that the recA recombinase is completely dispensable for RNA-guided DNA integration, as are the factors recD, recF, and mutS.

[0197] FIGS. 92A-92C show that RNA-guided DNA integration can be stimulated with lower temperature culturing, allowing highly efficient insertion of large genetic payloads in excess of 10-kb. A two-plasmid system was used for RNA-guided DNA integration experiments, comprising pDonor and pCQT driven by a T7 promoter and targeting the E. coli genome with crRNA-4. Negative control experiments (non-target crRNA, “nt”; no donor DNA) show an absence of any integration, as measured by qPCR. When the transformed E. coli cells are cultured on solid media at 37° C., the integration efficiency drops severely as the size of the genetic payload increases from 0.98 kb to 10 kb (FIG. 92A). However, when the exact same transformed cells are instead cultured on solid media at 30° C., the efficiency of integration remains at ˜100%, regardless of the size of the genetic payload inserted in pDonor in between the transposon ends. Similar experiments were performed in FIG. 92B, except the expression vector employs a J23119 promoter instead of a T7 promoter. Lower temperature culturing again shows a consistent and statistically significant increase in total integration efficiencies regardless of payload size, as compared to culturing at 37° C. Similar experiments were performed in FIG. 92C, except the expression vector employs a J23119 promoter instead of a T7 promoter, and crRNA-13 was used in place of crRNA-4. Lower temperature culturing again shows a consistent and statistically significant increase in total integration efficiencies regardless of payload size, as compared to culturing at 37° C. pCQT is exemplified by pSL1022 (SEQ ID NO: 855). pDonor is exemplified by pSL1119 (SEQ ID NO: 1755) for the 0.98 kb version, and by pSL1619 (SEQ ID NO: 1756) for the 10 kb version.

[0198] FIGS. 93A-93B show that a fully autonomous, self-mobilizable mobile genetic element undergoes highly-efficient RNA-guided DNA integration. An autonomous all-in-one plasmid (pAAIO) was constructed (FIG. 93A), in which the promoter-driven operon encoding the gRNA and all 7 protein components (TniQ-Cas8-Cas7-Cas6-TnsA-TnsB-TnsC), is inserted directly in between the transposon left and right ends. This converts the mini-transposon into a self-mobilizable element, in which the machinery directing RNA-guided DNA integration inserts the donor DNA into a target site, which then encodes the machinery to continue mobilizing the same donor DNA to any target site programmed within the CRISPR array. Despite the large size of the genetic payload (>10 kb), RNA-guided DNA integration (FIG. 93B) of the donor DNA in pAAIO proceeds with ˜100% efficiency, without any drug selection, when the transformed E. coli cells are cultured at 30° C. as opposed to 37° C. pAAIO is exemplified by pSL1184 (SEQ ID NO: 1747).

[0199] FIGS. 94A-94C demonstrate multiplexed RNA-guided DNA integration using multiple-spacer CRISPR arrays. By encoding multiple distinct spacers within an expanded CRISPR array, engineered CRISPR-transposon systems can be easily turned into a multiplexed platform for DNA insertions proximal to multiple target sites within the same genomic DNA (FIG. 94A). Processing of long precursor CRISPR RNAs is straightforward in Type I CRISPR-Cas systems that employ Cas6 for ribonucleolytic processing. CRISPR arrays were constructed (FIG. 94B, left), in which a maroon spacer sequence was either not present (top), the only spacer present (second from top), or one of multiple distinct spacers and situated within different positions of the CRISPR array relative to the transcription start site 5′ of the CRISPR array. For each distinct construct, RNA-guided DNA integration experiments were performed in E. coli BL21 (DE3) cells, and the efficiency of RNA-guided DNA integration proximal to the genomic target site programmed by the maroon spacer was measured by qPCR. The total efficiency is plotted relative to the efficiency for the maroon spacer when it is the only spacer in the array (FIG. 94B, right). The results demonstrate that even when present as one of three distinct spacers, the maroon spacer can still direct RNA-guided DNA integration at >50% wild-type efficiencies, and has highest activity when it's closest to the 5′ transcription start site. Genome-wide specificity analysis from a Tn-seq library (FIG. 94C) was generated from cells that underwent multiplexed donor DNA integration using a CRISPR array encoding three distinct spacer sequences. Tn-seq analysis revealed that 99.6% of reads are present exclusively at one of the three target sites, indicating a very high efficiency and on-target accuracy of multiplexed integration. Because ligation efficiencies are known to be sequence-dependent, and other confounding factors contribute to nose in the total height of peaks from next-generation sequencing, no conclusions can be drawn regarding the relative efficiency for DNA integration at these three sites from the Tn-seq profile. 2-spacer-array constructs are exemplified by pSL1202 (SEQ ID NO: 1757), 3-spacer-array constructs are exemplified by pSL1341 (SEQ ID NO: 1758).

[0200] FIGS. 95A-95B show that multiplexed RNA-guided DNA integration results in predictable phenotypic outcomes. A multiple-spacer CRISPR array was constructed, in which one spacer targets thrC for insertional inactivation, and a second spacer targets lysA for insertional inactivation (FIG. 95A, top). Cells undergoing multiplexed RNA-guided DNA integration should become auxotrophic for threonine and lysine, because they can no longer synthesize these amino acids from carbon sources due to the knockout insertions within these two genes. To test this hypothesis, E. coli cells were transformed and then plated the resulting transformants on either M9 minimal media, M9 minimal media plus lysine, M9 minimal media plus threonine, or M9 medial media plus threonine and lysine. Cells that became auxotrophic were only able to grow on plates that had the corresponding amino acid, and thus, relative colony counting on the various LB-agar plates directly revealed the efficiency of multiplexed RNA-guided DNA integration. These experiments showed that ˜20% of cells were immediately a double-auxotrophic after this single-step multiplex RNA-guided DNA integration activity (FIG. 95A, bottom). To further corroborate these results, clones isolated from various plates were grown in liquid culture in the presence of various media sources, and then their growth was measured over time in a shaking microplate incubator and reader. The results (FIG. 95B) demonstrate that the strains expected to be doubly auxotrophic indeed were completely unable to grow in minimal media alone, and instead required both threonine and lysine (“TL”) in the M9 minimal media in order to survive. Construct in panel A is exemplified by pSL1642 (SEQ ID NO: 1759).

[0201] FIGS. 96A-96C show an engineered CRISPR-transposon system for mobilizing donor DNA within cells. Tn7-like transposons exhibit target immunity, in which the presence of one genomically integrated transposon represses the same target site from undergoing another round of integration. FIG. 96A outlines an exemplary workflow for studying immunity. In the left, a genome is subjected to RNA-guided DNA integration using a temperature sensitive all-in-one plasmid (pAIO-ts), such that the cells can be cured of the plasmid after the successful integration event. These cells are then made chemically competent, and subjected to another round of transformation in which the protein-RNA machinery is delivered (pCQT) alongside a distinct traceable pDonor molecule. If the system exhibits target immunity, then the same target site should be unable to serve as an efficient receiver of another donor DNA molecule. FIG. 96B shows exemplary experiments to test the distance range of target immunity. Starting with a cell strain containing genomically integrated donor DNA (an “immunized” state), pCQT was transformed with a gRNA targeting variable target sites upstream of the pre-existing donor DNA, ranging from 0-5003 bp, all the way up to a target site that is >1 Mb from the first donor DNA site. Then, the relative efficiency of integration was calculated, by measuring the local integration efficiency in a naïve WT strain by qPCR, as well as the efficiency of integration in the immunized strain by qPCR. The ratio was plotted, and the results indicated that target immunity can operate at long distance scales, relative to the distance between target DNA binding and donor DNA integration. In another embodiment (FIG. 96C), the machinery encoded by pCQT is delivered to an immunized strain, but without another copy of pDonor. In this embodiment, the machinery can excise the donor DNA from its pre-existing site in the genome, and mobilize it to a new target site based on the spacer content within pCQT. This embodiment offers a method for making programmed translocation within cells, provided they have a pre-existing donor DNA with transposon ends recognized by the CRISPR-transposon system. pAIO-ts in panel A is exemplified by pSL1223 (SEQ ID NO: 1754). pCQT in panels is exemplified by pSL1022 (SEQ ID NO: 855).

[0202] FIGS. 97A-97B show that two engineered CRISPR-transposon systems do not cross-react and thus can be used as orthogonal RNA-guided DNA integration systems. FIG. 97A is a schematic of orthogonal RNA-guided integrases. A type I-F variant CRISPR-transposon system derived from Vibrio cholerae strain HE-45 (left) used to reconstitute RNA-guided DNA integration in E. coli with a pDonor plasmid and a pCQT expression plasmid. A Type V CRISPR-transposon system derived from Scytonema hofmannii strain PCC 7110 (right) is used to reconstitute RNA-guided DNA integration in E. coli using a pDonor plasmid (Sho-pDonor) and a plasmid encoding the sgRNA under control of a T7 promoter and the Cas12k-TnsB-TnsC-TniQ operon under control of a second T7 promoter (Sho-PCCT). Experiments were performed to investigate whether Vch-pCQT can mobilize the Sho-pDonor donor DNA, and whether Sho-pCCT can mobilize the Vch-pDonor donor DNA. The plasmids shown above the gel were used in various combinations to transform E. coli BL21 (DE3) cells, and primer pairs were used to detect RNA-guided DNA integration products; different primer pairs were chosen to selectively amplify a tRL product or a tLR product. The results (FIG. 97B) clearly indicate that, while Vch-pCQT catalyzed RNA-guided DNA integration using its own Vch-Donor donor DNA, it was unable to direct RNA-guided DNA integration using the Sho-Donor donor DNA; the converse was also true. However, both systems were able to catalyze efficient and robust RNA-guided DNA integration when the expression plasmid is paired with the cognate donor DNA plasmid. In panel A: Vch-pCQT is exemplified by pSL1022 (SEQ ID NO: 855), Vch-pDonor is exemplified by pSL1119 (SEQ ID NO: 1755), Sho-pCCT is exemplified by pSL1115, Sho-pDonor is exemplified by pSL0948 (SEQ ID NO: 1631).

[0203] FIGS. 98A-98D show that an engineered CRISPR-transposon system functions robustly in multiple other bacterial species. A modified, engineered all-in-one plasmid with the CRISPR-transposon system derived from Vibrio cholerae strain HE-45, in which the machinery and donor DNA is cloned into the broad host range pBBR1 backbone (pAIO-BBR1), was generated. Within this vector, we used a strong constitutive J23119 promoter, that is also known to be recognized by diverse Gram-negative bacteria, was used. Using this engineered plasmid, different spacer sequences were cloned in order to direct RNA-guided DNA integration in Klebsiella oxytoca and Pseudomonas putida. P. putida and K. oxytoca were electroporated with pAIO-BBR1 containing spacers targeting multiple distinct genes, and successful integration was probed using one of four distinct primer pairs, a-d, to look for either the tRL or tLR orientation (FIG. 98B), and look at both the upstream and downstream genome-transposon junction. FIG. 98C shows the PCR analysis of RNA-guided DNA integration in the indicated bacterial species (top), analyzed by agarose gel electrophoresis. Data for gRNAs targeting one of two target genes is shown in the gel (see gene labels in the top part of panel), and cell lysates were probed with one of four primer pairs, a, b, c, and d. The bands in the top part of the gel indicate robust RNA-guided DNA integration, which was confirmed by subsequent Sanger sequencing analysis. The PCRs on the above of the gel amplify a reference housekeeping gene, and are present as a loading control for the lysate preparation. Genomic DNA was purified from the transformed cells, and subjected to Tn-seq analysis of the genome-wide specificity of RNA-guided DNA integration. For both Klebsiella oxytoca and Pseudomonas putida, Tn-seq analysis demonstrated that ˜95-100% of integration events occur at the anticipated target site, with the same distance rules that were previously observed in E. coli (FIG. 98D). For the two P. putida guides that showed much lower specificity, these could be ascribed to highly similar off-target sequences elsewhere in the genome. pAIO-BBR1 constructs used for K. oxytoca is exemplified by pSL1813 (SEQ ID NO: 1761). pAIO-BBR1 constructs used for P. putida is exemplified by pSL1802 (SEQ ID NO: 1760).

[0204] FIGS. 99A-99E show methods for avoiding self-inactivation of CRISPR-transposon systems. Because the CRISPR-transposon system derived from Vibrio cholerae strain HE-45 can target the self-PAM sequence within the 3′ end of the CRISPR array repeat sequence (5′-AC-3′), albeit with low efficiency, the system is susceptible to self-inactivation. Namely, if the machinery promiscuously targets the self-target (which encodes the gRNA) present within the CRISPR array itself, the integration of the donor DNA downstream could inactivate the machinery (suggested with the red X in FIG. 99A) and/or cause instability of the plasmid. This effect is mitigated under conditions where maintaining the plasmid incurs a fitness cost on cells, or in cases where the desired RNA-guided DNA integration event incurs a fitness cost on cells. Experiments targeting both bdhA and mirC for insertional inactivation using the engineered CRISPR-transposon system, via RNA-guided DNA integration, showed clear evidence of self-inactivation of the system through self-targeting (FIG. 99B). By analyzing Tn-seq data, which provides unbiased assessment of all integration sites genome-wide, a massive overabundance of reads were found resulting from self-targeting of the CRISPR-encoded spacer, relative to the scant number of reads mapping to the genome. To circumvent this problem, a reverse-orientation all-in-one plasmid was cloned on the pBBR1 backbone (denoted pRAIO-BBR1), in which the CRISPR array is now at the 3′ end of the polycistronic construct, following the mRNA protein encoding TnsA-TnsB-TnsC-TniQ-Cas8-Cas7-Cas6 (FIG. 99C). This alternative orientation placed the self-target in close proximity to the donor DNA on the pRAIO-BBR1 vector, and thus, may repress any escaping self-targeting because of the target immunity mechanism. When the experiments from FIG. 99B were repeated, but using the new pRAIO-BBR1 vectors, the self-inactivation problem was completely eliminated; all reads mapped to the target site in the genome, and there were no reads whatsoever resulting from self-inactivation and RNA-guided DNA integration downstream of the CRISPR array. This engineered system was therefore desirable for use in experiments where cells have a fitness benefit in inactivating the CRISPR-transposon system. To further confirm the utility of the engineered pRAIO-BBR1 vectors, the percent of all Tn-seq reads mapping to the on-target site were plotted (FIG. 99E), and it was found that for both of the difficult-to-knockout genes, the newly engineered pRAIO-BBR1 vectors performed with excellent on-target specificity. pAIO-BBR1 is exemplified by pSL1802 (SEQ ID NO: 1760), pRAIO-BBR1 is exemplified by pSL1780 (SEQ ID NO: 1763).

[0205] FIGS. 100A-100J are tables of guide RNAs and genomic target sites. *Coordinates are for the E. coli BL21 (DE3) genome (GenBank accession CP001509). † PAM sequences denote the 2 nucleotides immediately 5′ of the target (V. cholerae and P. aeruginosa Cascade) or 3 nucleotides immediately 3′ of the target (S. pyogenes Cas9) on the non-target strand.

[0206] FIGS. 101A-101C are tables of oligonucleotides used for PCR (FIG. 101A), qPCR (FIG. 101B), and NGS (FIG. 101C).

[0207] FIGS. 102A-102C are tables of prospective CRISPR-transposon systems.

[0208] FIGS. 103A-103C show the generation of pooled gRNA libraries for libraries of RNA-guided DNA integration events across a population of cells. FIG. 103A shows that gRNA libraries are cloned by designing and synthesizing oligo array libraries containing the spacers, or guide sequences, of interest. Using standard molecular biology and molecular cloning methods, these oligos are converted into double-stranded DNA and cloned into expression plasmids within the CRISPR array, such that transcription of the CRISPR array produces gRNAs or gRNA precursors that are processed by Cas6 into mature gRNAs. The expression plasmids may contain the CRISPR array only, or the CRISPR array and one or more protein-coding genes, such as genes involved in RNA-guided DNA integration. The CRISPR array may also be contained within the donor DNA itself. The pooled gRNA library plasmids are then used to transform target cells of interest, leading to a corresponding library of distinct RNA-guided DNA insertion events across the population of cells. In an optional next step, the population of cells may be subjected to a selection step, thereby enriching a phenotype of interest procured by the insertion library. Finally, sequencing or next-generation sequencing (NGS) is used to identify gRNAs from the pooled library that caused the phenotype of interest. In one embodiment of this process, the pooled gRNA library is initially generated in plasmid DNA, and then converted into a lentiviral gRNA library for experiments in eukaryotic cells. Cells (FIG. 103B) from the pooled library experiment will contain the CRISPR array with one of the members of the gRNA library, as well as an insertion of donor DNA proximal to the target site complementary to the gRNA. The gRNA locus, or the insertion site, or both, may be sequenced. FIG. 103C is a schematic of one embodiment in which the CRISPR array encoding the gRNA is inserted directly within the donor DNA cargo. In another embodiment, pooled gRNA libraries are cloned within the donor DNA cargo. In this embodiment, RNA-guided DNA integration leads to preservation of the gRNA within the donor DNA, such that information about the gRNA that drove DNA insertion to that particular genomic region is preserved within the donor element itself. NGS analysis of the insertion site, for example by transposon-insertion sequencing, is then used to extract both the integration site as well as the gRNA information.

[0209] FIGS. 104A-104D show that donor DNA-encoded gRNAs direct efficient RNA-guided DNA integration. FIG. 104A is a schematic of an engineered two-plasmid system for RNA-guided DNA integration. The effector plasmid (pCQT; exemplified by pSL1022, SEQ ID NO: 855) encodes the gRNA (via the CRISPR array) as well as all the protein components, in this embodiment comprising TniQ-Cas8-Cas7-Cas6-TnsA-TnsB-TnsC. The Donor plasmid (pDonor; exemplified by pSL0527, SEQ ID NO: 7) contains the donor DNA flanked by transposon left and right ends. FIG. 104B is a schematic of a modified engineered two-plasmid system for RNA-guided DNA integration. The effector plasmid (pQT; exemplified by pSL1466, SEQ ID NO: 2001) encodes all the protein components, in this embodiment comprising TniQ-Cas8-Cas7-Cas6-TnsA-TnsB-TnsC. The Donor_CRISPR plasmid (pDonor_CRISPR-R, exemplified by pSL1805, SEQ ID NO: 2002) contains the donor DNA flanked by transposon left and right ends; the CRISPR array, encoding the gRNA, is contained within the cargo donor DNA itself near the transposon right end. In another embodiment, the pDonor_CRISPR plasmid has an additional removal of lac operator sequence downstream of the T7 promoter (exemplified by pSL1766, SEQ ID NO: 2005). FIG. 104C is a schematic of modified versions of pDonor_CRISPR contain the CRISPR array near either the left transposon end (pSL1632, SEQ ID NO: 2003) or near the middle of the cargo (pSL1631, SEQ ID NO: 2004). FIG. 104D is a graph of the RNA-guided DNA integration activity in E. coli BL21 (DE3) cells using a gRNA targeting lacZ. The identity of the two plasmids used in each experiment are listed below the bar graph. Integration efficiency was quantified by qPCR, using cell lysate after overnight culturing on solid LB-agar media. The pDonor_CRISPR-R plasmids are far more efficient, wherein the CRISPR array is contained near the right transposon end.

### DETAILED DESCRIPTION

[0210] In certain embodiments, the present systems and methods use Tn7-like transposons that encode CRISPR-Cas systems for programmable, RNA-guided DNA integration. Specifically, the CRISPR-Cas machinery directs the Tn7 transposon-associated proteins to integrate DNA downstream of a target site (e.g., a genomic target site) recognized by a guide RNA (gRNA).

### 1. RNA-Guided DNA Integration

[0211] The RNA-guided transposase mechanism for gene integration does not proceed through a double-strand break (DSB) intermediate, and thus does not result in non-homologous end joining (NHEJ)-mediated insertions or deletions. Rather, targeting of the DNA leads to direct integration through a concerted transesterification reaction, without any off-pathway alternatives. As the targeting relies on the gRNA, the present methods and systems obviate the need for homology arms to be redesigned for every new target site.

[0212] For therapeutic purposes, the gRNA may be designed to target a specific gene or chromosomal region, such as a gene or chromosomal region associated with a disease, disorder, or condition.

[0213] The present systems and methods may result in any desired effect. In one embodiment, the present systems and methods may result in decreased transcription of a target gene.

[0214] The present system and methods may target any target site, or insert a donor DNA at any site, within a DNA, e.g., in a coding or non-coding region, within or adjacent to a gene, such as, for example, a leader sequence, trailer sequence or intron, or within a non-transcribed region, either upstream or downstream of the coding region. A target site or target sequence may comprise any polynucleotide, such as DNA or RNA polynucleotides.

[0215] The present RNA-guided DNA integration system and methods allows DNA integration in various types of cells, including post-mitotic cells and non-dividing cells, such as neurons and terminally differentiated cells. Thus, also provided is a cell comprising the present RNA-guided DNA integration system.

[0216] The present system and methods may be derived from a bacterial or archaeal transposon that harbor a CRISPR-Cas system, such as a Tn7-like transposon. In one embodiment, the Tn7-like transposon system is derived from Vibrio cholerae Tn6677. The system can encompass gain-of-function Tn7 mutants (Lu et al. EMBO 19 (13): 3446-3457 (2000); U.S. Patent Publication No. 20020188105) as well as replicative Tn7 transposition mutants (May et al. Science 272:401-404 (1996)). The Tn7-like transposons include, but are not limited to, the Tn6677 transposon from Vibrio cholerae, the Tn5090/Tn5053 transposon, the Tn6230 transposon, and the Tn6022 transposon. See, Peters et al., Recruitment of CRISPR-Cas systems by Tn7-like transposons, Proc Natl Acad Sci USA 114, E7358-E7366 (2017). Peters, J. E. Tn7. Microbiol Spectr 2 (2014).

[0217] Tn7-like transposons may encode various types of CRISPR-Cas systems, such as Type I CRISPR-Cas systems (such as subtypes I-B, I-F (including I-F variants)), and Type V CRISPR-Cas systems (such as V-U5).

[0218] In certain embodiments, the present system and methods may comprise a Type I CRISPR-Cas system. Type I systems may comprise a multi-subunit effector complex, such as the Cascade or Csy complex. In one embodiment, the Cascade complex is derived from a Vibrio cholerae Tn7 transposon comprising the type I-F Cascade and the TniQ protein. TniQ may bridge the CRISPR-Cas machinery with the Tn7-associated machinery for DNA integration. The present system may be nuclease deficient. In one embodiment, the Tn7-associated Type I-F system may lack the Cas3 nuclease.

[0219] The Cascade complex in canonical I-F CRISPR-Cas systems is encoded by four genes, designated cas8 (or csy1), cas5 (or csy2), cas7 (or csy3), and cas6 (or csy4); each gene may also be further classified with a subtype-specific qualifier, as in cas8f, cas5f, cas7f, and cas6f.

[0220] In one embodiment, the Tn7-like transposon comprises a Type I-F variant CRISPR-Cas systems, whose genes encode a Cascade complex. The Tn7-like transposon contains the tnsA-tnsB-tnsC operon, whereas the tnsD homolog known as tniQ is encoded within the operon that encodes the Cas8/Cas5 fusion-Cas7-Cas6 proteins that collectively form the RNA-guided TniQ-Cascade complex. The TnsA and TnsB protein products mediate transposon excision, whereas TnsB mediates integration of the transposon into the target DNA.

[0221] The Tn7-like transposon may comprise the transposases TnsA and TnsB. TnsA and TnsB may form a heteromeric transposase. TnsB is a DDE-type transposase that catalyzes concerted breakage and rejoining reactions, joining the 3′-hydroxyl of the donor ends to the 5′-phosphate groups at the insertion site of the target DNA. TnsA structurally resembles a restriction endonuclease, and carries out the nicking reaction on the opposite strand of the donor DNA molecule. Accessory protein TnsC may modulate the activity of the heteromeric TnsAB transposase. TnsC may activate transposition when complexed with a target DNA and a target selection protein, TnsD or TnsE. TnsC variants may promote transposition in the absence of TnsD or TnsE. In certain embodiments, wildtype or variants of TnsA, TnsB, and/or TnsC may be used in the present system and method, including variants with deletions, insertions, or amino acid substitutions compared to the wildtype proteins. The present system may include one or more of the following variants: TnsA S69N, TnsA E73K, TnsA A65V, TnsA E185K, TnsA Q261Z, TnsA G239S, TnsA G239D, TnsA Q261Z, TnsB M366I, TnsB A325T, and TnsB A325V (see, Lu et al., (EMBO J. 9 (3): 3446-57, 2000)).

[0222] In one embodiment, the present engineered transposon-encoded CRISPR-Cas system is derived from V. cholerae HE-45 (designated Tn6677, registered with the Transposon Registry). See, Roberts et al. Revised nomenclature for transposable genetic elements, Plasmid 60, 167-173 (2008). Tn6677 refers to the native V. cholerae transposon sequence, and miniaturized transposon constructs comprising the transposon ends and artificial cargos are designated as mini-Tn6677, or mini-transposons (mini-Tn) more generally. The CRISPR-Cas system found within Tn6677 is a I-F variant system, and the Cascade operon comprises a cas8-cas5 fusion gene (which is also referred herein as cas8), cas7, and cas6, along with the upstream tniQ gene. Expression of transposon- and CRISPR-associated machineries in trans serves to transpose mini-Tn6677 from a vector comprising a donor DNA to the DNA integration site.

[0223] In one embodiment, the present system and methods comprise engineered V. cholerae Tn7 transposon, which comprises TnsA, TnsB, TnsC, TniQ, Cas8/Cas5 fusion, Cas7, Cas6, and at least one gRNA.

[0224] In certain embodiments, the present system and methods may comprise a Type V CRISPR-Cas system. Type V systems belong to the Class 2 CRISPR-Cas systems, characterized by a single-protein effector complex that is programmed with a gRNA. In one embodiment, the present Tn7-like transposons comprise Type V-U5 systems, which encode an enzyme such as C2c5 (S. Shmakov et al., Nat Rev Microbiol. 15, 169-182 (2017)). The present system may be nuclease deficient. In one embodiment, the present system lacks TnsA (lacks the tnsA gene).

[0225] C2c5 may be from Geminocystis sp. NIES-3709 (NCBI accession ID: WP_066116114.1). The transposon-associated Type V CRISPR-Cas systems may be derived from: Anabaena variabilis ATCC 29413 (or Trichormus variabilis ATCC 29413 (see GenBank CP000117.1)), Cyanobacterium aponinum IPPAS B-1202, Filamentous cyanobacterium CCP2, Nostoc punctiforme PCC 73102, and Scytonema hofmannii PCC 7110.

[0226] In one embodiment, the present system and methods comprise engineered Tn7-like transposons that encode Type V-U5 CRISPR-Cas systems, which comprises TnsB, TnsC, TniQ, C2c5, and at least one gRNA.

[0227] The term “transposon” encompasses a DNA segment with cis-acting sites (which may contain heterologous DNA sequences), and the genes that encode trans-acting proteins that act on those cis-acting sites to mobilize the DNA segment defined by the sites, regardless of how they are organized in DNA. The present transposons, such as the Tn7-like transposons, also encode a CRISPR-Cas system. An entire transposon is not necessary to practice the present method. Thus, the term “transposon derivative”, “transposable element”, or “insertable element” as used herein can also refer to DNA minimally comprising the cis-acting sites at which the trans-acting proteins act to mobilize the segment defined by the sites. It is also understood that the sites may contain a heterologous DNA. The proteins may be provided in the form of nucleic acids (DNA or RNA encoding the proteins) or in the form of proteins (e.g., purified proteins).

[0228] As used herein, the term “Tn7 transposon” refers to the prokaryotic transposable element Tn7, and their modified forms or transposons sharing homology with Tn7 transposons (“Tn7-like transposons”). Tn7 has been most commonly studied in Escherichia coli. “Tn7 transposon” can encompass forms of DNA that do not demonstrably contain Tn7 genes, but which can be made to undergo transposition through use of the Tn7 gene products TnsA and TnsB, which collaborate to form the Tn7 transposase, or modifications thereof. Such DNA is bounded by 5′ and 3′ DNA sequences recognizable by the transposase, which can function as the transposon end sequences. Examples of Tn7 transposon end sequences may be found in Arciszewska et al. (1991) J Biol Chem 266:21736-44 (PMID: 1657979), Tang et al. (1995) Gene 162:41-6 (PMID: 7557414), Tang et al. (1991) Nucleic Acids Res 19:3395-402 (PMID: 1648205), Biery et al. (2000) Nucleic Acids Res 28:1067-77 (PMID: 10666445), Craig (1995) Cur Top Microbiol Immunol 204:27-48 (PMID: 8556868), and other published sources, and should allow transposition given the appropriate Tns proteins. Without wishing to be bound by any theory, it is believed that the transposon ends are opposed to the donor DNA by TnsA and TnsB. These two Tns proteins are believed to then collaborate to execute the breakage and joining reactions that underlie transposition.

[0229] The Tn7 transposon contains characteristic left and right transposon end sequences and encodes five tns genes, tnsA-E, which collectively encode a heteromeric transposase, TnsA and TnsB which are catalytic enzymes that excise the transposon donor via coordinated double-strand breaks; TnsB, a member of the retroviral integrase superfamily, catalyzes DNA integration; TnsD and TnsE constitute mutually exclusive targeting factors that specify DNA integration sites; and TnsC is an ATPase that communicates between TnsAB and TnsD or TnsE. TnsD mediates site-specific Tn7 transposition into a conserved Tn7 attachment site (attTn7) downstream of the glmS gene in E. coli, whereas TnsE mediates random transposition into the lagging-strand template during replication. In E. coli, site-specific transposition involves attTn7 binding by TnsD, followed by interactions with the TnsC regulator protein to directly recruit the TnsA-TnsB-donor DNA. TnsC, TnsD, and TnsE interact with the target DNA to modulate the activity of the transposase via two distinct pathways. TnsABC+TnsD directs transposition to attTn7, a discrete site on the E. coli chromosome, at a high frequency, and to other loosely related “pseudo att” sites at low frequency. The alternative combination TnsABC+E directs transposition to many unrelated non-attTn7 sites in the chromosome at low frequency and preferentially to conjugating plasmids. Thus, attTn7 and conjugable plasmids contain positive signals that recruit the transposon to these target DNAs. The alternative target site selection mechanisms enable Tn7 to inspect a variety of potential target sites in the cell and select those most likely to ensure its survival.

[0230] As used herein, the term “transposase” refers to an enzyme that catalyzes transposition.

[0231] As used herein, the term “transposition” refers to a complex genetic rearrangement process, involving the movement of a DNA sequence from one location and insertion into another, for example between a genome and a DNA construct such as a plasmid, a bacmid, a cosmid, and a viral vector.

[0232] The present disclosure provides for an engineered transposon-encoded CRISPR-Cas system for RNA-guided DNA integration in a cell, comprising: (i) at least one Cas protein, (ii) a guide RNA (gRNA), and (iii) a Tn7-like transposon system.

[0233] Also encompassed by the present disclosure is a system and methods for RNA-guided DNA integration in a cell, comprising: (i) one or more vectors encoding an engineered CRISPR-Cas system, wherein the CRISPR-Cas system comprises: (a) at least one Cas protein, and (b) a guide RNA (gRNA); and (ii) one or more vectors encoding a Tn7-like transposon system, wherein the CRISPR-Cas system and the transposon system are on same or different vector(s).

[0234] The present disclosure provides for an engineered transposon-encoded CRISPR-Cas system and methods for RNA-guided DNA integration in a cell, comprising: (i) at least one Cas protein, (ii) a guide RNA (gRNA), and (iii) an engineered transposon system.

[0235] The present disclosure also provides for a system and methods for RNA-guided DNA integration in a cell, comprising: (i) one or more vectors encoding an engineered CRISPR-Cas system, wherein the CRISPR-Cas system comprises: (a) at least one Cas protein, and (b) a guide RNA (gRNA); and (ii) one or more vectors encoding an engineered transposon system, wherein the CRISPR-Cas system and the transposon system are on same or different vector(s).

[0236] The present disclosure provides for a method for RNA-guided DNA integration in a cell, the method comprising introducing into the animal cell an engineered transposon-encoded CRISPR-Cas system, wherein the transposon-encoded CRISPR-Cas system comprises: (i) at least one Cas protein, (ii) a guide RNA (gRNA) specific for a target site, (iii) an engineered transposon system, and (iv) a donor DNA, wherein the transposon-encoded CRISPR-Cas system integrates the donor DNA proximal to the target site.

[0237] The present system and methods may comprise TnsD or TniQ. The present system may comprise TnsA, TnsB and TnsC. The present system may comprise TnsB and TnsC.

[0238] The present system and methods may be derived from a Class 1 CRISPR-Cas system. The present and methods may be derived from a Class 2 CRISPR-Cas system. The present and methods may be derived from a Type I CRISPR-Cas system (such as subtypes I-B, I-F (including I-F variants)). The present and methods may be derived from a Type V CRISPR-Cas system (such as V-U5). The present and methods may be derived from a Type II CRISPR-Cas system (such as II-A).

[0239] The present system may be nuclease-deficient. The present system and methods may comprise Cas6, Cas7 and Cas5 and Cas8, separately or as a fusion protein. The present system and methods may comprise Cas9.

[0240] The present system and methods may comprise a Cascade complex. The present system may comprise C2c5.

[0241] The transposon-encoded CRISPR-Cas system may integrate the donor DNA into the genome of the cell.

[0242] The present system and methods may further comprise a donor DNA, wherein the donor DNA comprises a cargo nucleic acid flanked by transposon end sequences. The transposon end sequences on either end may be the same or different. The transposon end sequence may be the endogenous Tn7 transposon end sequences or may include deletions, substitutes or insertions. The endogenous Tn7 transposon end sequences may be truncated. In some embodiments, the transposon end sequence includes an about 40 base pair (bp) deletion relative to the endogenous Tn7 transposon end sequence. In some embodiments, the transposon end sequence includes an about 100 base pair deletion relative to the endogenous Tn7 transposon end sequence. The deletion may be in the form of a truncation at the distal (in relation to the cargo) end of the transposon end sequences.

[0243] The integration may be about 40 bp to about 60 bp, about 46 bp to about 55 bp, about 47 bp to about 51 bp, about 48 bp to about 50 bp, about 43 bp to about 57 bp, about 45 bp to about 50 bp, about 48 bp, about 49 bp, or about 50 bp, downstream (3′) of the target site.

[0244] The target site may be flanked by a protospacer adjacent motif (PAM).

[0245] The present disclosure provides for systems and methods for transient expression or stable integration of the DNA or polynucleotide(s) encoding one or more components of the present system.

[0246] The present systems and methods may be specific for one target site, or may be specific for 2, 3, 4, 5, 6, 7, 8, 9, 10 or more target sites.

[0247] In certain embodiments, the present system and methods may act through a cut-and-paste mechanism (e.g., Type I-F CRISPR-Cas systems, such as systems derived from E. coli Tn7 or V. cholerae Tn6677). In certain embodiments, the present system and methods may act through a copy-and-paste mechanism (or replicative transposition) (e.g., Type V CRISPR-Cas systems containing C2c5 (Cas12k)).

[0248] The present system and methods may act through a cut-and-paste mechanism, where the donor DNA is fully excised from the donor site and inserted at the target location (Bainton et al., Cell, 1991; 65 (5), pp. 805-816). TnsA and TnsB cleave both strands of the transposon DNA at both ends, leading to clean excision of a linear dsDNA, which contains short 3-nucleotide 5′-overhangs on both ends (not shown). The free 3′-OH ends are then used as a nucleophile by TnsB to attack phosphodiester bonds on both strands of the target DNA, resulting in concerted transesterification reactions. After gap fill-in, the transposition reaction is complete, and the integrated transposon is flanked by 5-bp target site duplications (TSD) on both ends as a result of the gap fill-in reaction.

[0249] The present system and methods may act through a copy-and-paste mechanism, also known as replicative transposition. This results when the 5′ ends of the transposon donor DNA are not broken during the excision step, as is the case when the tnsA endonuclease gene is absent from the gene operon encoding the transposition proteins. In this case, the 3′-OH ends are still liberated and can participate in staggered transesterification reactions with the target DNA, catalyzed by TnsB, but the 5′ ends of the transposon remain covalently linked to the remainder of the DNA within the donor DNA molecule, which can be a genome or a plasmid vector. This copy-and-paste reaction results in what's known as a Shapiro intermediate, in which the entirety of the donor DNA, including the transposon sequence itself, as well as the flanking sequences, is joined together with the broken target DNA. This intermediate can only be resolved during subsequent DNA replication, which results in a so-called cointegrate product. This cointegrate harbors two copies of the transposon itself, flanked by the TSD on one side. Importantly, the cointegrate also harbors the entirety of the donor DNA molecule, as well as the entirety of the target DNA molecule. Thus, in cases where the transposon is encoded on a plasmid vector, the entirety of the vector is joined to the target DNA during replicative transposition. At some frequency, the cointegrate product can be resolved into the products shown at the right, either through the action of a dedicated resolvase protein (e.g. the TniR protein in Tn5090/Tn5053), or through endogenous homologous recombination because of extensive homology between the two copies of the transposon itself in the cointegrate product. Cointegrate resolution results in a target DNA harboring a single transposon flanked by the TSD, as well as a regenerated version of the donor DNA molecule.

[0250] In one embodiment, the present system and methods comprise a Tn7 transposon or Tn7-like transposon where there is a single point mutation in the TnsA active site (TnsA D114A). DNA breakage may occur at the 3′ end of each strand of the donor (May and Craig. Science, 1996; 272 (5260): 401-4). Without full excision of the donor DNA, the system switches to a replicative copy-and-paste mechanism, resulting in a cointegrate product that eventually is resolved by recombination to yield two identical copies of the cargo. In another embodiment, the present system comprises Tn7 transposon or Tn7-like transposon where there is a single point mutation (D90A) in the V. cholerae TnsA protein (TnsA D90A). In yet another embodiment, in order to increase the efficiency of recombination and resolution of the cointegrate product, the cargo includes a site-specific recombinase (such as Cre or CinH), along with its recognition sequence. In naturally occurring replicative transposons such as Tn3 and Mu, this recombinase-assisted strategy has been shown to be utilized for resolution of the cointegrate (Nicolas et al. Microbiology Spectrum. 2015; 3 (4)).

[0251] In some embodiments, the Cas proteins, the Tns proteins, and the nucleic acid encoding the gRNA are provided on the same nucleic acid (e.g., a vector). In some embodiments, the Cas proteins, the Tns proteins, and the nucleic acid encoding the gRNA are provided on different nucleic acids (e.g., different vectors), for example, on 2, 3, 4, 5, 6, or more vectors. Alternatively, or in addition, the Cas proteins and/or the Tns proteins may be provided or introduced into the cell in protein form.

[0252] In some embodiments, the nucleotide sequence encoding the Cas proteins and/or the Tns proteins may be codon optimized for expression in a host cell. In some embodiments, one or more of the Cas proteins and/or the Tns proteins is a homolog or ortholog of the wildtype protein.

[0253] In some embodiments, the nucleotide sequence encoding a Cas protein and/or a Tns protein is modified to alter the activity of the protein. Alternatively, or in addition, a Cas protein and/or a Tns protein may be fused to another protein or portion thereof. In some embodiments, a Cas protein and/or a Tns protein is fused to a fluorescent protein (e.g., GFP, RFP, mCherry, etc.). In some embodiments, a Cas protein and/or a Tns protein fused to fluorescent proteins are used for labeling and/or visualization of genomic loci or identifying cells expressing the protein.

[0254] In certain embodiments, the present system comprises one or more vectors DNAs or polynucleotides which comprise one or more nucleotide sequences selected from SEQ ID Nos: 1-139, and equivalents thereof. In certain embodiments, the present system comprises one or more vectors which comprise one or more nucleotide sequences about 80% to about 100% identical to the nucleotide sequences selected from in SEQ ID Nos: 1-139. The vector may comprise a nucleotide sequence at least or about 70%, at least or about 75%, at least or about 80%, at least or about 81%, at least or about 82%, at least or about 83%, at least or about 84%, at least or about 85%, at least or about 86%, at least or about 87%, at least or about 88%, at least or about 89%, at least or about 90%, at least or about 91%, at least or about 92%, at least or about 93%, at least or about 94%, at least or about 95%, at least or about 96%, at least or about 97%, or about 100%, identical to any of the nucleotide sequences set forth in SEQ ID Nos: 1-139.

[0255] In certain embodiments, the present system and methods comprise one or more vectors, DNAs or polynucleotides having one or more nucleotide sequences selected from SEQ ID NO: 140 (TnsA), SEQ ID NO: 142 (TnsB), SEQ ID NO: 144 (TnsC), SEQ ID NO: 146 (TniQ), SEQ ID NO: 148 (Cas8/Cas5 fusion), SEQ ID NO: 150 (Cas7), SEQ ID NO: 152 (Cas6), and equivalents thereof. In certain embodiments, the present system comprises one or more vectors, DNAs or polynucleotides which comprise one or more nucleotide sequences about 80% to about 100% identical to the nucleotide sequences selected from SEQ ID NO: 140, SEQ ID NO: 142, SEQ ID NO: 144, SEQ ID NO: 146, SEQ ID NO: 148, SEQ ID NO: 150, and SEQ ID NO: 152. The vector may comprise a nucleotide sequence at least or about 70%, at least or about 75%, at least or about 80%, at least or about 81%, at least or about 82%, at least or about 83%, at least or about 84%, at least or about 85%, at least or about 86%, at least or about 87%, at least or about 88%, at least or about 89%, at least or about 90%, at least or about 91%, at least or about 92%, at least or about 93%, at least or about 94%, at least or about 95%, at least or about 96%, at least or about 97%, or about 100%, identical to any of the nucleotide sequences set forth in SEQ ID NO: 140, SEQ ID NO: 142, SEQ ID NO: 144, SEQ ID NO: 146, SEQ ID NO: 148, SEQ ID NO: 150, and SEQ ID NO: 152.

[0256] In certain embodiments, the present system and methods comprise one or more proteins having one or more amino acid sequences selected from SEQ ID NO: 141 (TnsA), SEQ ID NO: 143 (TnsB), SEQ ID NO: 145 (TnsC), SEQ ID NO: 147 (TniQ), SEQ ID NO: 149 (Cas8/Cas5 fusion), SEQ ID NO: 151 (Cas7), SEQ ID NO: 153 (Cas6), and equivalents thereof. In certain embodiments, the present system comprises one or more proteins which comprise one or more amino acid sequences about 80% to about 100% identical to the amino acid sequences selected from SEQ ID NO: 141 (TnsA), SEQ ID NO: 143 (TnsB), SEQ ID NO: 145 (TnsC), SEQ ID NO: 147 (TniQ), SEQ ID NO: 149 (Cas8), SEQ ID NO: 151 (Cas7), and SEQ ID NO: 153 (Cas6). The protein may comprise an amino acid sequence at least or about 70%, at least or about 75%, at least or about 80%, at least or about 81%, at least or about 82%, at least or about 83%, at least or about 84%, at least or about 85%, at least or about 86%, at least or about 87%, at least or about 88%, at least or about 89%, at least or about 90%, at least or about 91%, at least or about 92%, at least or about 93%, at least or about 94%, at least or about 95%, at least or about 96%, at least or about 97%, or about 100%, identical to any of the amino acid sequences set forth in SEQ ID NO: 141 (TnsA), SEQ ID NO: 143 (TnsB), SEQ ID NO: 145 (TnsC), SEQ ID NO: 147 (TniQ), SEQ ID NO: 149 (Cas8), SEQ ID NO: 151 (Cas7), and SEQ ID NO: 153 (Cas6).

[0257] In one embodiment, the present system and methods comprise a nucleotide sequence encoding TnsA, where the nucleotide sequence is SEQ ID NO: 140 or an equivalent thereof. The nucleotide sequence encoding TnsA may be about 80% to about 100%, at least or about 70%, at least or about 75%, at least or about 80%, at least or about 81%, at least or about 82%, at least or about 83%, at least or about 84%, at least or about 85%, at least or about 86%, at least or about 87%, at least or about 88%, at least or about 89%, at least or about 90%, at least or about 91%, at least or about 92%, at least or about 93%, at least or about 94%, at least or about 95%, at least or about 96%, at least or about 97%, or about 100%, identical to the amino acid sequence set forth in SEQ ID NO: 140.

[0258] The amino acid sequence of TnsA may comprise the amino acid sequence set forth in SEQ ID NO: 141 or an equivalent thereof. The amino acid sequence of TnsA may comprise an amino acid sequence at least or about 70%, at least or about 75%, at least or about 80%, at least or about 81%, at least or about 82%, at least or about 83%, at least or about 84%, at least or about 85%, at least or about 86%, at least or about 87%, at least or about 88%, at least or about 89%, at least or about 90%, at least or about 91%, at least or about 92%, at least or about 93%, at least or about 94%, at least or about 95%, at least or about 96%, at least or about 97%, or about 100%, identical to the amino acid sequence set forth in SEQ ID NO: 141.

[0259] In one embodiment, the present system and methods comprise a nucleotide sequence encoding TnsB, where the nucleotide sequence is SEQ ID NO: 142 or an equivalent thereof. The nucleotide sequence encoding TnsB may be about 80% to about 100%, at least or about 70%, at least or about 75%, at least or about 80%, at least or about 81%, at least or about 82%, at least or about 83%, at least or about 84%, at least or about 85%, at least or about 86%, at least or about 87%, at least or about 88%, at least or about 89%, at least or about 90%, at least or about 91%, at least or about 92%, at least or about 93%, at least or about 94%, at least or about 95%, at least or about 96%, at least or about 97%, or about 100%, identical to the amino acid sequence set forth in SEQ ID NO: 142.

[0260] The amino acid sequence of TnsB may comprise SEQ ID NO: 143 or an equivalent thereof. The amino acid sequence of TnsB may comprise an amino acid sequence at least or about 70%, at least or about 75%, at least or about 80%, at least or about 81%, at least or about 82%, at least or about 83%, at least or about 84%, at least or about 85%, at least or about 86%, at least or about 87%, at least or about 88%, at least or about 89%, at least or about 90%, at least or about 91%, at least or about 92%, at least or about 93%, at least or about 94%, at least or about 95%, at least or about 96%, at least or about 97%, or about 100%, identical to the amino acid sequence set forth in SEQ ID NO: 143.

[0261] In one embodiment, the present system and methods comprise a nucleotide sequence encoding TnsC, where the nucleotide sequence is SEQ ID NO: 144 or an equivalent thereof. The nucleotide sequence encoding TnsC may be about 80% to about 100%, at least or about 70%, at least or about 75%, at least or about 80%, at least or about 81%, at least or about 82%, at least or about 83%, at least or about 84%, at least or about 85%, at least or about 86%, at least or about 87%, at least or about 88%, at least or about 89%, at least or about 90%, at least or about 91%, at least or about 92%, at least or about 93%, at least or about 94%, at least or about 95%, at least or about 96%, at least or about 97%, or about 100%, identical to the amino acid sequence set forth in SEQ ID NO: 144.

[0262] The amino acid sequence of TnsC may comprise SEQ ID NO: 145 or an equivalent thereof. The amino acid sequence of TnsC may comprise an amino acid sequence about 80% to about 100%, at least or about 70%, at least or about 75%, at least or about 80%, at least or about 81%, at least or about 82%, at least or about 83%, at least or about 84%, at least or about 85%, at least or about 86%, at least or about 87%, at least or about 88%, at least or about 89%, at least or about 90%, at least or about 91%, at least or about 92%, at least or about 93%, at least or about 94%, at least or about 95%, at least or about 96%, at least or about 97%, or about 100%, identical to the amino acid sequence set forth in SEQ ID NO: 145.

[0263] In one embodiment, the present system and methods comprise a nucleotide sequence encoding TniQ, where the nucleotide sequence is SEQ ID NO: 146 or an equivalent thereof. The nucleotide sequence encoding TniQ may be about 80% to about 100%, at least or about 70%, at least or about 75%, at least or about 80%, at least or about 81%, at least or about 82%, at least or about 83%, at least or about 84%, at least or about 85%, at least or about 86%, at least or about 87%, at least or about 88%, at least or about 89%, at least or about 90%, at least or about 91%, at least or about 92%, at least or about 93%, at least or about 94%, at least or about 95%, at least or about 96%, at least or about 97%, or about 100%, identical to the amino acid sequence set forth in SEQ ID NO: 146.

[0264] The amino acid sequence of TniQ may comprise SEQ ID NO: 147 or an equivalent thereof. The amino acid sequence of TniQ may comprise an amino acid sequence about 80% to about 100%, at least or about 70%, at least or about 75%, at least or about 80%, at least or about 81%, at least or about 82%, at least or about 83%, at least or about 84%, at least or about 85%, at least or about 86%, at least or about 87%, at least or about 88%, at least or about 89%, at least or about 90%, at least or about 91%, at least or about 92%, at least or about 93%, at least or about 94%, at least or about 95%, at least or about 96%, at least or about 97%, or about 100%, identical to the amino acid sequence set forth in SEQ ID NO: 147.

[0265] In one embodiment, the present system and methods comprise a nucleotide sequence encoding Cas8 (Cas5/Cas8), where the nucleotide sequence is SEQ ID NO: 148 or an equivalent thereof. The nucleotide sequence encoding Cas8 (Cas5/Cas8) may be about 80% to about 100%, at least or about 70%, at least or about 75%, at least or about 80%, at least or about 81%, at least or about 82%, at least or about 83%, at least or about 84%, at least or about 85%, at least or about 86%, at least or about 87%, at least or about 88%, at least or about 89%, at least or about 90%, at least or about 91%, at least or about 92%, at least or about 93%, at least or about 94%, at least or about 95%, at least or about 96%, at least or about 97%, or about 100%, identical to the amino acid sequence set forth in SEQ ID NO: 148.

[0266] The amino acid sequence of Cas8 (Cas5/Cas8) may comprise SEQ ID NO: 149 or an equivalent thereof. The amino acid sequence of Cas8 (Cas5/Cas8) may comprise an amino acid sequence about 80% to about 100%, at least or about 70%, at least or about 75%, at least or about 80%, at least or about 81%, at least or about 82%, at least or about 83%, at least or about 84%, at least or about 85%, at least or about 86%, at least or about 87%, at least or about 88%, at least or about 89%, at least or about 90%, at least or about 91%, at least or about 92%, at least or about 93%, at least or about 94%, at least or about 95%, at least or about 96%, at least or about 97%, or about 100%, identical to the amino acid sequence set forth in SEQ ID NO: 149.

[0267] In one embodiment, the present system and methods comprise a nucleotide sequence encoding Cas7, where the nucleotide sequence is SEQ ID NO: 150 or an equivalent thereof. The nucleotide sequence encoding Cas7 may be about 80% to about 100%, at least or about 70%, at least or about 75%, at least or about 80%, at least or about 81%, at least or about 82%, at least or about 83%, at least or about 84%, at least or about 85%, at least or about 86%, at least or about 87%, at least or about 88%, at least or about 89%, at least or about 90%, at least or about 91%, at least or about 92%, at least or about 93%, at least or about 94%, at least or about 95%, at least or about 96%, at least or about 97%, or about 100%, identical to the amino acid sequence set forth in SEQ ID NO: 150.

[0268] The amino acid sequence of Cas7 may comprise SEQ ID NO: 151 or an equivalent thereof. The amino acid sequence of Cas7 may comprise an amino acid sequence about 80% to about 100%, at least or about 70%, at least or about 75%, at least or about 80%, at least or about 81%, at least or about 82%, at least or about 83%, at least or about 84%, at least or about 85%, at least or about 86%, at least or about 87%, at least or about 88%, at least or about 89%, at least or about 90%, at least or about 91%, at least or about 92%, at least or about 93%, at least or about 94%, at least or about 95%, at least or about 96%, at least or about 97%, or about 100%, identical to the amino acid sequence set forth in SEQ ID NO: 151.

[0269] In one embodiment, the present system and methods comprise a nucleotide sequence encoding Cas6, where the nucleotide sequence is SEQ ID NO: 152 or an equivalent thereof. The nucleotide sequence encoding Cas6 may be about 80% to about 100%, at least or about 70%, at least or about 75%, at least or about 80%, at least or about 81%, at least or about 82%, at least or about 83%, at least or about 84%, at least or about 85%, at least or about 86%, at least or about 87%, at least or about 88%, at least or about 89%, at least or about 90%, at least or about 91%, at least or about 92%, at least or about 93%, at least or about 94%, at least or about 95%, at least or about 96%, at least or about 97%, or about 100%, identical to the amino acid sequence set forth in SEQ ID NO: 152.

[0270] The amino acid sequence of Cas6 may comprise SEQ ID NO: 153 or an equivalent thereof. The amino acid sequence of Cas6 may comprise an amino acid sequence about 80% to about 100%, at least or about 70%, at least or about 75%, at least or about 80%, at least or about 81%, at least or about 82%, at least or about 83%, at least or about 84%, at least or about 85%, at least or about 86%, at least or about 87%, at least or about 88%, at least or about 89%, at least or about 90%, at least or about 91%, at least or about 92%, at least or about 93%, at least or about 94%, at least or about 95%, at least or about 96%, at least or about 97%, or about 100%, identical to the amino acid sequence set forth in SEQ ID NO: 153.

[0271] In one embodiment, the present system and methods comprise a nucleotide sequence encoding TnsA, where the nucleotide sequence is selected from SEQ ID NOs: 768, 1777, 1786, 1795, 1804, 1813, 1822, 1831, 1909, 1925, 1941, 1957, or an equivalent thereof. The nucleotide sequence encoding TnsA may be about 80% to about 100%, at least or about 70%, at least or about 75%, at least or about 80%, at least or about 81%, at least or about 82%, at least or about 83%, at least or about 84%, at least or about 85%, at least or about 86%, at least or about 87%, at least or about 88%, at least or about 89%, at least or about 90%, at least or about 91%, at least or about 92%, at least or about 93%, at least or about 94%, at least or about 95%, at least or about 96%, at least or about 97%, or about 100%, identical to the amino acid sequence set forth in any of SEQ ID NOs: 1768, 1777, 1786, 1795, 1804, 1813, 1822, 1831, 1909, 1925, 1941, and 1957.

[0272] The amino acid sequence of TnsA may comprise the amino acid sequence set forth in any of SEQ ID NOs: 1714-1717, 1840, 1847, 1854, 1861, 1868, 1875, 1882, 1889, 1896, 1918, 1934, 1950, 1966, or an equivalent thereof. The amino acid sequence of TnsA may comprise an amino acid sequence at least or about 70%, at least or about 75%, at least or about 80%, at least or about 81%, at least or about 82%, at least or about 83%, at least or about 84%, at least or about 85%, at least or about 86%, at least or about 87%, at least or about 88%, at least or about 89%, at least or about 90%, at least or about 91%, at least or about 92%, at least or about 93%, at least or about 94%, at least or about 95%, at least or about 96%, at least or about 97%, or about 100%, identical to the amino acid sequence set forth in any of SEQ ID NOs: 1714-1717, 1840, 1847, 1854, 1861, 1868, 1875, 1882, 1889, 1896, 1918, 1934, 1950, or 1966.

[0273] In one embodiment, the present system and methods comprise a nucleotide sequence encoding TnsB, where the nucleotide sequence is selected from SEQ ID NOs: 1769, 1778, 1787, 1796, 1805, 1814, 1823, 1832, 1910, 1926, 1942, 1958, or an equivalent thereof. The nucleotide sequence encoding TnsB may be about 80% to about 100%, at least or about 70%, at least or about 75%, at least or about 80%, at least or about 81%, at least or about 82%, at least or about 83%, at least or about 84%, at least or about 85%, at least or about 86%, at least or about 87%, at least or about 88%, at least or about 89%, at least or about 90%, at least or about 91%, at least or about 92%, at least or about 93%, at least or about 94%, at least or about 95%, at least or about 96%, at least or about 97%, or about 100%, identical to the amino acid sequence set forth in any of SEQ ID NOs: 1769, 1778, 1787, 1796, 1805, 1814, 1823, 1832, 1910, 1926, 1942, and 1958.

[0274] The amino acid sequence of TnsB may comprise the amino acid sequence set forth in any of SEQ ID NOs: 1841, 1848, 1855, 1862, 1869, 1876, 1883, 1890, 1919, 1935, 1951, 1967, or an equivalent thereof. The amino acid sequence of TnsB may comprise an amino acid sequence at least or about 70%, at least or about 75%, at least or about 80%, at least or about 81%, at least or about 82%, at least or about 83%, at least or about 84%, at least or about 85%, at least or about 86%, at least or about 87%, at least or about 88%, at least or about 89%, at least or about 90%, at least or about 91%, at least or about 92%, at least or about 93%, at least or about 94%, at least or about 95%, at least or about 96%, at least or about 97%, or about 100%, identical to the amino acid sequence set forth in any of SEQ ID NOs: 1841, 1848, 1855, 1862, 1869, 1876, 1883, 1890, 1919, 1935, 1951, or 1967.

[0275] In one embodiment, the present system and methods comprise a nucleotide sequence encoding TnsA/TnsB fusion, where the nucleotide sequence is selected from SEQ ID NOs: 1973, 1987, or an equivalent thereof. The nucleotide sequence encoding TnsA/TnsB fusion may be about 80% to about 100%, at least or about 70%, at least or about 75%, at least or about 80%, at least or about 81%, at least or about 82%, at least or about 83%, at least or about 84%, at least or about 85%, at least or about 86%, at least or about 87%, at least or about 88%, at least or about 89%, at least or about 90%, at least or about 91%, at least or about 92%, at least or about 93%, at least or about 94%, at least or about 95%, at least or about 96%, at least or about 97%, or about 100%, identical to the amino acid sequence set forth in any of SEQ ID NOs: 1973 and 1987.

[0276] The amino acid sequence of TnsA/TnsB fusion may comprise the amino acid sequence set forth in any of SEQ ID NOs: 1981, 1995, or an equivalent thereof. The amino acid sequence of TnsA/TnsB fusion may comprise an amino acid sequence at least or about 70%, at least or about 75%, at least or about 80%, at least or about 81%, at least or about 82%, at least or about 83%, at least or about 84%, at least or about 85%, at least or about 86%, at least or about 87%, at least or about 88%, at least or about 89%, at least or about 90%, at least or about 91%, at least or about 92%, at least or about 93%, at least or about 94%, at least or about 95%, at least or about 96%, at least or about 97%, or about 100%, identical to the amino acid sequence set forth in any of SEQ ID NOs: 1981 and 1995.

[0277] In one embodiment, the present system and methods comprise a nucleotide sequence encoding TnsC, where the nucleotide sequence is selected from SEQ ID NOs: 1770, 1779, 1788, 1797, 1806, 1815, 1824, 1833, 1911, 1927, 1943, 1959, 1974, 1988, or an equivalent thereof. The nucleotide sequence encoding TnsC may be about 80% to about 100%, at least or about 70%, at least or about 75%, at least or about 80%, at least or about 81%, at least or about 82%, at least or about 83%, at least or about 84%, at least or about 85%, at least or about 86%, at least or about 87%, at least or about 88%, at least or about 89%, at least or about 90%, at least or about 91%, at least or about 92%, at least or about 93%, at least or about 94%, at least or about 95%, at least or about 96%, at least or about 97%, or about 100%, identical to the amino acid sequence set forth in any of SEQ ID NOs: 1770, 1779, 1788, 1797, 1806, 1815, 1824, 1833, 1911, 1927, 1943, 1959, 1974, and 1988.

[0278] The amino acid sequence of TnsC may comprise the amino acid sequence set forth in any of SEQ ID NOs: 1842, 1849, 1856, 1863, 1870, 1877, 1884, 1891, 1920, 1936, 1952, 1968, 1982, 1996, or an equivalent thereof. The amino acid sequence of TnsC may comprise an amino acid sequence at least or about 70%, at least or about 75%, at least or about 80%, at least or about 81%, at least or about 82%, at least or about 83%, at least or about 84%, at least or about 85%, at least or about 86%, at least or about 87%, at least or about 88%, at least or about 89%, at least or about 90%, at least or about 91%, at least or about 92%, at least or about 93%, at least or about 94%, at least or about 95%, at least or about 96%, at least or about 97%, or about 100%, identical to the amino acid sequence set forth in any of SEQ ID NOs: 1842, 1849, 1856, 1863, 1870, 1877, 1884, 1891, 1920, 1936, 1952, 1968, 1982, and 1996.

[0279] In one embodiment, the present system and methods comprise a nucleotide sequence encoding TniQ, where the nucleotide sequence is selected from SEQ ID NOs: 1771, 1780, 1789, 1798, 1807, 1816, 1825, 1834, 1912, 1928, 1944, 1960, 1975, 1989, or an equivalent thereof. The nucleotide sequence encoding TniQ may be about 80% to about 100%, at least or about 70%, at least or about 75%, at least or about 80%, at least or about 81%, at least or about 82%, at least or about 83%, at least or about 84%, at least or about 85%, at least or about 86%, at least or about 87%, at least or about 88%, at least or about 89%, at least or about 90%, at least or about 91%, at least or about 92%, at least or about 93%, at least or about 94%, at least or about 95%, at least or about 96%, at least or about 97%, or about 100%, identical to the amino acid sequence set forth in any of SEQ ID NOs: 1771, 1780, 1789, 1798, 1807, 1816, 1825, 1834, 1912, 1928, 1944, 1960, 1975, and 1989.

[0280] The amino acid sequence of TniQ may comprise the amino acid sequence set forth in any of SEQ ID NOs: 1843, 1850, 1857, 1864, 1871, 1878, 1885, 1892, 1921, 1937, 1953, 1969, 1983, 1997, or an equivalent thereof. The amino acid sequence of TniQ may comprise an amino acid sequence at least or about 70%, at least or about 75%, at least or about 80%, at least or about 81%, at least or about 82%, at least or about 83%, at least or about 84%, at least or about 85%, at least or about 86%, at least or about 87%, at least or about 88%, at least or about 89%, at least or about 90%, at least or about 91%, at least or about 92%, at least or about 93%, at least or about 94%, at least or about 95%, at least or about 96%, at least or about 97%, or about 100%, identical to the amino acid sequence set forth in any of SEQ ID NOs: 1843, 1850, 1857, 1864, 1871, 1878, 1885, 1892, 1921, 1937, 1953, 1969, 1983, and 1997.

[0281] In one embodiment, the present system and methods comprise a nucleotide sequence encoding Cas7, where the nucleotide sequence is selected from SEQ ID NOs: 1773, 1782, 1791, 1800, 1809, 1818, 1827, 1836, 1914, 1930, 1946, 1962, 1977, 1998, or an equivalent thereof. The nucleotide sequence encoding Cas7 may be about 80% to about 100%, at least or about 70%, at least or about 75%, at least or about 80%, at least or about 81%, at least or about 82%, at least or about 83%, at least or about 84%, at least or about 85%, at least or about 86%, at least or about 87%, at least or about 88%, at least or about 89%, at least or about 90%, at least or about 91%, at least or about 92%, at least or about 93%, at least or about 94%, at least or about 95%, at least or about 96%, at least or about 97%, or about 100%, identical to the amino acid sequence set forth in any of SEQ ID NOs: 1773, 1782, 1791, 1800, 1809, 1818, 1827, 1836, 1914, 1930, 1946, 1962, 1977, and 1998.

[0282] The amino acid sequence of Cas7 may comprise the amino acid sequence set forth in any of SEQ ID NOs: 1845, 1852, 1854, 1866, 1873, 1880, 1887, 1899, 1923, 1939, 1955, 1971, 1958, 1999, or an equivalent thereof. The amino acid sequence of Cas7 may comprise an amino acid sequence at least or about 70%, at least or about 75%, at least or about 80%, at least or about 81%, at least or about 82%, at least or about 83%, at least or about 84%, at least or about 85%, at least or about 86%, at least or about 87%, at least or about 88%, at least or about 89%, at least or about 90%, at least or about 91%, at least or about 92%, at least or about 93%, at least or about 94%, at least or about 95%, at least or about 96%, at least or about 97%, or about 100%, identical to the amino acid sequence set forth in any of SEQ ID NOs: 1845, 1852, 1854, 1866, 1873, 1880, 1887, 1899, 1923, 1939, 1955, 1971, 1958, and 1999.

[0283] In one embodiment, the present system and methods comprise a nucleotide sequence encoding Cas6, where the nucleotide sequence is selected from SEQ ID NOs: 1774, 1783, 1792, 1801, 1810, 1819, 1828, 1837, 1915, 1931, 1947, 1963, 1978, 1992 or an equivalent thereof. The nucleotide sequence encoding Cas6 may be about 80% to about 100%, at least or about 70%, at least or about 75%, at least or about 80%, at least or about 81%, at least or about 82%, at least or about 83%, at least or about 84%, at least or about 85%, at least or about 86%, at least or about 87%, at least or about 88%, at least or about 89%, at least or about 90%, at least or about 91%, at least or about 92%, at least or about 93%, at least or about 94%, at least or about 95%, at least or about 96%, at least or about 97%, or about 100%, identical to the amino acid sequence set forth in any of SEQ ID NOs: 1774, 1783, 1792, 1801, 1810, 1819, 1828, 1837, 1915, 1931, 1947, 1963, 1978, and 1992.

[0284] The amino acid sequence of Cas6 may comprise the amino acid sequence set forth in any of SEQ ID NOs: 1846, 1853, 1860, 1867, 1874, 1881, 1888, 1895, 1924, 1940, 1956, 1972, 1986, 2000, or an equivalent thereof. The amino acid sequence of Cas6 may comprise an amino acid sequence at least or about 70%, at least or about 75%, at least or about 80%, at least or about 81%, at least or about 82%, at least or about 83%, at least or about 84%, at least or about 85%, at least or about 86%, at least or about 87%, at least or about 88%, at least or about 89%, at least or about 90%, at least or about 91%, at least or about 92%, at least or about 93%, at least or about 94%, at least or about 95%, at least or about 96%, at least or about 97%, or about 100%, identical to the amino acid sequence set forth in any of SEQ ID NOs: 1846, 1853, 1860, 1867, 1874, 1881, 1888, 1895, 1924, 1940, 1956, 1972, 1986, and 2000.

[0285] In one embodiment, the present system and methods comprise a nucleotide sequence encoding Cas8/Cas5 fusion, where the nucleotide sequence is selected from SEQ ID NOs: 1772, 1781, 1790, 1799, 1808, 1817, 1826, 1835, 1913, 1929, 1945, 1961, 1976, 1990, or an equivalent thereof. The nucleotide sequence encoding Cas8/Cas5 may be about 80% to about 100%, at least or about 70%, at least or about 75%, at least or about 80%, at least or about 81%, at least or about 82%, at least or about 83%, at least or about 84%, at least or about 85%, at least or about 86%, at least or about 87%, at least or about 88%, at least or about 89%, at least or about 90%, at least or about 91%, at least or about 92%, at least or about 93%, at least or about 94%, at least or about 95%, at least or about 96%, at least or about 97%, or about 100%, identical to the amino acid sequence set forth in any of SEQ ID NOs: 1772, 1781, 1790, 1799, 1808, 1817, 1826, 1835, 1913, 1929, 1945, 1961, 1976, and 1990.

[0286] The amino acid sequence of Cas8/Cas5 may comprise the amino acid sequence set forth in any of SEQ ID NOs: 1844, 1851, 1858, 1865, 1872, 1879, 1886, 1893, 1922, 1938, 1954, 1970, 1984, 1998, or an equivalent thereof. The amino acid sequence of Cas8/Cas5 may comprise an amino acid sequence at least or about 70%, at least or about 75%, at least or about 80%, at least or about 81%, at least or about 82%, at least or about 83%, at least or about 84%, at least or about 85%, at least or about 86%, at least or about 87%, at least or about 88%, at least or about 89%, at least or about 90%, at least or about 91%, at least or about 92%, at least or about 93%, at least or about 94%, at least or about 95%, at least or about 96%, at least or about 97%, or about 100%, identical to the amino acid sequence set forth in any of SEQ ID NOs: 1844, 1851, 1858, 1865, 1872, 1879, 1886, 1893, 1922, 1938, 1954, 1970, 1984, and 1998.

[0287] The present system and methods may comprise (i) one or more vectors encoding the engineered CRISPR-Cas system, and, (ii) one or more vectors encoding the engineered transposon system, wherein the CRISPR-Cas system and the transposon system are on the same vector or on at least two different vectors. In one embodiment, a first vector encodes TnsB, TnsC, and TniQ (e.g., pTnsBCQ); a second vector encodes C2c5 (e.g., pC2c5); a third vector encodes a donor DNA (e.g., pDonor).

[0288] The proteins of the present system and methods include the wildtype proteins as well as any substantially homologous proteins and variants of the wildtype proteins. The term “variant” of a protein is intended to mean a protein derived from the native protein by deletion (truncation), addition, and/or substitution of one or more amino acids in the native protein. Such variants may result from, for example, genetic polymorphism or from human manipulation. A variant of a native protein can be “substantially homologous” to the native protein when at least about 80%, at least about 90%, or at least about 95% of its amino acid sequence is identical to the amino acid sequence of the native protein.

[0289] The present systems and methods provide for the insertion of a nucleic acid into any DNA segment of any organism. Moreover, the present systems and methods also provide for the insertion into any synthetic DNA segment.

[0290] Also provided is a self-transposable nucleic acid comprising a mobile nucleic acid sequence encoding a transposon-encoded CRISPR-cas system, as described above, and a first and second transposon end sequences that flank said mobile nucleic acid sequence. The cargo nucleic acid of the transposon-encoded CRISPR-cas system may also be flanked by transposon end sequences. The self-transposable nucleic acid may be in a vector. A “vector” or “expression vector” is a replicon, such as plasmid, phage, virus, or cosmid, to which another DNA segment, e.g. an “insert,” may be attached or incorporated so as to bring about the replication of the attached segment in a cell. The self-transposable nucleic acid may be present in genomic DNA of a cell.

a. Donor DNA

[0291] The donor DNA may be a part of a bacterial plasmid, bacteriophage, plant virus, retrovirus, DNA virus, autonomously replicating extra chromosomal DNA element, linear plasmid, mitochondrial or other organelle DNA, chromosomal DNA, and the like. The donor DNA comprises a cargo nucleic acid sequence flanked by transposon end sequences.

[0292] The donor DNA, and by extension the cargo nucleic acid, may of any suitable length, including, for example, about 50-100 bp (base pairs), about 100-1000 bp, at least or about 10 bp, at least or about 20 bp, at least or about 25 bp, at least or about 30 bp, at least or about 35 bp, at least or about 40 bp, at least or about 45 bp, at least or about 50 bp, at least or about 55 bp, at least or about 60 bp, at least or about 65 bp, at least or about 70 bp, at least or about 75 bp, at least or about 80 bp, at least or about 85 bp, at least or about 90 bp, at least or about 95 bp, at least or about 100 bp, at least or about 200 bp, at least or about 300 bp, at least or about 400 bp, at least or about 500 bp, at least or about 600 bp, at least or about 700 bp, at least or about 800 bp, at least or about 900 bp, at least or about 1 kb (kilobase pair), at least or about 2 kb, at least or about 3 kb, at least or about 4 kb, at least or about 5 kb, at least or about 6 kb, at least or about 7 kb, at least or about 8 kb, at least or about 9 kb, at least or about 10 kb, or less than 10 kb, in length or greater. The donor DNA, and the cargo nucleic acid, may be at least or about 10 kb, at least or about 50 kb, at least or about 100 kb, between 20 kb and 60 kb, between 20 kb and 100 kb.

b. CRISPR

[0293] CRISPR-Cas system has been successfully utilized to edit the genomes of various organisms, including, but not limited to bacteria, humans, fruit flies, zebra fish and plants. See, e.g., Jiang et al., Nature Biotechnology (2013) 31 (3): 233; Qi et al, Cell (2013) 5:1173; DiCarlo et al., Nucleic Acids Res. (2013) 7:4336; Hwang et al., Nat. Biotechnol (2013), 3:227); Gratz et al., Genetics (2013) 194:1029; Cong et al., Science (2013) 6121:819; Mali et al., Science (2013) 6121:823; Cho et al. Nat. Biotechnol (2013) 3:230; and Jiang et al., Nucleic Acids Research (2013) 41 (20): el88.

[0294] The present system may comprise Cas6, Cas7 Cas5, and Cas8. In some embodiments, the Cas5 and Cas8 are linked as a functional fusion protein. The present system may comprise Cas9.

[0295] The present system may be derived from a Class 1 CRISPR-Cas system. The present system may be derived from a Class 2 CRISPR-Cas system. The present system may be derived from a Type I CRISPR-Cas system. The present system may be derived from a Type II CRISPR-Cas system. The present system may be derived from a Type V CRISPR-Cas system.

[0296] The present system may comprise a Cascade complex. The present system may comprise C2c5.

c. gRNA

[0297] The gRNA may be a crRNA/tracrRNA (or single guide RNA, sgRNA).

[0298] The terms “gRNA,” “guide RNA” and “CRISPR guide sequence” may be used interchangeably throughout and refer to a nucleic acid comprising a sequence that determines the binding specificity of the CRISPR-Cas system. A gRNA hybridizes to (complementary to, partially or completely) a target nucleic acid sequence (e.g., the genome) in a host cell. The gRNA or portion thereof that hybridizes to the target nucleic acid (a target site) may be between 15-25 nucleotides, 18-22 nucleotides, or 19-21 nucleotides in length. In some embodiments, the gRNA sequence that hybridizes to the target nucleic acid is 15, 16, 17, 18, 19, 20, 21, 22, 23, 24, or 25 nucleotides in length. In some embodiments, the gRNA sequence that hybridizes to the target nucleic acid is between 10-30, or between 15-25, nucleotides in length. gRNAs or sgRNA(s) used in the present disclosure can be between about 5 and 100 nucleotides long, or longer (e.g., 5, 6, 7, 8, 9, 10, 11, 12, 13, 14, 15, 16, 17, 18, 19, 20, 21, 22, 23, 24, 25, 26, 27, 28, 29, 30, 31, 32, 33, 34, 35, 36, 37, 38, 39, 40, 41, 42, 43, 44, 45, 46, 47, 48, 49, 50, 51, 52, 53, 54, 55, 56, 57, 58, 59 60, 61, 62, 63, 63, 64, 65, 66, 67, 68, 69, 70, 71, 72, 73, 74, 75, 76, 77, 78, 79, 80, 81, 82, 83, 84, 85, 86, 87, 88, 89, 90, 91 92, 93, 94, 95, 96, 97, 98, 99, or 100 nucleotides in length, or longer). In one embodiment, gRNAs or sgRNA(s) can be between about 15 and about 30 nucleotides in length (e.g., about 15-29, 15-26, 15-25; 16-30, 16-29, 16-26, 16-25; or about 18-30, 18-29, 18-26, or 18-25 nucleotides in length).

[0299] To facilitate gRNA design, many computational tools have been developed (See Prykhozhij et al. (PLOS ONE, 10 (3): (2015)); Zhu et al. (PLOS ONE, 9 (9) (2014)); Xiao et al. (Bioinformatics. January 21 (2014)); Heigwer et al. (Nat Methods, 11 (2): 122-123 (2014)). Methods and tools for guide RNA design are discussed by Zhu (Frontiers in Biology, 10 (4) pp 289-296 (2015)), which is incorporated by reference herein. Additionally, there are many publicly available software tools that can be used to facilitate the design of sgRNA(s); including but not limited to, Genscript Interactive CRISPR gRNA Design Tool, WU-CRISPR, and Broad Institute GPP sgRNA Designer. There are also publicly available pre-designed gRNA sequences to target many genes and locations within the genomes of many species (human, mouse, rat, zebrafish, C. elegans), including but not limited to, IDT DNA Predesigned Alt-R CRISPR-Cas9 guide RNAs, Addgene Validated gRNA Target Sequences, and GenScript Genome-wide gRNA databases.

[0300] In addition to a sequence that binds to a target nucleic acid, in some embodiments, the gRNA may also comprise a scaffold sequence (e.g., tracrRNA). In some embodiments, such a chimeric gRNA may be referred to as a single guide RNA (sgRNA). Exemplary scaffold sequences will be evident to one of skill in the art and can be found, for example, in Jinek, et al. Science (2012) 337 (6096): 816-821, and Ran, et al. Nature Protocols (2013) 8:2281-2308.

[0301] In some embodiments, the gRNA sequence does not comprise a scaffold sequence and a scaffold sequence is expressed as a separate transcript. In such embodiments, the gRNA sequence further comprises an additional sequence that is complementary to a portion of the scaffold sequence and functions to bind (hybridize) the scaffold sequence.

[0302] In some embodiments, the gRNA sequence is at least 50%, 55%, 60%, 65%, 70%, 75%, 80%, 85%, 90%, 95%, 96%, 97%, 98%, 99%, or at least 100% complementary to a target nucleic acid. In some embodiments, the gRNA sequence is at least 50%, 55%, 60%, 65%, 70%, 75%, 80%, 85%, 90%, 95%, 96%, 97%, 98%, 99%, or at least 100% complementary to the 3′ end of the target nucleic acid (e.g., the last 5, 6, 7, 8, 9, or 10 nucleotides of the 3′ end of the target nucleic acid).

[0303] The gRNA may be a non-naturally occurring gRNA.

[0304] The target nucleic acid may be flanked by a protospacer adjacent motif (PAM). A PAM site is a nucleotide sequence in proximity to a target sequence. For example, PAM may be a DNA sequence immediately following the DNA sequence targeted by the CRISPR/Cas system.

[0305] The target sequence may or may not be flanked by a protospacer adjacent motif (PAM) sequence. In certain embodiments, a nucleic acid-guided nuclease can only cleave a target sequence if an appropriate PAM is present, see, for example Doudna et al., Science, 2014, 346 (6213): 1258096, incorporated herein by reference. A PAM can be 5′ or 3′ of a target sequence. A PAM can be upstream or downstream of a target sequence. In one embodiment, the target sequence is immediately flanked on the 3′ end by a PAM sequence. A PAM can be 1, 2, 3, 4, 5, 6, 7, 8, 9, 10 or more nucleotides in length. In certain embodiments, a PAM is between 2-6 nucleotides in length. The target sequence may or may not be located adjacent to a PAM sequence (e.g., PAM sequence located immediately 3′ of the target sequence) (e.g., for Type I CRISPR/Cas systems and Type II CRISPR/Cas systems). In some embodiments, e.g., Type I systems, the PAM is on the alternate side of the protospacer (the 5′ end). Makarova et al. describes the nomenclature for all the classes, types and subtypes of CRISPR systems (Nature Reviews Microbiology 13:722-736 (2015)). Guide structures and PAMs are described in by R. Barrangou (Genome Biol. 16:247 (2015)).

[0306] Non-limiting examples of the PAM sequences include: CC, CA, AG, GT, TA, AC, CA, GC, CG, GG, CT, TG, GA, AGG, TGG, T-rich PAMs (such as TTT, TTG, TTC, TTTT (SEQ ID NO: 385), etc.), NGG, NGA, NAG, NGGNG and NNAGAAW (W=A or T, SEQ ID NO: 912), NNNNGATT (SEQ ID NO: 913), NAAR (R=A or G), NNGRR (R=A or G), NNAGAA (SEQ ID NO: 914) and NAAAAC (SEQ ID NO: 915), where “N” is any nucleotide.

[0307] “Complementarity” refers to the ability of a nucleic acid to form hydrogen bond(s) with another nucleic acid sequence by either traditional Watson-Crick or other non-traditional types. A percent complementarity indicates the percentage of residues in a nucleic acid molecule, which can form hydrogen bonds (e.g., Watson-Crick base pairing) with a second nucleic acid sequence. Full complementarity is not necessarily required, provided there is sufficient complementarity to cause hybridization. There may be mismatches distal from the PAM.

d. Transposon

[0308] Any Tn7 transposon that encodes CRISPR-Cas systems may be used in the present methods and systems.

[0309] For example, Type I Cascade complexes may be used in the present methods and systems. Type I CRISPR-Cas systems encode a multi-subunit protein-RNA complex called Cascade, which utilizes a crRNA (or guide RNA) to target double-stranded DNA during an immune response. Cascade itself has no nuclease activity, and degradation of targeted DNA is instead mediated by a trans-acting nuclease known as Cas3. Intriguingly, the I-F and I-B systems found within Tn7 transposons consistently lack the Cas3 gene, suggesting that these systems no longer retain any DNA degradation capabilities and have been reduced to RNA-guided DNA-binding complexes. Additionally, one of the core proteins used by Tn7 transposons for selection of DNA target sites for purposes of transposon mobility, TnsD (also known as TniQ), is conspicuously encoded by a gene sitting directly within the Cas gene operon in these systems, suggesting direct coupling or functional relationship between the Cascade complex encoded by Cas genes, and the transpososome enzymatic machinery encoded by Tn seven (Tns) transposase genes.

[0310] The system derived from Vibrio cholerae that harbors a Type I-F CRISPR-Cas system may be used in the present method. Other systems (for which the CRISPR-Cas systems are either categorized as Type I-F or I-B) may also be used in the present method. These include CRISPR-systems from Vibrio cholerae, Photobacterium iliopiscarium, Pseudoalteromonas sp. P1-25, Pseudoalteromonas ruthenica, Photobacterium ganghwense, Shewanella sp. UCD-KL21, Vibrio diazotrophicus, Vibrio sp. 16, Vibrio sp. F12, Vibrio splendidus, Aliivibrio wodanis, and Parashewanella spongiae.

[0311] The Type V systems that encode putative effector gene known as c2c5 may be used in the present methods and systems. The Type V systems encode a putative effector that may be a single protein functioning with a single gRNA. These may have different packaging size, assembly, nuclear localization, etc. Type V CRISPR-Cas systems fall within Class 2 systems, which rely on single-protein effectors together with guide RNA, and so it remains possible that the engineering strategies may be streamlined by using single-protein effectors like C2c5 rather than the multi-subunit protein-RNA complexes encoded by type I systems, namely Cascade. These operons may be cloned into the same backbones.

[0312] Any CRISPR-Cas/Tn7 transposons may be used in the present methods and systems. They may have different efficiency, different specificity, different coding size, different PAM specificity, different transposon end sequences, etc.

[0313] The present system may comprise TnsD or TniQ. The present system may comprise TnsA, TnsB, and TnsC. The present system may comprise TnsB and TnsC.

e. Vectors

[0314] The Cas proteins and/or Tns proteins of the methods and compositions described here can be engineered, chimeric, or isolated from an organism. The Cas proteins and/or Tns proteins can be introduced into the cell in the form of a protein or in the form of a nucleic acid encoding the protein, such as an mRNA or a cDNA.

[0315] The present disclosure further provides engineered, non-naturally occurring vectors and vector systems, which can encode one or more components of the present system.

[0316] The present system and methods may comprise one or more vectors for RNA-guided DNA integration in prokaryotic cells or eukaryotic cells.

[0317] The present system can be delivered to a subject or cell using one or more vectors (e.g., 1, 2, 3, 4, 5, 6, 7, 8, 9, or more vectors). One or more gRNAs (e.g., sgRNAs) can be in a single (one) vector or two or more vectors. The vector may also include a donor DNA. One or more Cas proteins and/or Tns proteins can be in the same, or separate vectors.

[0318] Vectors can be administered directly to patients (in vivo) or they can be used to manipulate cells in vitro or ex vivo, where the modified cells may be administered to patients. The vectors of the present disclosure are delivered to the eukaryotic cell in a subject. Modification of the eukaryotic cells via the present system can take place in a cell culture, where the method comprises isolating the eukaryotic cell from a subject prior to the modification. In some embodiments, the method further comprises returning said eukaryotic cell and/or cells derived therefrom to the subject.

[0319] Conventional viral and non-viral based gene transfer methods can be used to introduce nucleic acids encoding components of the present system into cells, tissues or a subject. Such methods can be used to administer nucleic acids encoding components of the present system to cells in culture, or in a host organism. Non-viral vector delivery systems include DNA plasmids, cosmids, RNA (e.g., a transcript of a vector described herein), a nucleic acid, and a nucleic acid complexed with a delivery vehicle. Viral vector delivery systems include DNA and RNA viruses, which have either episomal or integrated genomes after delivery to the cell. Viral vectors include, for example, retroviral, lentiviral, adenoviral, adeno-associated and herpes simplex viral vectors.

[0320] In certain embodiments, the requisite protein and RNA machinery may be expressed on the same plasmid as the transposon donor, so that the entire system is fully autonomous. The machinery guiding the DNA targeting and DNA integration may be encoded within the transposon itself, such that it can guide further mobilization autonomously, whether in the originally transformed bug, or in other bugs (e.g. in a conjugative plasmid context, in a microbiome context, etc.).

[0321] In certain embodiments, the requisite protein and RNA machinery may be expressed on two or more plasmids.

[0322] Promoters that may be used include T7 RNA polymerase promoters, constitutive E. coli promoters, and promoters that could be broadly recognized by transcriptional machinery in a wide range of bacterial organisms. The system may be used with various bacterial hosts.

[0323] In certain embodiments, plasmids that are non-replicative, or plasmids that can be cured by high temperature may be used. The transposon, and transposon/CRISPR-associated machinery, may be removed from the engineered cells under certain conditions. This may allow for RNA-guided integration by transforming bacteria of interest, but then being left with engineered strains that have no memory of the plasmids used to facilitate RNA-guided DNA integration.

[0324] Drug selection strategies may be adopted for positively selecting for cells that underwent RNA-guided DNA integration. A transposon may contain one or more drug-selectable markers within the cargo. Then presuming that the original transposon donor plasmid is removed (by methods described herein), drug selection may be used to enrich for integrated clones.

[0325] Colony screenings may be used to isolate clonal events.

[0326] A variety of viral constructs may be used to deliver the present system (such as one or more Cas proteins and/or Tns proteins, gRNA(s), donor DNA, etc.) to the targeted cells and/or a subject. Nonlimiting examples of such recombinant viruses include recombinant adeno-associated virus (AAV), recombinant adenoviruses, recombinant lentiviruses, recombinant retroviruses, recombinant herpes simplex viruses, recombinant poxviruses, phages, etc. The present disclosure provides vectors capable of integration in the host genome, such as retrovirus or lentivirus. See, e.g., Ausubel et al., Current Protocols in Molecular Biology, John Wiley & Sons, New York, 1989; Kay, M. A., et al., 2001 Nat. Medic. 7 (1): 33-40; and Walther W. and Stein U., 2000 Drugs, 60 (2): 249-71, incorporated herein by reference.

[0327] The present disclosure also provides for DNA segments encoding the proteins disclosed herein, vectors containing these segments and host cells containing the vectors. The vectors may be used to propagate the segment in an appropriate host cell and/or to allow expression from the segment (i.e., an expression vector). The person of ordinary skill in the art would be aware of the various vectors available for propagation and expression of a cloned DNA sequence. In one embodiment, a DNA segment encoding the present protein(s) is contained in a plasmid vector that allows expression of the protein(s) and subsequent isolation and purification of the protein produced by the recombinant vector. Accordingly, the proteins disclosed herein can be purified following expression from the native transposon, obtained by chemical synthesis, or obtained by recombinant methods.

[0328] To construct cells that express the present system, expression vectors for stable or transient expression of the present system may be constructed via conventional methods as described herein and introduced into host cells. For example, nucleic acids encoding the components of the present system may be cloned into a suitable expression vector, such as a plasmid or a viral vector in operable linkage to a suitable promoter. The selection of expression vectors/plasmids/viral vectors should be suitable for integration and replication in eukaryotic cells.

[0329] In certain embodiments, vectors of the present disclosure can drive the expression of one or more sequences in mammalian cells using a mammalian expression vector. Examples of mammalian expression vectors include pCDM8 (Seed, Nature (1987) 329:840, incorporated herein by reference) and pMT2PC (Kaufman, et al., EMBO J. (1987) 6:187, incorporated herein by reference). When used in mammalian cells, the expression vector's control functions are typically provided by one or more regulatory elements. For example, commonly used promoters are derived from polyoma, adenovirus 2, cytomegalovirus, simian virus 40, and others disclosed herein and known in the art. For other suitable expression systems for both prokaryotic and eukaryotic cells see, e.g., Chapters 16 and 17 of Sambrook, et al., MOLECULAR CLONING: A LABORATORY MANUAL. 2nd eds., Cold Spring Harbor Laboratory, Cold Spring Harbor Laboratory Press, Cold Spring Harbor, N.Y., 1989, incorporated herein by reference.

[0330] Vectors of the present disclosure can comprise any of a number of promoters known to the art, wherein the promoter is constitutive, regulatable or inducible, cell type specific, tissue-specific, or species specific. In addition to the sequence sufficient to direct transcription, a promoter sequence of the invention can also include sequences of other regulatory elements that are involved in modulating transcription (e.g., enhancers, kozak sequences and introns). Many promoter/regulatory sequences useful for driving constitutive expression of a gene are available in the art and include, but are not limited to, for example, CMV (cytomegalovirus promoter), EF1a (human elongation factor 1 alpha promoter), SV40 (simian vacuolating virus 40 promoter), PGK (mammalian phosphoglycerate kinase promoter), Ubc (human ubiquitin C promoter), human beta-actin promoter, rodent beta-actin promoter, CBh (chicken beta-actin promoter), CAG (hybrid promoter contains CMV enhancer, chicken beta actin promoter, and rabbit beta-globin splice acceptor), TRE (Tetracycline response element promoter), H1 (human polymerase III RNA promoter), U6 (human U6 small nuclear promoter), and the like. Additional promoters that can be used for expression of the components of the present system, include, without limitation, cytomegalovirus (CMV) intermediate early promoter, a viral LTR such as the Rous sarcoma virus LTR, HIV-LTR, HTLV-1 LTR, Maloney murine leukemia virus (MMLV) LTR, myeoloproliferative sarcoma virus (MPSV) LTR, spleen focus-forming virus (SFFV) LTR, the simian virus 40 (SV40) early promoter, herpes simplex tk virus promoter, elongation factor 1-alpha (EF1-α) promoter with or without the EF1-α intron. Additional promoters include any constitutively active promoter. Alternatively, any regulatable promoter may be used, such that its expression can be modulated within a cell.

[0331] Moreover, inducible and tissue specific expression of a RNA, transmembrane proteins, or other proteins can be accomplished by placing the nucleic acid encoding such a molecule under the control of an inducible or tissue specific promoter/regulatory sequence. Examples of tissue specific or inducible promoter/regulatory sequences which are useful for this purpose include, but are not limited to, the rhodopsin promoter, the MMTV LTR inducible promoter, the SV40 late enhancer/promoter, synapsin 1 promoter, ET hepatocyte promoter, GS glutamine synthase promoter and many others. Various commercially available ubiquitous as well as tissue-specific promoters and tumor-specific are available, for example from InvivoGen. In addition, promoters which are well known in the art can be induced in response to inducing agents such as metals, glucocorticoids, tetracycline, hormones, and the like, are also contemplated for use with the invention. Thus, it will be appreciated that the present disclosure includes the use of any promoter/regulatory sequence known in the art that is capable of driving expression of the desired protein operably linked thereto.

[0332] The vectors of the present disclosure may direct expression of the nucleic acid in a particular cell type (e.g., tissue-specific regulatory elements are used to express the nucleic acid). Such regulatory elements include promoters that may be tissue specific or cell specific. The term “tissue specific” as it applies to a promoter refers to a promoter that is capable of directing selective expression of a nucleotide sequence of interest to a specific type of tissue (e.g., seeds) in the relative absence of expression of the same nucleotide sequence of interest in a different type of tissue. The term “cell type specific” as applied to a promoter refers to a promoter that is capable of directing selective expression of a nucleotide sequence of interest in a specific type of cell in the relative absence of expression of the same nucleotide sequence of interest in a different type of cell within the same tissue. The term “cell type specific” when applied to a promoter also means a promoter capable of promoting selective expression of a nucleotide sequence of interest in a region within a single tissue. Cell type specificity of a promoter may be assessed using methods well known in the art, e.g., immunohistochemical staining.

[0333] Additionally, the vector may contain, for example, some or all of the following: a selectable marker gene, such as the neomycin gene for selection of stable or transient transfectants in host cells; enhancer/promoter sequences from the immediate early gene of human CMV for high levels of transcription; transcription termination and RNA processing signals from SV40 for mRNA stability; 5′- and 3′-untranslated regions for mRNA stability and translation efficiency from highly-expressed genes like α-globin or β-globin; SV40 polyoma origins of replication and ColE1 for proper episomal replication; internal ribosome binding sites (IRESes), versatile multiple cloning sites; T7 and SP6 RNA promoters for in vitro transcription of sense and antisense RNA; a “suicide switch” or “suicide gene” which when triggered causes cells carrying the vector to die (e.g., HSV thymidine kinase, an inducible caspase such as iCasp9), and reporter gene for assessing expression of the chimeric receptor. Suitable vectors and methods for producing vectors containing transgenes are well known and available in the art. Selectable markers also include chloramphenicol resistance, tetracycline resistance, spectinomycin resistance, streptomycin resistance, erythromycin resistance, rifampicin resistance, bleomycin resistance, thermally adapted kanamycin resistance, gentamycin resistance, hygromycin resistance, trimethoprim resistance, dihydrofolate reductase (DHFR), GPT; the URA3, HIS4, LEU2, and TRP1 genes of S. cerevisiae.

[0334] When introduced into the host cell, the vectors may be maintained as an autonomously replicating sequence or extrachromosomal element or may be integrated into host DNA.

[0335] In one embodiment, the donor DNA may be delivered using the same gene transfer system as used to deliver the Cas protein and/or Tns protein (included on the same vector) or may be delivered using a different delivery system. In another embodiment, the donor DNA may be delivered using the same transfer system as used to deliver gRNA(s).

[0336] In one embodiment, the present disclosure comprises integration of exogenous DNA into the endogenous gene.

[0337] Alternatively, an exogenous DNA is not integrated into the endogenous gene. The DNA may be packaged into an extrachromosomal, or episomal vector (such as AAV vector), which persists in the nucleus in an extrachromosomal state, and offers donor-template delivery and expression without integration into the host genome. Use of extrachromosomal gene vector technologies has been discussed in detail by Wade-Martins R (Methods Mol Biol. 2011; 738:1-17, incorporated herein by reference).

[0338] The present system (e.g., proteins, polynucleotides encoding these proteins, donor polynucleotides and compositions comprising the proteins and/or polynucleotides described herein) may be delivered by any suitable means. In certain embodiments, the system is delivered in vivo. In other embodiments, the system is delivered to isolated/cultured cells (e.g., autologous iPS cells) in vitro to provide modified cells useful for in vivo delivery to patients afflicted with a disease or condition.

[0339] Vectors according to the present disclosure can be transformed, transfected or otherwise introduced into a wide variety of host cells. Transfection refers to the taking up of a vector by a host cell whether or not any coding sequences are in fact expressed. Numerous methods of transfection are known to the ordinarily skilled artisan, for example, lipofectamine, calcium phosphate co-precipitation, electroporation, DEAE-dextran treatment, microinjection, viral infection, and other methods known in the art. Transduction refers to entry of a virus into the cell and expression (e.g., transcription and/or translation) of sequences delivered by the viral vector genome. In the case of a recombinant vector, “transduction” generally refers to entry of the recombinant viral vector into the cell and expression of a nucleic acid of interest delivered by the vector genome.

[0340] Any of the vectors comprising a nucleic acid sequence that encodes the components of the present system is also within the scope of the present disclosure. Such a vector may be delivered into host cells by a suitable method. Methods of delivering vectors to cells are well known in the art and may include DNA or RNA electroporation, transfection reagents such as liposomes or nanoparticles to delivery DNA or RNA; delivery of DNA, RNA, or protein by mechanical deformation (see, e.g., Sharei et al. Proc. Natl. Acad. Sci. USA (2013) 110 (6): 2082-2087, incorporated herein by reference); or viral transduction. In some embodiments, the vectors are delivered to host cells by viral transduction. Nucleic acids can be delivered as part of a larger construct, such as a plasmid or viral vector, or directly, e.g., by electroporation, lipid vesicles, viral transporters, microinjection, and biolistics (high-speed particle bombardment). Similarly, the construct containing the one or more transgenes can be delivered by any method appropriate for introducing nucleic acids into a cell. In some embodiments, the construct or the nucleic acid encoding the components of the present system is a DNA molecule. In some embodiments, the nucleic acid encoding the components of the present system is a DNA vector and may be electroporated to cells. In some embodiments, the nucleic acid encoding the components of the present system is an RNA molecule, which may be electroporated to cells.

[0341] Additionally, delivery vehicles such as nanoparticle- and lipid-based mRNA or protein delivery systems can be used. Further examples of delivery vehicles include lentiviral vectors, ribonucleoprotein (RNP) complexes, lipid-based delivery system, gene gun, hydrodynamic, electroporation or nucleofection microinjection, and biolistics. Various gene delivery methods are discussed in detail by Nayerossadat et al. (Adv Biomed Res. 2012; 1:27) and Ibraheem et al. (Int J Pharm. 2014 Jan. 1; 459 (1-2): 70-83), incorporated herein by reference.

### 2. Compositions

[0342] The present system and self-transposable nucleic acid sequence may be administered in a pharmaceutically acceptable carrier or excipient as a pharmaceutical composition.

[0343] Administration of the present system or compositions can be in one dose, continuously or intermittently throughout the course of treatment. Administration may be through any suitable mode of administration, including but not limited to: intravenous, intra-arterial, intramuscular, intracardiac, intrathecal, subventricular, epidural, intracerebral, intracerebroventricular, sub-retinal, intravitreal, intraarticular, intraocular, intraperitoneal, intrauterine, intradermal, subcutaneous, transdermal, transmucosal, topical, and inhalation.

[0344] Methods of determining the most effective means and dosage of administration are known to those of skill in the art and will vary with the composition used for therapy, the purpose of the therapy and the subject being treated. Single or multiple administrations can be carried out with the dose level and pattern being selected by the treating physician.

[0345] In some embodiments, the components of the present system or the self-transposable nucleic acid sequence may be mixed with a pharmaceutically acceptable carrier to form pharmaceutical compositions, which are also within the scope of the present disclosure.

[0346] To perform the methods described herein, an effective amount of the present system, the self-transposable nucleic acid sequence, or present compositions can be administered to a subject in need of the treatment. As used herein the term “effective amount” may be used interchangeably with the term “therapeutically effective amount” and refers to that quantity of an agent, cell population, or pharmaceutical composition (e.g., a composition comprising agents and/or hematopoietic cells) that is sufficient to result in a desired activity upon administration to a subject in need thereof. Within the context of the present disclosure, the term “effective amount” refers to that quantity of a compound, cell population, or pharmaceutical composition that is sufficient to delay the manifestation, arrest the progression, relieve or alleviate at least one symptom of a disorder treated by the methods of the present disclosure. Note that when a combination of active ingredients is administered the effective amount of the combination may or may not include amounts of each ingredient that would have been effective if administered individually.

[0347] Effective amounts vary, as recognized by those skilled in the art, depending on the particular condition being treated, the severity of the condition, the individual patient parameters including age, physical condition, size, gender and weight, the duration of the treatment, the nature of concurrent therapy (if any), the specific route of administration and like factors within the knowledge and expertise of the health practitioner. In some embodiments, the effective amount alleviates, relieves, ameliorates, improves, reduces the symptoms, or delays the progression of any disease or disorder in the subject. In some embodiments, the subject is a human. In some embodiments, the subject is a human patient having a hematopoietic malignancy.

[0348] In the context of the present disclosure insofar as it relates to any of the disease conditions recited herein, the terms “treat,” “treatment,” and the like mean to relieve or alleviate at least one symptom associated with such condition, or to slow or reverse the progression of such condition. Within the meaning of the present disclosure, the term “treat” also denotes to arrest, delay the onset (i.e., the period prior to clinical manifestation of a disease) and/or reduce the risk of developing or worsening a disease. For example, in connection with cancer the term “treat” may mean eliminate or reduce a patient's tumor burden, or prevent, delay or inhibit metastasis, etc.

[0349] The phrase “pharmaceutically acceptable,” as used in connection with compositions and/or cells of the present disclosure, refers to molecular entities and other ingredients of such compositions that are physiologically tolerable and do not typically produce untoward reactions when administered to a subject (e.g., a mammal, a human). Preferably, as used herein, the term “pharmaceutically acceptable” means approved by a regulatory agency of the Federal or a state government or listed in the U.S. Pharmacopeia or other generally recognized pharmacopeia for use in mammals, and more particularly in humans. “Acceptable” means that the carrier is compatible with the active ingredient of the composition (e.g., the nucleic acids, vectors, cells, or therapeutic antibodies) and does not negatively affect the subject to which the composition(s) are administered. Any of the pharmaceutical compositions and/or cells to be used in the present methods can comprise pharmaceutically acceptable carriers, excipients, or stabilizers in the form of lyophilized formations or aqueous solutions.

[0350] Pharmaceutically acceptable carriers, including buffers, are well known in the art, and may comprise phosphate, citrate, and other organic acids; antioxidants including ascorbic acid and methionine; preservatives; low molecular weight polypeptides; proteins, such as serum albumin, gelatin, or immunoglobulins; amino acids; hydrophobic polymers; monosaccharides; disaccharides; and other carbohydrates; metal complexes; and/or non-ionic surfactants. See, e.g. Remington: The Science and Practice of Pharmacy 20th Ed. (2000) Lippincott Williams and Wilkins, Ed. K. E. Hoover.

### 3. Applications

a. Genetic Analysis

[0351] The present systems and methods may be used for genetic analysis. Genetic analysis includes, but is not limited to: assessment of the phenotype of a null allele (not expressing functional protein due to interruption of the gene by the transposable segment); assessment of the consequences of insertion of particular active DNA structures or sequences for genetic properties of chromosomes or their parts, such as but not limited to accessibility to Dnase I or to footprinting reagents, or expression or silencing of nearby transcribable genes, or for activity of genetic or epigenetic processes such as, but not limited to homologous recombination, chemical mutagenesis, oxidative DNA damages, DNA methylation, insertion of proviruses or retroposons; assessment of protein domain structure via creation of multiple interruption points within a gene for a multidomain protein, wherein a gene product missing one or more domains of the multidomain protein might exhibit partial activity or activities, including antigenic activities or immunodominant epitopes; assessment of expression pattern via creation of transcriptional fusions of a promoter in the target to a reporter (e.g. beta galactosidase or green fluorescent protein or chloramphenicol transacetylase or luciferase) within the transposable segment; assessment of expression pattern via creation of translational fusions of a portion of a gene product encoded by a target to a gene product or an antigenic peptide encoded by the transposable segment (e.g. beta galactosidase or an epitope tag or an affinity tag); assessment of operon structure, in which interruption of transcription by insertion upstream of a gene results in altered expression of a gene without disrupting the coding sequence of that gene; gratuitous expression of a gene, in which transcription from a promoter within the transposable segment results in expression of a gene downstream of the position of insertion of the transposable segment, with or without regulation of transcription of the promoter within the transposable segment; gratuitous expression of a protein fusion, in which transcription from a promoter within the transposable segment results in translation of a protein beginning within the transposable segment and proceeding toward the outside of the transposon, then continuing into the gene within which the transposable segment is inserted, resulting in a fusion of the transposon-encoded protein with the target protein; assessment of the consequences of introducing into the host cell any transcript or gene product entirely encoded within the transposable segment, especially where it is desirable to assess position-effects (the consequences not only of expression but of expression in different positions within the genome).

[0352] The present systems and methods may be used for targeted DNA enrichment, where user-defined genetic payloads are directed to integrate at user-defined sites within DNA. This method may be applied to various application areas, such as for clinically important workflows. These include, but are not limited to, whole exome sequencing (WES; see Suwinski et al., Front. Genet. 10, 49 (2019); Warr et al., G3 (Bethesda) 5, 1543-1550 (2015)); deep sequencing of patient adaptive immune repertoires, specifically, T-cell receptor and immunoglobulin diversification (see Friedensohn et al., Trends Biotechnol 35, 203-214 (2017) and Rosati et al., BMC Biotechnol. 17, 61 (2017), incorporated herein by reference); and targeted enrichment and deep sequencing of cancer biomarkers in the context of oncology (Kamps et al., Int J Mol Sci 18, (2017), incorporated herein by reference).

[0353] In one embodiment, the present systems may be used for flanking a nucleic acid sequence of interest (NASI). The NASI may have a first flanking sequence on one side of the NASI and a second flanking sequence on the other side. The method comprises a transposon-encoded CRISPR-Cas system, as described herein, comprising a first guide RNA specific for the first flanking region, and a second guide RNA specific for the second flanking region. Thus, the CRISPR-Cas system integrates the left transposon end into the first flanking region and the right transposon end into the second flanking region.

[0354] In another embodiment, the present system and method is used for targeted DNA enrichment by conducting biochemical RNA-guided DNA integration in vitro (e.g., with purified protein/RNA components and input DNA). The targeted DNA enrichment may include contacting the sample with a first primer specific for the left transposon end sequence, a second primer specific for the right transposon end sequence, and polymerases under conditions for amplification. Following amplification, the NASI can be sequenced, as described above, with next-generation sequencing (NGS) or whole exome sequencing (WES).

[0355] All of the necessary or sufficient molecular components of the CRISPR-Tn7 system are expressed recombinantly and purified, which in the case of the CRISPR-Tn7 system from Vibrio cholerae, includes Vch TnsA, TnsB, TnsC, TniQ, gRNA Cas7, Cas6, and a natural fusion of Cas8 and Cas5 polypeptides. The gRNA may comprise a single gRNA, but in most embodiments, comprises a library of gRNAs that are designed to target complementary DNA sequences of interest (e.g., the 32-bp protospacer, flanked by a protospacer adjacent motif, or PAM), such that RNA-guided DNA integration occurs proximal to a DNA sequence of interest for downstream enrichment.

[0356] The protein and gRNA components are combined with engineered transposon Left (“L”) and Right (“R”) end sequences, which may be present as a single linear double-stranded DNA (dsDNA) flanking an internal genetic payload, or as two separate DNA molecules, each one of which comprises a dsDNA L or R end; the transposon ends may also be covalently attached to a genetic payload. The genetic payload may be a short adaptor, such as a sequence used for downstream primer binding during a PCR amplification step, as would be performed for NGS library preps for massively parallel DNA sequencing, such as with the Illumina®, Pacbio, Ion Torrent, or Nanopore, platforms. The transposon end sequences themselves may also serve as the primer binding sites for downstream NGS library preparation. The engineered transposon Left (“L”) and Right (“R”) end sequences may comprise a UMI (unique molecular identifier) sequence. Unique molecular identifiers (UMIs), or molecular barcodes (MBC) are short sequences or molecular “tags” added to DNA fragments, commonly used for some next generation sequencing library preparation protocols to identify the input DNA molecule. The protein and RNA molecular components, together with the transposon end sequences which are sometimes linked to a user-defined genetic payload, or adaptor, are then combined with input DNA containing the sequence(s) of interest to be enriched. The DNA may be purified genomic DNA, genomic DNA within a cellular lysate or other cellular extracts, mixtures of DNA from metagenomic samples, DNA from viruses, DNA from bacterial, archaeal, and/or eukaryotic cells, or other types of DNA samples.

b. Genetic Modification

[0357] Also provided herein are methods of producing a nucleic acid molecule or cell that is modified by the present system. The method may involve providing a cell and introducing into the cell components of the present system for genome editing. In some embodiments, a nucleic acid that comprises a gRNA that hybridizes to a target site is introduced into the cell. In some embodiments, the gRNA is introduced into the cell on a vector. In some embodiments a Cas protein and/or a Tns protein is introduced into the cell. In some embodiments, a Cas protein and/or a Tns protein is introduced into the cell as a nucleic acid encoding the protein. In some embodiments, the gRNA and a nucleotide sequence encoding one or more Cas proteins and/or Tns proteins are introduced into the cell on the same nucleic acid (e.g., the same vector). In some embodiments, the gRNA and a nucleotide sequence encoding one or more Cas proteins and/or Tns proteins are introduced into the cell on different nucleic acids (e.g., different vectors). In some embodiments, a Cas protein and/or a Tns protein is introduced into the cell in the form of a protein. In some embodiments, a Cas protein endonuclease and the gRNA are pre-formed in vitro and are introduced to the cell in as a complex.

[0358] The present disclosure provides for a modified cell produced by the present system and method, an organism (e.g., an animal, a plant, etc.) comprising the cell, a population of cells comprising the cell, tissues of an organism (e.g., an animal, a plant, etc.) comprising the cell, and at least one organ of an organism (e.g., an animal, a plant, etc.) comprising the cell. The present disclosure further encompasses the progeny, clones, cell lines or cells of the genetically modified organism (e.g., an animal, a plant, etc.).

[0359] The present disclosure provides a genetically modified organism (e.g., an animal, a plant, etc.). The genetically modified organism (e.g., an animal, a plant, etc.) may be homozygous or heterozygous for the genetic modification.

[0360] The present system and method may be used to generate an animal model of the desired disease, disorder, or condition for experimental and screening assays.

[0361] The present disclosure further provides progeny of a genetically modified cell, where the progeny can comprise the same genetic modification as the genetically modified cell from which it was derived. The present disclosure further provides a composition comprising a genetically modified cell.

[0362] In some embodiments, a genetically modified host cell can generate a genetically modified organism. For example, the genetically modified host cell is a pluripotent stem cell, it can generate a genetically modified organism. Methods of producing genetically modified organisms are known in the art.

[0363] Genetic modification may be assessed using techniques that include, for example, Northern blot analysis of tissue samples obtained from the animal, in situ hybridization analysis, Western analysis, immunoassays such as enzyme-linked immunosorbent assays, and reverse-transcriptase PCR (RT-PCR). The site of integration may be determined by Sanger sequencing. For example, DNA is amplified from the analytical PCR reactions and is separated by gel electrophoresis. DNA is then isolated by gel extraction, and samples are analyzed. The site of integration may be determined by next-generation sequencing (NGS).

[0364] The advantage of CRISPR as a gene-editing technology, related to previous protein-based technologies (e.g. ZFNs and TALENs), is that the reliance on gRNAs means that specificity may be easily altered, and libraries of gRNAs can be straightforwardly cloned, targeting tens of thousands of sites simultaneously.

[0365] gRNA libraries may be harnessed for the following two approaches. In the first, libraries of gRNAs across a population could be used to target the present transposons to a plurality of unique sites (e.g., hundreds to tens of thousands of unique sites), in a single heterogeneous cell population, either for screening purposes or cell engineering purposes. This can have utility in bacteria, and eukaryotic cells.

[0366] Secondly, gRNA libraries may be introduced within single, engineered CRISPR arrays, so that a single CRISPR-containing transposon has a suite of gRNAs that can mobilize the system into any number of DNA target sites, anytime those sites are encountered within the cellular environment. A single autonomous CRISPR-containing transposon may be programmed with a large library of gRNAs simultaneously, for multiplexed RNA-guided DNA integration.

[0367] The present transposon may be simultaneously integrated into multiple genomic sites, within individual bacterial clones.

[0368] The present methods and systems for RNA-guided DNA integration, in some embodiments, deliver cargo genes, with or without scars left behind from the transposon end sequences that are required for specific excision and integration by the TnsA and TnsB machinery. These end sequences may have different sequence specificity. One or more base-pairs may be mutated without a drop in integration efficiency. The present methods and systems may permit integration with the smallest scars possible, and/or with integration allow for protein coding sequences to extend through the transposon end sequence.

[0369] The present methods and systems may be used to specifically tag the N- or C-termini of a gene of interest (or tag it internally), whereby the end sequence being integrated would encode a linker-like amino acid sequence that would bridge the native protein with the cargo encoded within the transposon donor, such as an epitope tag, a fluorescent reporter protein, etc.

[0370] There are currently limitations with the use of programmable nucleases for insertion of large cargos in a cell. The present system and methods allow for the insertion of large donor DNA cargos. The donor DNA cargo may be at least or about 2 kb, at least or about 10 kb, at least or about 50 kb, at least or about 100 kb, between 20 kb and 60 kb, or between 20 kb and 100 kb in length.

[0371] The large donor DNA cargo may be inserted into any cell, eukaryotic or prokaryotic. In some embodiments, the large donor DNA is inserted into bacterial cells. The bacterial cells may be E. coli cells. The bacterial cells may be cultured under conditions at least 5 degrees Celsius below optimal growth temperature for said bacterial cells. The temperature for culturing may be less than 37 degrees Celsius, including, for example, about 32 degrees Celsius, about 30 degrees Celsius, about 28 degrees Celsius, about 26 degrees Celsius, about 24 degrees Celsius, about 22 degrees Celsius, about 20 degrees Celsius, between 20 and 32 degrees Celsius, between 25 and 30 degrees Celsius, or between 28 and 32 degrees Celsius.

a. Plant

[0372] Genetic modification of plants is a powerful tool to meet the growing demand for food. Genetically modified plants can potentially have improved crop yields, enhanced nutritional value, and increased shelf life. They can also be resistant to unfavorable environmental conditions, insects, and pesticides. See, for example, Genetic engineering for improving quality and productivity of crops, Agriculture & Food Security, 2013, 2:15, incorporated herein by reference. The first genetically modified plant approved by the U.S. Department of Agriculture for commercial production was the FLAVR SAVR tomato in 1992. The FLAVR SAVR tomato was modified to increase the firmness of the tomato in order to extend shelf life.

[0373] Systems that have been used to genetically modify plants include zinc-finger nucleases (ZFNs), TALENs (transcription activator-like effector nucleases), oligonucleotide-directed mutagenesis (ODM), and CRISPR-Cas. See, for example, Shah T, Andleeb T, et al. Plant Physiology and Biochemistry, 2018, 131:12-21, incorporated herein by reference. Distinct from animal, yeast, or bacterial cells to which recombinant molecules (DNA, RNA or protein) could be directly transformed for genome editing, recombinant plasmid DNA is typically delivered into plant cells via the Agrobacterium-mediate transformation, biolistic bombardment, or protoplast transformation due to the presence of cell wall. In addition, in contrast to microbial and mammalian systems in which gene targeting is an established tool, it is extremely inefficient and difficult to achieve successful gene targeting in plants, largely due to the low frequency of homologous recombination. Therefore, it is imperative to develop new technologies for more efficient and specific gene targeting and genome editing in plants.

[0374] The present systems and methods have broad applications in gene discovery and validation, mutational and cisgenic breeding, and hybrid breeding. These applications should facilitate the production of a new generation of genetically modified crops with various improved agronomic traits such as herbicide resistance, herbicide tolerance, drought tolerance, male sterility, insect resistance, abiotic stress tolerance, modified fatty acid metabolism, modified carbohydrate metabolism, modified seed yield, modified oil percent, modified protein percent, resistance to bacterial disease, disease (e.g. bacterial, fungal, and viral) resistance, high yield, and superior quality. These applications may also facilitation the production of a new generation of genetically modified crops with optimized fragrance, nutritional value, shelf-life, pigmentations (e.g., lycopene content), starch content (e.g., low-gluten wheat), toxin levels, propagation and/or breeding and growth time. See, for example, CRISPR/Cas Genome Editing and Precision Plant Breeding in Agriculture (Annual Rev of Plant Biology, 2019), incorporated herein by reference.

[0375] The present disclosure provides for an engineered transposon-encoded CRISPR-Cas system and methods for RNA-guided DNA integration in a plant cell, comprising: (i) at least one Cas protein, (ii) a guide RNA (gRNA), and (iii) an engineered transposon system.

[0376] The present disclosure provides for an engineered transposon-encoded CRISPR-Cas system and methods for RNA-guided DNA integration in a plant cell, comprising: (i) at least one Cas protein, (ii) a guide RNA (gRNA), and (iii) a Tn7-like transposon system.

[0377] Also encompassed by the present disclosure is a system and methods for RNA-guided DNA integration in a plant cell, comprising: (i) one or more vectors encoding an engineered CRISPR-Cas system, wherein the CRISPR-Cas system comprises: (a) at least one Cas protein, and (b) a guide RNA (gRNA); and (ii) one or more vectors encoding a Tn7-like transposon system, wherein the CRISPR-Cas system and the transposon system are on same or different vector(s).

[0378] The present disclosure also provides for a system and methods for RNA-guided DNA integration in a plant cell, comprising: (i) one or more vectors encoding an engineered CRISPR-Cas system, wherein the CRISPR-Cas system comprises: (a) at least one Cas protein, and (b) a guide RNA (gRNA); and (ii) one or more vectors encoding an engineered transposon system, wherein the CRISPR-Cas system and the transposon system are on same or different vector(s).

[0379] The present disclosure provides for a method for RNA-guided DNA integration in a plant cell, the method comprising introducing into the plant cell an engineered transposon-encoded CRISPR-Cas system, wherein the transposon-encoded CRISPR-Cas system comprises: (i) at least one Cas protein, (ii) a guide RNA (gRNA) specific for a target site, (iii) an engineered transposon system, and (iv) a donor DNA, wherein the transposon-encoded CRISPR-Cas system integrates the donor DNA proximal to the target site.

[0380] The system and methods may further comprise a donor DNA. The donor DNA comprises a cargo nucleic acid and transposon end sequences. The transposon-encoded CRISPR-Cas system may integrate the donor DNA into the genome of the plant cell.

[0381] The cargo nucleic acid may be flanked by transposon end sequences. The integration may be about 46-bp to 55-bp downstream of the target site. The integration may be about 47-bp to 51-bp downstream of the target site.

[0382] The target site may be flanked by a protospacer adjacent motif (PAM).

[0383] The transposon system may be a bacterial Tn7-like transposon system. Tn7 transposes via a cut-and-paste mechanism, Class II. Choi et al. PNAS 110 (22): E2038-E2045 (2013); Ivics et al. Nature Methods 6 (6): 415-422 (2009). The transposon system may be derived from Vibrio cholerae, Photobacterium iliopiscarium, Pseudoalteromonas sp. P1-25, Pseudoalteromonas ruthenica, Photobacterium ganghwense, Shewanella sp. UCD-KL21, Vibrio diazotrophicus, Vibrio sp. 16, Vibrio sp. F12, Vibrio splendidus, Aliivibrio wodanis, and Parashewanella spongiae. The engineered transposon-encoded CRISPR-Cas system may be from a bacteria selected from the group consisting of: Vibrio cholerae strain 4874, Photobacterium iliopiscarium strain NCIMB, Pseudoalteromonas sp. P1-25, Pseudoalteromonas ruthenica strain S3245, Photobacterium ganghwense strain JCM, Shewanella sp. UCD-KL21, Vibrio cholerae strain OYP7G04, Vibrio cholerae strain M1517, Vibrio diazotrophicus strain 60.6F, Vibrio sp. 16, Vibrio sp. F12, Vibrio splendidus strain UCD-SED10, Aliivibrio wodanis 06/09/160, and Parashewanella spongiae strain HJ039.

[0384] In one embodiment, transposon system is derived from Vibrio cholerae Tn6677. The system can encompass gain-of-function Tn7 mutants (Lu et al. EMBO 19 (13): 3446-3457 (2000); U.S. Patent Publication No. 20020188105) as well as replicative Tn7 transposition mutants (May et al. Science 272:401-404 (1996)).

[0385] The transposon system may comprise TnsD or TniQ. The present system may comprise TnsA, TnsB and TnsC. The present system may comprise TnsB and TnsC.

[0386] The system may be derived from a Class 1 CRISPR-Cas system. The present system may be derived from a Class 2 CRISPR-Cas system. The present system may be derived from a Type I CRISPR-Cas system. The present system may be derived from a Type V CRISPR-Cas system.

[0387] The present system may be nuclease-deficient. The present system may comprise Cas6, Cas7 and Cas8/Cas5 fusion. The present system may comprise Cas6, Cas7, Cas8, and Cas5. The system may comprise a Cascade complex. The present system may comprise C2c5 (Cas12k).

[0388] Non-limiting examples of plants that may be genetically modified using the present systems and methods include: grains, forage crops, fruits, vegetables, oil seed crops, palms, forestry, vines, maize (corn, Zea mays), banana, peanut, field peas, sunflower, tomato, canola, tobacco, wheat, barley, oats, potato, soybeans, cotton, carnations, sorghum, lupin, rice, Arabidopsis thaliana, Medicago truncatula, Solanum lycopersicum, Glycine max, Brachypodium distachyon, Oryza sativa, Sorghum bicolor, and Solanum tuberosum. In some embodiments, the plant is a petunia, of the genus Atropa, rutabaga, celery, switchgrass, apple, Nicotiana benthamiana, or Setaria viridis.

[0389] The present systems and methods may be used to modify monocot plants, including rice, a model plant and crop species. The present systems and methods may be used to modify dicot plants, including for example soybean (Glycine max), potato (Solanum), and Arabidopsis thaliana.

[0390] The present systems and methods can be used to transform a number of monocotyledonous and dicotyledonous plants and plant cell systems, including dicots such as safflower, alfalfa, soybean, coffee, amaranth, rapeseed (high erucic acid and canola), peanut or sunflower, as well as monocots such as oil palm, sugarcane, banana, sudangrass, corn, wheat, rye, barley, oat, rice, millet, or sorghum. Also suitable are gymnosperms such as fir and pine.

[0391] Thus, the methods described herein can be utilized with dicotyledonous plants belonging, for example, to the orders Magniolales, Illiciales, Laurales, Piperales, Aristochiales, Nymphaeales, Ranunculales, Papeverales, Sarraceniaceae, Trochodendrales, Hamamelidales, Eucomiales, Leitneriales, Myricales, Fagales, Casuarinales, Caryophyllales, Batales, Polygonales, Plumbaginales, Dilleniales, Theales, Malvales, Urticales, Lecythidales, Violales, Salicales, Capparales, Ericales, Diapensales, Ebenales, Primulales, Rosales, Fabales, Podostemales, Haloragales, Myrtales, Cornales, Proteales, San tales, Rafflesiales, Celastrales, Euphorbiales, Rhamnales, Sapindales, Juglandales, Geraniales, Polygalales, Umbellales, Gentianales, Polemoniales, Lamiales, Plantaginales, Scrophulariales, Campanulales, Rubiales, Dipsacales, and Asterales. The methods described herein also can be utilized with monocotyledonous plants such as those belonging to the orders Alismatales, Hydrocharitales, Najadales, Triuridales, Commelinales, Eriocaulales, Restionales, Poales, Juncales, Cyperales, Typhales, Bromeliales, Zingiberales, Arecales, Cyclanthales, Pandanales, Arales, Lilliales, and Orchid ales, or with plants belonging to Gymnospermae, e.g., Pinales, Ginkgoales, Cycadales and Gnetales.

[0392] The methods can be used over a broad range of plant species, including species from the dicot genera Atropa, Alseodaphne, Anacardium, Arachis, Beilschmiedia, Brassica, Carthamus, Cocculus, Croton, Cucumis, Citrus, Citrullus, Capsicum, Catharanthus, Cocos, Coffea, Cucurbita, Daucus, Duguetia, Eschscholzia, Ficus, Fragaria, Glaucium, Glycine, Gossypium, Helianthus, Hevea, Hyoscyamus, Lactuca, Landolphia, Linum, Litsea, Lycopersicon, Lupinus, Manihot, Majorana, Malus, Medicago, Nicotiana, Olea, Parthenium, Papaver, Persea, Phaseolus, Pistacia, Pisum, Pyrus, Prunus, Raphanus, Ricinus, Senecio, Sinomenium, Stephania, Sinapis, Solanum, Theobroma, Trifolium, Trigonella, Vicia, Vinca, Vilis, and Vigna: the monocot genera Allium, Andropogon, Aragrostis, Asparagus, Avena, Cynodon, Elaeis, Festuca, Festulolium, Heterocallis, Hordeum, Lemna, Lolium, Musa, Oryza, Panicum, Pannesetum, Phleum, Poa, Secale, Sorghum, Triticum, and Zea; or the gymnosperm genera Abies, Cunninghamia, Picea, Pinus, and Pseudotsuga.

[0393] Target plants and plant cells for engineering include, but are not limited to, those monocotyledonous and dicotyledonous plants, such as crops including grain crops (e.g., wheat, maize, rice, millet, barley), fruit crops (e.g., tomato, apple, pear, strawberry, orange), forage crops (e.g., alfalfa), root vegetable crops (e.g., carrot, potato, sugar beets, yam), leafy vegetable crops (e.g., lettuce, spinach); flowering plants (e.g., petunia, rose, chrysanthemum), conifers and pine trees (e.g., pine fir, spruce); plants used in phytoremediation (e.g., heavy metal accumulating plants); oil crops (e.g., sunflower, rapeseed) and plants used for experimental purposes (e.g., Arabidopsis). Thus, the disclosed methods and compositions have use over a broad range of plants, including, but not limited to, species from the genera Asparagus, Avena, Brassica, Citrus, Citrullus, Capsicum, Cucurbita, Daucus, Glycine, Hordeum, Lactuca, Lycopersicon, Malus, Manihot, Nicotiana, Oryza, Persea, Pisum, Pyrus, Prunus, Raphanus, Secale, Solanum, Sorghum, Triticum, Vitis, Vigna, and Zea. One of skill in the art will recognize that after the expression cassette is stably incorporated in transgenic plants and confirmed to be operable, it can be introduced into other plants by sexual crossing. Any of a number of standard breeding techniques can be used, depending upon the species to be crossed.

[0394] The plant cell may be a cell of rice, soybean, maize, tomato, banana, peanut, field pea, sunflower, canola, tobacco, wheat, barley, oats, potato, cotton, carnation, sorghum, or lupin. The plant cell may be a cell of Solanum lycopersicum, Glycine max, Arabidopsis thaliana, Medicago truncatula, Brachypodium distachyon, Oryza sativa, Sorghum bicolor, Zea mays, or Solanum tuberosum, petunia, the genus Atropa, rutabaga, celery, switchgrass, apple, Nicotiana benthamiana, or Setaria viridis.

[0395] The plant cell may be a cell of a monocot plant, or a dicot plant.

[0396] The present system and method may confer one or more of the following traits to the plant cell: herbicide tolerance, drought tolerance, male sterility, insect resistance, abiotic stress tolerance, modified fatty acid metabolism, modified carbohydrate metabolism, modified seed yield, modified oil percent, modified protein percent, resistance to bacterial disease, resistance to fungal disease, and resistance to viral disease.

[0397] The present disclosure provides for a modified plant cell produced by the present system and method, a plant comprising the plant cell, and a seed, fruit, plant part, or propagation material of the plant. The present disclosure further encompasses the progeny, clones, cell lines or cells of the transgenic plants.

[0398] The present disclosure provides a transgenic plant. The transgenic plant may be homozygous or heterozygous for the genetic modification.

[0399] Also provided by the present disclosure are transformed or genetically modified plant cells, tissues, plants and products that contain the transformed or genetically modified plant cells.

[0400] In one embodiment, the transformed or genetically modified cells, and tissues and products comprise a nucleic acid integrated into the genome, and production by plant cells of a gene product due to the transformation or genetic modification.

[0401] Transformed or genetically modified plant cells of the present disclosure may be as populations of cells, or as a tissue, seed, whole plant, stem, fruit, leaf, root, flower, stem, tuber, grain, animal feed, a field of plants, and the like.

[0402] Methods of introducing exogenous nucleic acids into plant cells are well known in the art. Such plant cells are considered “transformed”. DNA constructs can be introduced into plant cells by various methods, including, but not limited to PEG- or electroporation-mediated protoplast transformation, tissue culture or plant tissue transformation by biolistic bombardment, or the Agrobacterium-mediated transient and stable transformation. In one embodiment, rice protoplasts can be efficiently transformed with a plasmid construct. The transformation can be transient or stable transformation. Suitable methods also include viral infection (such as double stranded DNA viruses), transfection, conjugation, protoplast fusion, electroporation, particle gun technology, calcium phosphate precipitation, direct microinjection, silicon carbide whiskers technology, Agrobacterium-mediated transformation and the like. The choice of method is generally dependent on the type of cell being transformed and the circumstances under which the transformation is taking place (i.e., in vitro, ex vivo, or in vivo). Transformation methods based upon the soil bacterium Agrobacterium tumefaciens are useful for introducing an exogenous nucleic acid molecule into a vascular plant. The wild type form of Agrobacterium contains a Ti (tumor-inducing) plasmid that directs production of tumorigenic crown gall growth on host plants. Transfer of the tumor-inducing T-DNA region of the Ti plasmid to a plant genome requires the Ti plasmid-encoded virulence genes as well as T-DNA borders, which are a set of direct DNA repeats that delineate the region to be transferred. An Agrobacterium-based vector is a modified form of a Ti plasmid, in which the tumor inducing functions are replaced by the nucleic acid sequence of interest to be introduced into the plant host.

[0403] Agrobacterium-mediated transformation generally employs cointegrate vectors or binary vector systems, in which the components of the Ti plasmid are divided between a helper vector, which resides permanently in the Agrobacterium host and carries the virulence genes, and a shuttle vector, which contains the gene of interest bounded by T-DNA sequences. A variety of binary vectors are well known in the art and are commercially available, for example, from Clontech (Palo Alto, Calif.). Methods of coculturing Agrobacterium with cultured plant cells or wounded tissue such as leaf tissue, root explants, hypocotyledons, stem pieces or tubers, for example, also are well known in the art. See., e.g., Glick and Thompson, (eds.), Methods in Plant Molecular Biology and Biotechnology, Boca Raton, Fla.: CRC Press (1993), incorporated herein by reference. In one embodiment, the transposon-encoded CRISPR-Cas system is introduced into the plant cell via Agrobacterium-mediated transformation of the plant cell.

[0404] Microprojectile-mediated transformation also can be used to produce a transgenic plant. This method, first described by Klein et al. (Nature 327:70-73 (1987), incorporated herein by reference), relies on microprojectiles such as gold or tungsten that are coated with the desired nucleic acid molecule by precipitation with calcium chloride, spermidine or polyethylene glycol. The microprojectile particles are accelerated at high speed into an angiosperm tissue using a device such as the BIOLISTIC PD-1000 (Biorad; Hercules Calif.).

[0405] A nucleic acid may be introduced into a plant in a manner such that the nucleic acid is able to enter a plant cell(s), e.g., via an in vivo or ex vivo protocol. By “in vivo,” it is meant that the nucleic acid is administered to a living body of a plant. By “ex vivo” it is meant that cells or explants are modified outside of the plant, and then such cells or organs are regenerated to a plant. A number of vectors suitable for stable transformation of plant cells or for the establishment of transgenic plants have been described, including those described in Weissbach and Weissbach, (1989) Methods for Plant Molecular Biology Academic Press, and Gelvin et al., (1990) Plant Molecular Biology Manual, Kluwer Academic Publishers, incorporated herein by reference. Specific examples include those derived from a Ti plasmid of Agrobacterium tumefaciens, as well as those disclosed by Herrera-Estrella et al. (1983) Nature 303:209, Bevan (1984) Nucl Acid Res. 12:8711-8721, Klee (1985) Bio/Technolo 3:637-642, incorporated herein by reference. Alternatively, non-Ti vectors can be used to transfer the DNA into plants and cells by using free DNA delivery techniques. By using these methods transgenic plants such as wheat, rice (Christou (1991) Bio/Technology 9:957-9 and 4462, incorporated herein by reference) and corn (Gordon-Kamm (1990) Plant Cell 2:603-618, incorporated herein by reference) can be produced. An immature embryo can also be a good target tissue for monocots for direct DNA delivery techniques by using the particle gun (Weeks et al. (1993) Plant Physiol 102:1077-1084; Vasil (1993) Bio/Technolo 10:667-674; Wan and Lemeaux (1994) Plant Physiol 104:37-48 and for Agrobacterium-mediated DNA transfer (Ishida et al. (1996) Nature Biotech 14:745-750), all incorporated herein by reference. Exemplary methods for introduction of DNA into chloroplasts are biolistic bombardment, polyethylene glycol transformation of protoplasts, and microinjection (Daniell et al. Nat. Biotechnol 16:345-348, 1998; Staub et al. Nat. Biotechnol 18:333-338, 2000; O'Neill et al. Plant J. 3:729-738, 1993; Knoblauch et al. Nat. Biotechnol 17:906-909; U.S. Pat. Nos. 5,451,513, 5,545,817, 5,545,818, and 5,576,198; in Intl. Application No. WO 95/16783; and in Boynton et al., Methods in Enzymology 217:510-536 (1993), Svab et al., Proc. Natl. Acad. Sci. USA 90:913-917 (1993), and McBride et al., Proc. Nati. Acad. Sci. USA 91:7301-7305 (1994), incorporated herein by reference). Any vector suitable for the methods of biolistic bombardment, polyethylene glycol transformation of protoplasts and microinjection will be suitable as a targeting vector for chloroplast transformation. Any double stranded DNA vector may be used as a transformation vector, especially when the method of introduction does not utilize Agrobacterium.

[0406] The present system and method may be used to modify a plant stem cell. The term “stem cell” is used herein to refer to a cell (e.g., plant stem cell) that has the ability both to self-renew and to generate a differentiated cell type (see Morrison et al. (1997) Cell 88:287-298, incorporated herein by reference). Stem cells may be characterized by both the presence of specific markers (e.g., proteins, RNAs, etc.) and the absence of specific markers. Stem cells may also be identified by functional assays both in vitro and in vivo, particularly assays relating to the ability of stem cells to give rise to multiple differentiated progeny. Stem cells of interest include pluripotent stem cells (PSCs). The term “pluripotent stem cell” or “PSC” is used herein to mean a stem cell capable of producing all cell types of the organism. Pluripotent stem cells of plants are capable of giving rise to all cell types of the plant (e.g., cells of the root, stem, leaves, etc.).

[0407] The present disclosure further provides progeny of a genetically modified cell, where the progeny can comprise the same genetic modification as the genetically modified cell from which it was derived. The present disclosure further provides a composition comprising a genetically modified cell.

[0408] In some embodiments, a genetically modified host cell can generate a genetically modified organism. For example, the genetically modified host cell is a pluripotent stem cell (i.e., PSC such as a pluripotent plant stem cell, etc.), it can generate a genetically modified organism. Methods of producing genetically modified organisms are known in the art. For example, see Husaini et al., GM Crops. 2011, 2 (3): 150-62, incorporated herein by reference.

[0409] The present systems and methods may be used for specific gene targeting and precise genome editing in plant and crop species. In one embodiment, the present systems and methods are adapted to use in plants. In one embodiment, a series of plant-specific RNA-guided Genome Editing vectors (pRGE plasmids) are provided for expression of the present system in plants. The plasmids may be optimized for transient expression of the present system in plant protoplasts, or for stable integration and expression in intact plants via the Agrobacterium-mediated transformation. In one aspect, the plasmid vector constructs include a nucleotide sequence comprising a DNA-dependent RNA polymerase III promoter, wherein said promoter operably linked to a gRNA molecule and a Pol III terminator sequence, wherein said gRNA molecule includes a DNA target sequence; and a nucleotide sequence comprising a DNA-dependent RNA polymerase II promoter operably linked to a nucleic acid sequence encoding a nuclease.

[0410] In certain embodiments, the present systems and methods use a monocot promoter to drive the expression of one or more components of the present systems (e.g., gRNA) in a monocot plant. In certain embodiments, the present systems and methods use a dicot promoter to drive the expression of one or more components of the present systems (e.g., gRNA) in a dicot plant. In one embodiment, the promoter is a rice UBI10 promoter (OsUBI10 promoter). See U.S. Patent Publication No. 20150067922, incorporated herein by reference.

[0411] In one embodiment, the present system is transiently expressed in plant protoplasts. Vectors for transient transformation of plants include, but are not limited to, pRGE3, pRGE6, pRGE31, and pRGE32. In one embodiment, the vector may be optimized for use in a particular plant type or species, such as pStGE3.

[0412] In one embodiment, the present system may be stably integrated into the plant genome, for example via Agrobacterium-mediated transformation. Thereafter, one or more components of the present system (e.g., the transgene) may be removed by genetic cross and segregation, which may lead to the production of non-transgenic, but genetically modified plants or crops. In one embodiment, the vector is optimized for Agrobacterium-mediated transformation. In one embodiment, the vector for stable integration is pRGEB3, pRGEB6, pRGEB31, pRGEB32, or pStGEB3.

[0413] In one aspect, gene editing may be obtained using the present systems and methods via deletion or insertion. In another aspect, a donor DNA fragment with positive (e.g., herbicide or antibiotic resistance) and/or negative (e.g., toxin genes) selection markers could be co-introduced with the present system into plant cells for targeted gene repair/correction and knock-in (gene insertion and replacement). In combination with different donor DNA fragments, the present system can be used to modify various agronomic traits for genetic improvement.

[0414] Nucleic acids introduced into a plant cell can be used to confer desired traits on essentially any plant. The present systems and methods can produce genetically engineered plants. A gRNA can be designed to specifically target any plant genes or DNA sequences. The ability to efficiently and specifically create targeted mutations in the plant genome greatly facilitates the development of many new crop cultivars with improved or novel agronomic traits. These include, but not limited to, disease resistant crops by targeted mutation of disease susceptibility genes or genes encoding negative regulators (e.g., Mlo gene) of plant defense genes, drought and salt tolerant crops by targeted mutation of genes encoding negative regulators of abiotic stress tolerance, low amylose grains by targeted mutation of Waxy gene, rice or other grains with reduced rancidity by targeted mutation of major lipase genes in aleurone layer, etc.

[0415] As used herein, genetically modified plants include a plant into which has been introduced an exogenous polynucleotide. Genetically modified plants also include a plant that has been genetically manipulated such that endogenous nucleotides have been altered to include a mutation, such as a deletion, an insertion, a transition, a transversion, or a combination thereof. For instance, an endogenous coding region could be deleted. Such mutations may result in a polypeptide having a different amino acid sequence than was encoded by the endogenous polynucleotide. Another example of a genetically modified plant is one having an altered regulatory sequence, such as a promoter, to result in increased or decreased expression of an operably linked endogenous coding region.

[0416] The present disclosure provides for systems and methods for transient expression or stable integration of the transgenes encoding one or more components of the present system for plants.

[0417] DNA constructs may be introduced into the genome of a desired plant host by a variety of conventional techniques. For reviews of such techniques see, for example, Weissbach & Weissbach Methods for Plant Molecular Biology (1988, Academic Press, N. Y.) Section VIII, pp. 421-463; and Grierson & Corey, Plant Molecular Biology (1988, 2d Ed.), Blackie, London, Ch. 7-9, incorporated herein by reference. For example, the DNA construct may be introduced directly into the genomic DNA of the plant cell using techniques such as electroporation and microinjection of plant cell protoplasts, or the DNA constructs can be introduced directly to plant tissue using biolistic methods, such as DNA particle bombardment (see, e.g., Klein et al (1987) Nature 327:70-73, incorporated herein by reference). Alternatively, the DNA constructs may be combined with suitable T-DNA flanking regions and introduced into a conventional Agrobacterium tumefaciens host vector. Agrobacterium tumefaciens-mediated transformation techniques, including disarming and use of binary vectors, are well described in the scientific literature. See, for example Horsch et al (1984) Science 233:496-498, and Fraley et al (1983) Proc. Nat'l. Acad. Sci. USA 80:4803, incorporated herein by reference. The virulence functions of the Agrobacterium tumefaciens host will direct the insertion of the construct and adjacent marker into the plant cell DNA when the cell is infected by the bacteria using binary T DNA vector (Bevan (1984) Nuc. Acid Res. 12:8711-8721, incorporated herein by reference) or the co-cultivation procedure (Horsch et al (1985) Science 227:1229-1231, incorporated herein by reference). Generally, the Agrobacterium transformation system may be used to engineer dicotyledonous plants (Bevan et al (1982) Ann. Rev. Genet 16:357-384; Rogers et al (1986) Methods Enzymol. 118:627-641, incorporated herein by reference). The Agrobacterium transformation system may also be used to transform, as well as transfer, DNA to monocotyledonous plants and plant cells. See Hernalsteen et al (1984) EMBO J 3:3039-3041; Hooykass-Van Slogteren et al (1984) Nature 311:763-764; Grimsley et al (1987) Nature 325:1677-179; Boulton et al (1989) Plant Mol. Biol. 12:31-40; and Gould et al (1991) Plant Physiol. 95:426-434, all incorporated herein by reference.

[0418] Alternative gene transfer and transformation methods include, but are not limited to, protoplast transformation through calcium-, polyethylene glycol (PEG)- or electroporation-mediated uptake of naked DNA (see Paszkowski et al. (1984) EMBO J3: 2717-2722, Potrykus et al. (1985) Molec. Gen. Genet. 199:169-177; Fromm et al. (1985) Proc. Nat. Acad. Sci. USA 82:5824-5828; and Shimamoto (1989) Nature 338:274-276, all incorporated herein by reference) and electroporation of plant tissues (D'Halluin et al. (1992) Plant Cell 4:1495-1505, incorporated herein by reference). Additional methods for plant cell transformation include microinjection, silicon carbide mediated DNA uptake (Kaeppler et al. (1990) Plant Cell Reporter 9:415-418, incorporated herein by reference), and microprojectile bombardment (see Klein et al. (1988) Proc. Nat. Acad. Sci. USA 85:4305-4309; and Gordon-Kamm et al. (1990) Plant Cell 2:603-618, all incorporated herein by reference).

[0419] The present systems and methods can be used to insert exogenous sequences into a predetermined location in a plant cell genome. Accordingly, genes encoding, e.g., nutrients, antibiotics or therapeutic molecules can be inserted, by targeted recombination, into regions of a plant genome favorable to their expression.

[0420] Transformed plant cells which are produced by any of the above transformation techniques can be cultured to regenerate a whole plant which possesses the transformed genotype and thus the desired phenotype. Such regeneration techniques rely on manipulation of certain phytohormones in a tissue culture growth medium, typically relying on a biocide and/or herbicide marker which has been introduced together with the desired nucleotide sequences. Plant regeneration from cultured protoplasts is described in Evans, et al., “Protoplasts Isolation and Culture” in Handbook of Plant Cell Culture, pp. 124-176, Macmillian Publishing Company, New York, 1983; and Binding, Regeneration of Plants, Plant Protoplasts, pp. 21-73, CRC Press, Boca Raton, 1985, incorporated herein by reference. Regeneration can also be obtained from plant callus, explants, organs, pollens, embryos or parts thereof. Such regeneration techniques are described generally in Klee et al (1987) Ann. Rev. of Plant Phys. 38:467-486, incorporated herein by reference.

[0421] A transformed or genetically modified cell, callus, tissue, or plant can be identified and isolated by selecting or screening the engineered cells for particular traits or activities, e.g., those encoded by marker genes or antibiotic resistance genes. Such screening and selection methodologies are well known to those having ordinary skill in the art. Polynucleotides that are stably incorporated into plant cells can be introduced into other plants using, for example, standard breeding techniques.

[0422] A transformed plant cell, callus, tissue or plant may be identified and isolated by selecting or screening the engineered plant material for traits encoded by the marker genes present on the transforming DNA. For instance, selection may be performed by growing the engineered plant material on media containing an inhibitory amount of the antibiotic or herbicide to which the transforming gene construct confers resistance. Further, transformed plants and plant cells may also be identified by screening for the activities of any visible marker genes (e.g., the beta-glucuronidase, luciferase, B or C1 genes) that may be present on the recombinant nucleic acid constructs. Such selection and screening methodologies are well known to those skilled in the art.

[0423] Physical and biochemical methods also may be used to identify plant or plant cell transformants containing inserted gene constructs. These methods include but are not limited to: 1) Southern analysis or PCR amplification for detecting and determining the structure of the recombinant DNA insert; 2) Northern blot, S1 RNase protection, primer-extension or reverse transcriptase-PCR amplification for detecting and examining RNA transcripts of the gene constructs; 3) enzymatic assays for detecting enzyme or ribozyme activity, where such gene products are encoded by the gene construct; 4) protein gel electrophoresis, Western blot techniques, immunoprecipitation, or enzyme-linked immunoassays, where the gene construct products are proteins. Additional techniques, such as in situ hybridization, enzyme staining, and immunostaining, also may be used to detect the presence or expression of the recombinant construct in specific plant organs and tissues. The methods for doing all these assays are well known to those skilled in the art.

[0424] Effects of gene manipulation using the methods disclosed herein can be observed by, for example, northern blots of the RNA (e.g., mRNA) isolated from the tissues of interest. Typically, if the amount of mRNA has increased, it can be assumed that the corresponding endogenous gene is being expressed at a greater rate than before. Other methods of measuring gene and/or CYP74B activity can be used. Different types of enzymatic assays can be used, depending on the substrate used and the method of detecting the increase or decrease of a reaction product or by-product. In addition, the levels of and/or CYP74B protein expressed can be measured immunochemically, i.e., ELISA, RIA, EIA and other antibody-based assays well known to those of skill in the art, such as by electrophoretic detection assays (either with staining or western blotting). The transgene may be selectively expressed in some tissues of the plant or at some developmental stages, or the transgene may be expressed in substantially all plant tissues, substantially along its entire life cycle. However, any combinatorial expression mode is also applicable.

[0425] In one aspect, vectors are provided for the Agrobacterium-mediated transient expression or stable transformation in tissue cultures or plant tissues. In particular the plasmid vectors for transient expression in plants, plant protoplasts, tissue cultures or plant tissues contain: (1) a DNA-dependent RNA polymerase III (Pol III) promoter (for example, rice snoRNA U3 or U6 promoter) to control the expression of engineered gRNA molecules in the plant cell, where the transcription was terminated by a Pol III terminator (Pol III Term), (2) a DNA-dependent RNA polymerase II (Pol II) promoter (e. g., 35S promoter) to control the expression of one or more proteins/enzymes; (3) a multiple cloning site (MCS) used to insert a DNA sequence encoding a gRNA.

[0426] In certain embodiments, to facilitate the Agrobacterium-mediated transformation, binary vectors are provided, wherein the engineered transposon-encoded CRISPR-Cas system cassettes from the plant transient expression plasmid vectors are inserted into an Agrobacterium transformation vector, for example the pCAMBIA 1300 vector.

[0427] In one embodiment, the present system is transiently expressed in plant protoplasts and are not integrated into the genome. For plant species or cultivars that can be regenerated from protoplasts, sequences encoding the components of the present system can be introduced into the binary vectors, such as, for example, the pRGEB32 and pStGEB3 vectors. In one embodiment, the resulting transgenic crop may be backcrossed with wildtype plants to remove the transgene for producing non-transgenic cultivars. In one embodiment, herbicide-tolerant crops can be generated by substitutions of specific nucleotides in plant genes such as those encoding acetolactate synthase (ALS) and protoporphyrinogen oxidase (PPO).

[0428] The present systems and methods may be specific for one target site, or may be specific for 2, 3, 4, 5, 6, 7, 8, 9, 10 or more target sites.

b. Animal

[0429] The present invention relates to systems and methods for genetic engineering in animal genomes using engineered transposon-encoded CRISPR (cluster regularly interspaced short palindromic repeats)-Cas system. Genetically modified animals can be produced using these systems and methods.

[0430] As used herein, genetically modified animals include an animal into which has been introduced an exogenous polynucleotide. Genetically modified animals also include an animal that has been genetically manipulated such that endogenous nucleotides have been altered to include a mutation, such as a deletion, an insertion, a transition, a transversion, or a combination thereof. For instance, an endogenous coding region could be deleted. Such mutations may result in a polypeptide having a different amino acid sequence than was encoded by the endogenous polynucleotide. Another example of a genetically modified animal is one having an altered regulatory sequence, such as a promoter, to result in increased or decreased expression of an operably linked endogenous coding region.

[0431] Non-limiting examples of animals that may be genetically modified using the present systems and methods include: mammals such as primates (e.g., ape, chimpanzee, macaque), rodents (e.g., mouse, rabbit, rat), canine or dog, livestock (cow/bovine, donkey, sheep/ovine, goat or pig), fowl or poultry (e.g., chicken), and fish (e.g., zebra fish). The present methods and systems may be used in other eukaryotic model organisms, e.g. Drosophila, C. elegans, etc.

[0432] In certain embodiments, the mammal is a human, a non-human primate (e.g., marmoset, rhesus monkey, chimpanzee), a rodent (e.g., mouse, rat, gerbil, Guinea pig, hamster, cotton rat, naked mole rat), a rabbit, a livestock animal (e.g., goat, sheep, pig, cow, cattle, buffalo, horse, camelid), a pet mammal (e.g., dog, cat), a zoo mammal, a marsupial, an endangered mammal, and an outbred or a random bred population thereof.

[0433] The term “livestock animal” includes animals traditionally raised in livestock farming, such as cattle (e.g., beef cattle, dairy cattle), pigs, sheep, goats, horses, mules, buffalo, and camels. The term also includes birds raised commercially for meat or eggs (i.e., chickens, turkeys, ducks, geese, guinea fowl, and squabs).

[0434] The present cells, tissues and organs may be used for transplantation, such as xenograft. The graft may comprise cells, a tissue or an organ. In one embodiment, the graft comprises hematopoietic stem cells. In another embodiment, the graft comprises bone marrow. In yet another embodiment, the graft comprises a heart, a kidney, a liver, a pancreas, a lung, an intestine, skin, a small bowel, a trachea, a cornea, or combinations thereof.

[0435] The present disclosure provides for an engineered transposon-encoded CRISPR-Cas system for RNA-guided DNA integration in an animal cell, comprising: (i) at least one Cas protein, (ii) a guide RNA (gRNA), and (iii) a Tn7-like transposon system.

[0436] Also encompassed by the present disclosure is a system for RNA-guided DNA integration in an animal cell, comprising: (i) one or more vectors encoding an engineered CRISPR-Cas system, wherein the CRISPR-Cas system comprises: (a) at least one Cas protein, and (b) a guide RNA (gRNA); and (ii) one or more vectors encoding a Tn7-like transposon system, wherein the CRISPR-Cas system and the transposon system are on same or different vector(s).

[0437] The present disclosure provides for an engineered transposon-encoded CRISPR-Cas system for RNA-guided DNA integration in an animal cell, comprising: (i) at least one Cas protein, (ii) a guide RNA (gRNA), and (iii) an engineered transposon system.

[0438] The present disclosure also provides for a system for RNA-guided DNA integration in an animal cell, comprising: (i) one or more vectors encoding an engineered CRISPR-Cas system, wherein the CRISPR-Cas system comprises: (a) at least one Cas protein, and (b) a guide RNA (gRNA); and (ii) one or more vectors encoding an engineered transposon system, wherein the CRISPR-Cas system and the transposon system are on same or different vector(s).

[0439] The present disclosure provides for a method for RNA-guided DNA integration in an animal cell, the method comprising introducing into the animal cell an engineered transposon-encoded CRISPR-Cas system, wherein the transposon-encoded CRISPR-Cas system comprises: (i) at least one Cas protein, (ii) a guide RNA (gRNA) specific for a target site, (iii) an engineered transposon system, and (iv) a donor DNA, wherein the transposon-encoded CRISPR-Cas system integrates the donor DNA proximal to the target site.

[0440] The system and methods may further comprise a donor DNA. The donor DNA comprises a cargo nucleic acid and transposon end sequences. The transposon-encoded CRISPR-Cas system may integrate the donor DNA into the genome of the plant cell.

[0441] The cargo nucleic acid may be flanked by transposon end sequences. The integration may be about 46-bp to 55-bp downstream of the target site. The integration may be about 47-bp to 51-bp downstream of the target site.

[0442] The target site may be flanked by a protospacer adjacent motif (PAM).

[0443] The transposon system may be a bacterial Tn7-like transposon system. Tn7 may transpose via a cut-and-paste mechanism, Class II. Choi et al. PNAS 110 (22): E2038-E2045 (2013); Ivics et al. Nature Methods 6 (6): 415-422 (2009). The Tn7-like transposon system may be derived from Vibrio cholerae, Vibrio cholerae, Photobacterium iliopiscarium, Pseudoalteromonas sp. P1-25, Pseudoalteromonas ruthenica, Photobacterium ganghwense, Shewanella sp. UCD-KL21, Vibrio diazotrophicus, Vibrio sp. 16, Vibrio sp. F12, Vibrio splendidus, Aliivibrio wodanis, and Parashewanella spongiae. The engineered transposon-encoded CRISPR-Cas system may be from a bacteria selected from the group consisting of: Vibrio cholerae strain 4874, Photobacterium iliopiscarium strain NCIMB, Pseudoalteromonas sp. P1-25, Pseudoalteromonas ruthenica strain S3245, Photobacterium ganghwense strain JCM, Shewanella sp. UCD-KL21, Vibrio cholerae strain OYP7G04, Vibrio cholerae strain M1517, Vibrio diazotrophicus strain 60.6F, Vibrio sp. 16, Vibrio sp. F12, Vibrio splendidus strain UCD-SED10, Aliivibrio wodanis 06/09/160, and Parashewanella spongiae strain HJ039. In one embodiment, the Tn7-like transposon system is derived from Vibrio cholerae Tn6677. The system can encompass gain-of-function Tn7 mutants (Lu et al. EMBO 19 (13): 3446-3457 (2000); U.S. Patent Publication No. 20020188105) as well as replicative Tn7 transposition mutants (May et al. Science 272:401-404 (1996)).

[0444] The transposon system may comprise TnsD or TniQ. The present system may comprise TnsA, TnsB and TnsC. The present system may comprise TnsB and TnsC.

[0445] The system may be derived from a Class 1 CRISPR-Cas system. The present system may be derived from a Class 2 CRISPR-Cas system. The present system may be derived from a Type I CRISPR-Cas system. The present system may be derived from a Type V CRISPR-Cas system.

[0446] The present system may be nuclease-deficient. The present system may comprise Cas6, Cas7, Cas8 and Cas5. Cas8 and Cas5 may be a fusion protein. The system may comprise a Cascade complex. The present system may comprise C2c5 (Cas12k).

[0447] The present disclosure provides for a modified animal cell produced by the present system and method, an animal comprising the animal cell, a population of cells comprising the cell, tissues, and at least one organ of the animal. The present disclosure further encompasses the progeny, clones, cell lines or cells of the genetically modified animal.

[0448] The present disclosure provides a genetically modified animal. The genetically modified animal may be homozygous or heterozygous for the genetic modification.

[0449] Non-limiting examples of animals that may be genetically modified using the present systems and methods include: mammals such as primates (e.g., ape, chimpanzee, macaque), rodents (e.g., mouse, rabbit, rat), canine or dog, livestock (cow/bovine, sheep/ovine, goat or pig), fowl or poultry (e.g., chicken), and fish (e.g., zebra fish).

[0450] In certain embodiments, the mammal is a human, a non-human primate (e.g., marmoset, rhesus monkey, chimpanzee), a rodent (e.g., mouse, rat, gerbil, Guinea pig, hamster, cotton rat, naked mole rat), a rabbit, a livestock animal (e.g., goat, sheep, pig, cow, cattle, horse, camelid), a pet mammal (e.g., dog, cat), a zoo mammal, a marsupial, an endangered mammal, and an outbred or a random bred population thereof.

[0451] The term “livestock animal” includes animals traditionally raised in livestock farming, such as cattle (e.g., beef cattle, dairy cattle), pigs, sheep, goats, horses, mules, buffalo, and camels. The term also includes birds raised commercially for meat or eggs (i.e., chickens, turkeys, ducks, geese, guinea fowl, and squabs).

[0452] The present cells, tissues and organs may be used for transplantation, such as xenograft. The graft may comprise cells, a tissue or an organ. In one embodiment, the graft comprises hematopoietic stem cells. In another embodiment, the graft comprises bone marrow. In yet another embodiment, the graft comprises a heart, a kidney, a liver, a pancreas, a lung, an intestine, skin, a small bowel, a trachea, a cornea, or combinations thereof.

[0453] The present system and method may be used to modify a stem cell. The term “stem cell” is used herein to refer to a cell that has the ability both to self-renew and to generate a differentiated cell type (see Morrison et al. (1997) Cell 88:287-298, incorporated herein by reference). Stem cells may be characterized by both the presence of specific markers (e.g., proteins, RNAs, etc.) and the absence of specific markers. Stem cells may also be identified by functional assays both in vitro and in vivo, particularly assays relating to the ability of stem cells to give rise to multiple differentiated progeny. Stem cells of interest include pluripotent stem cells (PSCs). The term “pluripotent stem cell” or “PSC” is used herein to mean a stem cell capable of producing all cell types of the organism.

[0454] The present disclosure further provides progeny of a genetically modified cell, where the progeny can comprise the same genetic modification as the genetically modified cell from which it was derived. The present disclosure further provides a composition comprising a genetically modified cell.

[0455] In some embodiments, a genetically modified host cell can generate a genetically modified organism. For example, the genetically modified host cell is a pluripotent stem cell, it can generate a genetically modified organism. Methods of producing genetically modified organisms are known in the art.

[0456] As used herein, genetically modified animals include an animal into which has been introduced an exogenous polynucleotide. Genetically modified animals also include an animal that has been genetically manipulated such that endogenous nucleotides have been altered to include a mutation, such as a deletion, an insertion, a transition, a transversion, or a combination thereof. For instance, an endogenous coding region could be deleted. Such mutations may result in a polypeptide having a different amino acid sequence than was encoded by the endogenous polynucleotide. Another example of a genetically modified animal is one having an altered regulatory sequence, such as a promoter, to result in increased or decreased expression of an operably linked endogenous coding region.

[0457] The present disclosure provides for systems and methods for transient expression or stable integration of the transgenes encoding one or more components of the present system for animals.

[0458] The present systems and methods may be specific for one target site, or may be specific for 2, 3, 4, 5, 6, 7, 8, 9, 10 or more target sites.

[0459] Genetic modification may be assessed using techniques that include, for example, Northern blot analysis of tissue samples obtained from the animal, in situ hybridization analysis, Western analysis, immunoassays such as enzyme-linked immunosorbent assays, and reverse-transcriptase PCR (RT-PCR).

[0460] Mammalian expression plasmids may be used for all the necessary components (all genes and the gRNA). Any suitable drug selection or fluorescence-based sorting strategies for identifying cells which underwent targeted integration may be used. The expression plasmids may contain components, such as nuclear localization signals, mammalian promoters, etc.

[0461] Gene integration with CRISPR-Cas9 requires introduction of DSBs and the use of synthetic repair donor templates carrying appropriate designed homology arms. Homology donors work with the highest efficiency when supplied as recombinant AAV vectors or ssDNA, but these are also extremely laborious to produce [see e.g. H. Li, M. D. Leonetti, BioRxiv, 1-24 (2017)]. Furthermore, cloning of dsDNA donor templates with homology arms can be time-consuming and tedious. In contrast, the disclosed system would obviate the need for homology arms redesigned for every new target site, because the targeting would come exclusively from the guide RNA, and the same donor could be used for any arbitrary target site.

[0462] Gene integration with CRISPR-Cas9 and donor templates relies on homology-directed repair (HDR) for proper integration of the donor template. However, HDR efficiencies are known to be extremely low in many different cell types, and the DSBs that precede HDR are always repaired in heterogeneous ways across a cell population: some cells undergo HDR at one or both alleles, whereas far more cells undergo non-homologous end joining (NHEJ) at one or both alleles, which leads to small insertions or deletions being introduced at the target site [reviewed in: K. S. Pawelczak, N. S. Gavande, P. S. VanderVere-Carozza, J. J. Turchi, ACS Chem Biol. 13, 389-396 (2018), incorporated herein by reference]. This means that, across a cell population (e.g. as would be edited in a therapeutic or experimental application), only a small percentage of cells undergo the desired site-specific gene integration, whereas a far greater percentage undergoes heterogeneous repairs. In contrast, the RNA-guided transposase mechanism for gene integration would not proceed through a DSB intermediate, and thus would not allow for NHEJ-mediate insertions or deletions to arise; rather, targeting of the DNA leads to direct integration coincident with nucleolytic breakage of the phosphodiester bonds on the target DNA, such that targeting involves direct integration without any other off-pathway alternatives.

[0463] The endogenous machinery for HDR is virtually absent in post-mitotic cells (i.e. non-dividing cells, which do not undergo DNA replication), such as neurons and terminally differentiated cells. Thus, there are no options for precise, targeted gene integration in these cell types. The present RNA-guided transposase system/mechanism, on the other hand, would still be readily available as a DNA integration strategy in these cell types.

[0464] DSBs, which are necessary precursors for CRISPR-Cas9 mediated HDR pathways for gene integration, are known to pose hazards for cells. DSBs at off-target sites introduce off-target mutations; DSBs can provoke a DNA damage response [E. Haapaniemi, S. Botla, J. Persson, B. Schmierer, J. Taipale, Nat. Med. 24, 927-930 (2018), incorporated herein by reference]; DSBs can lead to selection for p53 null cells, which have increased risk of tumorigenesis [R. J. Ihry et al., Nat. Med. 24, 939-946 (2018), incorporated herein by reference]; and DSB repair at on-target sites can cause large-scale gene deletions, inversions, or chromosome translocations [M. Kosicki, K. Tomberg, A. Bradley, Nat Biotechnol. 36, 765-771 (2018), incorporated herein by reference].

c. Treating a Disease or Condition

[0465] The methods described here also provide for treating a disease or condition in a subject. The method may comprise administering to the subject, in vivo, or by transplantation of ex vivo treated cells, a therapeutically effective amount of one or more vectors encoding the present system or the self-transposable nucleic acid sequence. The method may comprise administering the present pharmaceutical compositions to the subject.

[0466] A “subject” or “patient” may be human or non-human and may include, for example, animal strains or species used as “model systems” for research purposes, such a mouse model as described herein. Likewise, patient may include either adults or juveniles (e.g., children). Moreover, patient may mean any living organism, preferably a mammal (e.g., human or non-human) that may benefit from the administration of compositions contemplated herein. Examples of mammals include, but are not limited to, any member of the Mammalian class: humans, non-human primates such as chimpanzees, and other apes and monkey species; farm animals such as cattle, horses, sheep, goats, swine; domestic animals such as rabbits, dogs, and cats; laboratory animals including rodents, such as rats, mice and guinea pigs, and the like. Examples of non-mammals include, but are not limited to, birds, fish and the like. In one embodiment of the methods and compositions provided herein, the mammal is a human. The subject may comprise the subject's cells and any cells of the microbiome of the subject.

[0467] In some embodiments, the compositions are used to treat a pathogen or parasite on or in a subject by altering the pathogen or parasite. Monogenic diseases include, but are not limited to, (disease (exemplary target gene)): Stargardt Disease (ABCA4), Usher Syndrome (MYO7A), Choroideremia (REP1), Achromatopsia (CNGB3), X-Linked Retinoschisis (RS1), beta-thalassemia (HBB), Sickle Cell Disease (HBB), Hemophilia (Factor IX), Wiskott-Aldrich Syndrome (WAS), X-linked Chronic Granulomatous Disease (CYBB), Mucopolysaccharidosis IIIB (NAGLU), Aromatic L-amino Acid Decarboxylase Deficiency (DDC), Recessive Dystrophic Epidermolysis Bullosa (COL7A1), Mucopolysaccharidosis Type 1 (IDUA), Alpha 1 Antitrypsin Deficiency (SERPINA1), Homozygous Familial Hypercholesterolemia (LDLR), Hutchinson-Gilford progeria syndrome (LMNA), Achondroplasia (FGFR3), MECP2 duplication syndrome (MECP2), Pendred syndrome (PDS), Leber hereditary optic neuropathy (MT-ND1-ND4, ND4L, ND6), Noonan syndrome (PTPN11, SOS1, RAF1, KRAS), Congenital myasthenic syndrome (RAPSN, CHAT, COLQ, DOK7), and Hereditary hemorrhagic telangiectasia (ACVRL1, ENG, SMAD4). The present systems and methods may be used in cancer, Duchenne muscular dystrophy (DMD), sickle cell disease (SCD), β-thalassemia, hereditary tyrosinemia type I (HT1), Leber congenital amaurosis and other forms of inherited/genetic blindness, retinal disease (e.g. choroideremia), haemophilia, severe combined immune deficiency (SCID), adenosine deaminase (ADA) deficiency, Parkinson's disease, and cystic fibrosis.

[0468] The present systems and methods may be used for gene inactivation. Gene inactivation may be used for therapies (such as cancer therapy), slowing or preventing aging, genetic analysis, etc.

[0469] The present systems and methods may be used in cancer immunotherapy, such as CAR-T therapy, in which chimeric antigen receptors are integrated into T cells designed to recognize particular epitopes particular to certain cancer types (June et al., N. Engl. J. Med. 379, 64-73 (2018), incorporated herein by reference). Recent work has shown that CAR-T cells have increased efficacy when the CAR gene is integrated into defined sites in the genome, rather than random sites (Eyquem et al., Nature. 543, 113-117 (2017), incorporated herein by reference). The present method offers a safer alternative to generate these kinds of gene products than existing, low efficiency methods that rely on DSBs and HDR.

[0470] The present disclosure provides for gene editing methods that can ablate a disease-associated gene (e.g. an oncogene), which in turn can be used for in vivo gene therapy for patients. In some embodiments, the gene editing methods disrupt the pathogenic expression of a disease-associated gene (e.g. an oncogene). In some embodiments, the gene editing methods include donor nucleic acids comprising therapeutic genes. The donor nucleic acid may be selected from modified herpes simplex 1 virus, lipoprotein lipase, beta globin, and Factor IX, adenosine deaminase.

[0471] The present systems and methods may be used to deliver an expressible therapeutic molecule, such as a protein, nucleic acid, antibody, or the like to a cell or subject. For example, a promoter (inducible or constitutive) may be linked to a therapeutic nucleic acid (e.g., antisense oligonucleotide, miRNA, etc.) and integrated into a cell so that the cell expressed the therapeutic molecule. Such approaches find use for treating diseases such as cancer, cytomegalovirus retinitis, familiar hypercholesterolemia, hemorrhagic fever viruses, HIV/AIDS, spinal muscular atrophy, Duchenne muscular dystrophy, and hypertriglyceridemia.

[0472] In one embodiment, the disclosure provides for introducing one or more vectors encoding the present system or self-transposable nucleic acid sequence into a eukaryotic cell. The cell can be a mitotic and/or post-mitotic cell from any eukaryotic cell or organism (e.g. a cell of a single-cell eukaryotic organism, a plant cell, an algal cell, a fungal cell (e.g., a yeast cell), an animal cell, a cell from an invertebrate animal (e.g. fruit fly, cnidarian, echinoderm, nematode, an insect, an arachnid, etc.), a cell from a vertebrate animal (e.g., fish, amphibian, reptile, bird, mammal), a cell from a mammal, a cell from a rodent, a cell from a human, etc.), or a protozoan cell. Any type of cell may be of interest (e.g. a stem cell, e.g. an embryonic stem (ES) cell, an induced pluripotent stem (iPS) cell, a germ cell; a somatic cell, e.g. a fibroblast, a hematopoietic cell, a neuron, a muscle cell, a bone cell, a hepatocyte, a pancreatic cell, a liver cell, a lung cell, a skin cell; an in vitro or in vivo embryonic cell of an embryo at any stage, e.g., a 1-cell, 2-cell, 4-cell, 8-cell, etc. stage zebrafish embryo; etc.). Cells may be from established cell lines or they may be primary cells, where “primary cells”, “primary cell lines”, and “primary cultures” are used interchangeably herein to refer to cells and cells cultures that have been derived from a subject and allowed to grow in vitro for a limited number of passages, i.e. splitting of the culture. For example, primary cultures are cultures that may have been passaged 0 times, 1 time, 2 times, 4 times, 5 times, 10 times, or 15 times, but not enough times go through the crisis stage. In some cases, the primary cell lines are maintained for fewer than 10 passages in vitro. Target cells are in some cases unicellular organisms or are grown in culture.

[0473] If the cells are primary cells, they may be harvest from an individual by any convenient method. For example, leukocytes may be conveniently harvested by apheresis, leukocytapheresis, density gradient separation, etc., while cells from tissues such as skin, muscle, bone marrow, spleen, liver, pancreas, lung, intestine, stomach, etc. are most conveniently harvested by biopsy. An appropriate solution may be used for dispersion or suspension of the harvested cells. Such solution will generally be a balanced salt solution, e.g. normal saline, phosphate-buffered saline (PBS), Hank's balanced salt solution, etc., conveniently supplemented with fetal calf serum or other naturally occurring factors, in conjunction with an acceptable buffer at low concentration. The cells may be used immediately, or they may be stored, frozen, for long periods of time, being thawed and capable of being reused. In such cases, the cells will usually be frozen in 10% or more DMSO, 50% or more serum, and about 40% buffered medium, or some other such solution as is commonly used in the art to preserve cells at such freezing temperatures, and thawed in a manner as commonly known in the art for thawing frozen cultured cells.

[0474] The cell can be a cancer cell. The cell can be a stem cell. Examples of stem cells include pluripotent, multipotent and unipotent stem cells. Examples of pluripotent stem cells include embryonic stem cells, embryonic germ cells, embryonic carcinoma cells and induced pluripotent stem cells (iPSCs). The cell may be an induced pluripotent stem cell (iPSC), e.g., derived from a fibroblast of a subject. In another embodiment, the cell can be a fibroblast.

[0475] Cell replacement therapy can be used to prevent, correct or treat a disease or condition, where the methods of the present disclosure are applied to isolated patient's cells (ex vivo), which is then followed by the administration of the genetically modified cells into the patient.

[0476] The cell may be autologous or allogeneic to the subject who is administered the cell. As described herein, the genetically modified cells may be autologous to the subject, i.e., the cells are obtained from the subject in need of the treatment, genetically engineered, and then administered to the same subject. Alternatively, the host cells are allogeneic cells, i.e., the cells are obtained from a first subject, genetically engineered, and administered to a second subject that is different from the first subject but of the same species. In some embodiments, the genetically modified cells are allogeneic cells and have been further genetically engineered to reduced graft-versus-host disease.

[0477] “Induced pluripotent stem cells,” commonly abbreviated as iPS cells or iPSCs, refer to a type of pluripotent stem cell artificially prepared from a non-pluripotent cell, typically an adult somatic cell, or terminally differentiated cell, such as a fibroblast, a hematopoietic cell, a myocyte, a neuron, an epidermal cell, or the like, by introducing certain factors, referred to as reprogramming factors.

[0478] The present methods may further comprise differentiating the iPS cell to a differentiated cell. For example, patient fibroblast cells can be collected from the skin biopsy and transformed into iPS cells. See, for example, Dimos J T et al. (2008) Science 321:1218-1221; Nature Reviews Neurology 4, 582-583 (November 2008) and Luo et al., Tohoku J. Exp. Med. 2012, 226 (2): 151-9, both incorporated herein by reference. The genetic modification by the present systems and methods can be done at this stage. The corrected cell clone can be screened and selected. The corrected cell clone may be then differentiated and tested. Differentiated cells can be transplanted autologously back to the donor patient.

[0479] The corrected cells for cell therapy to be administered to a subject described in the present disclosure may be formulated with a pharmaceutically acceptable carrier. For example, cells can be administered alone or as a component of a pharmaceutical formulation. The cells can be administered in combination with one or more pharmaceutically acceptable sterile isotonic aqueous or nonaqueous solutions (e.g., balanced salt solution (BSS)), dispersions, suspensions or emulsions, or sterile powders which may be reconstituted into sterile injectable solutions or dispersions just prior to use, which may contain antioxidants, buffers, bacteriostats, solutes or suspending or thickening agents.

[0480] The term “autologous” refers to any material derived from the same individual to whom it is later to be re-introduced into the same individual.

[0481] The term “allogeneic” refers to any material derived from a different animal of the same species as the individual to whom the material is introduced. Two or more individuals of the same species are said to be allogeneic to one another.

[0482] The present systems and methods may be used to treat cancers, including without limitation, lung cancer, ear, nose and throat cancer, colon cancer, melanoma, pancreatic cancer, mammary cancer, prostate cancer, breast cancer, ovarian cancer, basal cell carcinoma, biliary tract cancer; hematopoietic cancers, bladder cancer; bone cancer; breast cancer; cervical cancer; choriocarcinoma; colon and rectum cancer; connective tissue cancer; cancer of the digestive system; endometrial cancer; esophageal cancer; eye cancer; cancer of the head and neck; gastric cancer; intra-epithelial neoplasm; kidney cancer; larynx cancer; liver cancer; fibroma, neuroblastoma; oral cavity cancer (e.g., lip, tongue, mouth, and pharynx); ovarian cancer; pancreatic cancer; prostate cancer; retinoblastoma; rhabdomyosarcoma; rectal cancer; renal cancer; cancer of the respiratory system; sarcoma; skin cancer; stomach cancer; testicular cancer; thyroid cancer; uterine cancer; cancer of the urinary system, as well as other carcinomas and sarcomas.

[0483] Carcinomas are cancers of epithelial origin. Carcinomas intended for treatment with the methods of the present disclosure include, but are not limited to, acinar carcinoma, acinous carcinoma, alveolar adenocarcinoma (also called adenocystic carcinoma, adenomyoepithelioina, cribriform carcinoma and cylindroma), carcinoma adenomatosum, adenocarcinoma, carcinoma of adrenal cortex, alveolar carcinoma, alveolar cell carcinoma (also called bronchiolar carcinoma, alveolar cell tumor and pulmonary adenomatosis), basal cell carcinoma, carcinoma basocellulare (also called basaloma, or basiloma, and hair matrix carcinoma), basaloid carcinoma, basosquamous cell carcinoma, breast carcinoma, bronchioalveolar carcinoma, bronchiolar carcinoma, bronchogenic carcinoma, cerebriform carcinoma, cholangiocellular carcinoma (also called cholangioma and cholangiocarcinoma), chorionic carcinoma, colloid carcinoma, comedo carcinoma, corpus carcinoma, cribriform carcinoma, carcinoma en cuirasse, carcinoma cutaneum, cylindrical carcinoma, cylindrical cell carcinoma, duct carcinoma, carcinoma durum, embryonal carcinoma, encephaloid carcinoma, epibulbar carcinoma, epidermoid carcinoma, carcinoma epitheliale adenoides, carcinoma exulcere, carcinoma fibrosum, gelatiniform carcinoma, gelatinous carcinoma, giant cell carcinoma, gigantocellulare, glandular carcinoma, granulosa cell carcinoma, hair-matrix carcinoma, hematoid carcinoma, hepatocellular carcinoma (also called hepatoma, malignant hepatoma and hepatocarcinoma), Huirthle cell carcinoma, hyaline carcinoma, hypernephroid carcinoma, infantile embryonal carcinoma, carcinoma in situ, intraepidermal carcinoma, intraepithelial carcinoma, Krompecher's carcinoma, Kulchitzky-cell carcinoma, lenticular carcinoma, carcinoma lenticulare, lipomatous carcinoma, lymphoepithelial carcinoma, carcinoma mastitoides, carcinoma medullare, medullary carcinoma, carcinoma melanodes, melanotic carcinoma, mucinous carcinoma, carcinoma muciparum, carcinoma mucocellulare, mucoepidermoid carcinoma, carcinoma mucosum, mucous carcinoma, carcinoma myxomatodes, nasopharyngeal carcinoma, carcinoma nigrum, oat cell carcinoma, carcinoma ossificans, osteoid carcinoma, ovarian carcinoma, papillary carcinoma, periportal carcinoma, preinvasive carcinoma, prostate carcinoma, renal cell carcinoma of kidney (also called adenocarcinoma of kidney and hypemephoroid carcinoma), reserve cell carcinoma, carcinoma sarcomatodes, scheinderian carcinoma, scirrhous carcinoma, carcinoma scroti, signet-ring cell carcinoma, carcinoma simplex, small-cell carcinoma, solanoid carcinoma, spheroidal cell carcinoma, spindle cell carcinoma, carcinoma spongiosum, squamous carcinoma, squamous cell carcinoma, string carcinoma, carcinoma telangiectaticum, carcinoma telangiectodes, transitional cell carcinoma, carcinoma tuberosum, tuberous carcinoma, verrucous carcinoma, carcinoma vilosum. In preferred embodiments, the methods of the present disclosure are used to treat subjects having cancer of the breast, cervix, ovary, prostate, lung, colon and rectum, pancreas, stomach or kidney.

[0484] Sarcomas are mesenchymal neoplasms that arise in bone and soft tissues. Different types of sarcomas are recognized and these include: liposarcomas (including myxoid liposarcomas and pleiomorphic liposarcomas), leiomyosarcomas, rhabdomyosarcomas, malignant peripheral nerve sheath tumors (also called malignant schwannomas, neurofibrosarcomas, or neurogenic sarcomas), Ewing's tumors (including Ewing's sarcoma of bone, extraskeletal (i.e., non-bone) Ewing's sarcoma, and primitive neuroectodermal tumor [PNET]), synovial sarcoma, angiosarcomas, hemangiosarcomas, lymphangiosarcomas, Kaposi's sarcoma, hemangioendothelioma, fibrosarcoma, desmoid tumor (also called aggressive fibromatosis), dermatofibrosarcoma protuberans (DFSP), malignant fibrous histiocytoma (MFH), hemangiopericytoma, malignant mesenchymoma, alveolar soft-part sarcoma, epithelioid sarcoma, clear cell sarcoma, desmoplastic small cell tumor, gastrointestinal stromal tumor (GIST) (also known as GI stromal sarcoma), osteosarcoma (also known as osteogenic sarcoma)-skeletal and extraskeletal, and chondrosarcoma.

[0485] In some embodiments, the cancer to be treated can be a refractory cancer. A “refractory cancer,” as used herein, is a cancer that is resistant to the standard of care prescribed. These cancers may appear initially responsive to a treatment (and then recur), or they may be completely non-responsive to the treatment. The ordinary standard of care will vary depending upon the cancer type, and the degree of progression in the subject. It may be a chemotherapy, or surgery, or radiation, or a combination thereof. Those of ordinary skill in the art are aware of such standards of care. Subjects being treated according to the present disclosure for a refractory cancer therefore may have already been exposed to another treatment for their cancer. Alternatively, if the cancer is likely to be refractory (e.g., given an analysis of the cancer cells or history of the subject), then the subject may not have already been exposed to another treatment. Examples of refractory cancers include, but are not limited to, leukemia, melanomas, renal cell carcinomas, colon cancer, liver (hepatic) cancers, pancreatic cancer, Non-Hodgkin's lymphoma and lung cancer.

d. Microbial Gene Inactivation

[0486] The present system may be used in various bacterial hosts, including human pathogens that are medically important, and bacterial pests that are key targets within the agricultural industry, as well as antibiotic resistant versions thereof; e.g., pathogenic Pseudomonas strains, Staphylococcus aureus, Pneuomoniae species, Helicobacter pylori, Enterobacteriaceae, Campylobacter spp., Neisseria Gonorrhoeae, Enterococcus faecium, Acinetobacter Baumannii, E. coli, Klebsiella pneumoniae, etc.

[0487] One reason transposable elements are so pervasive is that they encode the entire protein (and RNA, in this case) machinery to facilitate all steps of the mobilization pathway, namely, transposon DNA excision, DNA targeting, and transposon DNA integration.

[0488] The present system may be expressed on conjugative plasmids and be transferred into numerous bacterial phyla in a microbiome setting. Furthermore, by programming the CRISPR arrays synthetically with gRNAs targeting specific conserved regions with a defined set of bacteria within these communities, genetic cargos may be specifically and selectively integrated in bacterial species of interest.

[0489] CRISPR arrays may be further programed with gRNAs targeting common and medically relevant antibiotic resistance genes that are known to drive the evolution of multidrug resistant bacteria. Because the present transposon can be selectively integrated at will, the autonomous transposon may be programed to insertionally inactive antibiotic resistance genes, as might be present on plasmids being shared in microbiome environments. An advantage of the present system over pre-existing strategies to use CRISPR and other tools as a target-specific antimicrobial, is that the present transposons may not (or may) kill the targeted bacteria, but merely inactive the multidrug resistance while being permanently integrated into the relevant genomes or plasmids, and thus, continually spreading into the population. The present transposons may be programmed with a panel of gRNAs such that they remain within microbiomes of interest, in a permanent safe-harbor locus, providing a reservoir of RNA-guided transposases that can inactivate pathogenic sequences anytime they are encountered.

[0490] Besides the medical context, the present methods and systems may be used in agriculture. For bacterial pests, targeted antimicrobials may be ineffective simply because of scale (e.g., across acres and acres of crops). With the present system, the genetic payload being delivered to kill or incapacitate bacterial pests will do so while simultaneously spreading through the population, increasing in abundance.

[0491] The present RNA-guided transposon may serve as a gene drive that could persist in a population while have the target specificity to only drive into the desired genes.

[0492] The emergence of antibiotic resistance in bacteria is occurring rapidly on a global scale (Centers for Disease Control and Prevention, Office of Infectious Disease. Antibiotic resistance threats in the United States, 2013. April 2013), with contribution from improper overuse of antibiotics in both clinical and industrial settings. While resistance has been observed for virtually all introduced antibiotics (Centers for Disease Control and Prevention, Office of Infectious Disease. Antibiotic resistance threats in the United States, 2013. April 2013), the development of new drugs has significantly slowed in the last decade due to various economic and regulatory obstacles. In order to combat evolving resistance at a genetic level in bacteria, two concurrent studies demonstrated specific killing of resistant bacteria and elimination of plasmids carrying resistance genes, by utilizing the Cas9 nuclease to induce irreparable, lethal double strand breaks (DSBs) at target sequences within these genes (Bikard et al. Nat Biotechnol. 2014; 32 (11): 1146-1150; Citorik et al., Nat Biotechnol. 2014; 32 (11): 1141-1145, both incorporated herein by reference).

[0493] However, a major disadvantage is that Cas9 targeting is not efficient enough to eliminate all targets, and killing susceptible cells leads to a strong selection for survivor mutants containing either a mutated Cas9 enzyme, guide RNA (gRNA) array, or the target itself (Yosef et al. Proc Natl Acad Sci USA. 2015; 112 (23): 7267-7272, incorporated herein by reference). Furthermore, the phage-based delivery methods explored in the studies cannot yet be efficiently applied to a more complex bacteria population in a clinically-relevant setting.

[0494] The present systems and methods may be used to inactivate microbial genes. In some embodiments, the gene is an antibiotic resistance gene. For example, the coding sequence of bacterial resistance genes may be disrupted in vivo by insertion of a DNA sequence, leading to non-selective re-sensitization to drug treatment. In one embodiment, in addition to disruption of resistance genes, when the present system acts as a replicative transposon and the present system is incorporated on the inserted cargo, the system can further propagate itself along with the target plasmid. Furthermore, by including spacers targeting bacterial genomes, the construct can also stably insert itself in “safe haven” genomic regions, allowing for stable maintenance of the system and prolonged immunity. In other words, by converting the present system to a replicative mode of action and including the present machinery on the cargo, the system copies itself from the donor to the target resistance gene, and thus propagate itself further along with any subsequent horizontal transfer of the target plasmid. Once introduced into a new cell, spacers in the gRNA array targeting genomic sites lead to insertion of a copy of the construct stably in the genome, completing the cycle.

[0495] The present systems and methods may be used to treat a multi-drug resistance bacterial infection in a subject. The present systems and methods may be used for genomic engineering within complex bacterial consortia.

[0496] Beyond resistance genes, the system and method may be designed to target any gene or any set of genes, such as virulence or metabolic genes, for clinical and industrial applications in other embodiments.

[0497] The present systems and methods may be used to target and eliminate virulence genes from the population, to perform in situ gene knockouts, or to stably introduce new genetic elements to the metagenomic pool of a microbiome.

### 4. Kits

[0498] Also within the scope of the present disclosure are kits for therapeutic uses that include the components of the present system or composition.

[0499] The kit may include instructions for use in any of the methods described herein. The instructions can comprise a description of administration of the present system or composition to a subject to achieve the intended effect. The instructions generally include information as to dosage, dosing schedule, and route of administration for the intended treatment. The kit may further comprise a description of selecting a subject suitable for treatment based on identifying whether the subject is in need of the treatment.

[0500] The containers may be unit doses, bulk packages (e.g., multi-dose packages) or subunit doses. Instructions supplied in the kits of the disclosure are typically written instructions on a label or package insert. The label or package insert indicates that the pharmaceutical compositions are used for treating, delaying the onset, and/or alleviating a disease or disorder in a subject.

[0501] The kits provided herein are in suitable packaging. Suitable packaging includes, but is not limited to, vials, bottles, jars, flexible packaging, and the like. Also contemplated are packages for use in combination with a specific device, such as an inhaler, nasal administration device, or an infusion device. A kit may have a sterile access port (for example, the container may be an intravenous solution bag or a vial having a stopper pierceable by a hypodermic injection needle). The container may also have a sterile access port.

[0502] Kits optionally may provide additional components such as buffers and interpretive information. Normally, the kit comprises a container and a label or package insert(s) on or associated with the container. In some embodiment, the disclosure provides articles of manufacture comprising contents of the kits described above.

[0503] The kit may further comprise a device for holding the present system or composition. The device may include an infusion device, an intravenous solution bag, and/or a vial having a stopper pierceable by a hypodermic needle.

[0504] The present disclosure also provides for kits for performing RNA-guided DNA integration in vitro. The kit may include the components of the present system. Optional components of the kit include one or more of the following: (1) buffer constituents, (2) control plasmid, (3) sequencing primers.

[0505] Polynucleotides/DNA containing the target site may include, but is not limited to, purified chromosomal DNA, total cDNA, cDNA fractionated according to tissue or expression state (e.g. after heat shock or after cytokine treatment other treatment) or expression time (after any such treatment) or developmental stage, plasmid, cosmid, BAC, YAC, phage library, etc. Polynucleotides/DNA containing the target site may include DNA from organisms such as Homo sapiens, Mus domesticus, Mus spretus, Canis domesticus, Bos, Caenorhabditis elegans, Plasmodium falciparum, Plasmodium vivax, Onchocerca volvulus, Brugia malayi, Dirofilaria immitis, Leishmania, Zea maize, Arabidopsis thaliana, Glycine max, Drosophila melanogaster, Saccharomyces cerevisiae, Schizosaccharomyces pombe, Neurospora, Escherichia coli, Salmonella typhimurium, Bacillus subtilis, Neisseria gonorrhoeae, Staphylococcus aureus, Streptococcus pneumonia, Mycobacterium tuberculosis, Aquifex, Thermus aquaticus, Pyrococcus furiosus, Thermus littoralis, Methanobacterium thermoautotrophicum, Sulfolobus caldoaceticus, and others.

### EXAMPLES

[0506] The following are examples of the present invention and are not to be construed as limiting.

### Example 1

### Transposon-Encoded CRISPR-Cas Systems Direct RNA-Guided DNA Integration

[0507] Conventional CRISPR-Cas systems maintain genomic integrity by leveraging guide RNAs for the nuclease-dependent degradation of mobile genetic elements, including plasmids and viruses. Here, in an inversion of this paradigm, bacterial Tn7-like transposons have coopted nuclease-deficient CRISPR-Cas systems to catalyze RNA-guided integration of mobile genetic elements into the genome. Programmable transposition of Vibrio cholerae Tn6677 in E. coli utilized CRISPR- and transposon-associated molecular machineries, including a novel co-complex between Cascade and the transposition protein TniQ. Donor DNA integration occurred in one of two possible orientations at a fixed distance downstream of target DNA sequences and accommodated variable length genetic payloads. Deep sequencing experiments revealed highly specific, genome-wide DNA integration across dozens of unique target sites.

[0508] Horizontal gene transfer (HGT), a process that allows genetic information to be transmitted between phylogenetically unrelated species, is a major driver of genome evolution across the three domains of life. Mobile genetic elements (MGE) facilitating HGT are especially pervasive in bacteria and archaea, where viruses, plasmids, and transposons constitute the vast prokaryotic mobilome. In response to the ceaseless assault of genetic parasites, bacteria have evolved numerous innate and adaptive defense strategies for protection, including RNA-guided immune systems conferred by Clustered Regularly Interspaced Short Palindromic Repeats (CRISPR) and CRISPR-associated (cas) genes. The evolution of CRISPR-Cas is linked to the large reservoir of genes provided by MGEs, with core enzymatic machineries involved in both new spacer acquisition (Cas1) and RNA-guided DNA targeting (Cas9 and Cas12) deriving from transposable elements.

[0509] The well-studied E. coli Tn7 transposon is unique in that it mobilizes via two mutually exclusive pathways, one involving non-sequence-specific integration into the lagging strand template during replication, and a second pathway involving site-specific integration downstream of a conserved genomic sequence. Those Tn7-like transposons that specifically associate with CRISPR-Cas systems lack a key gene involved in DNA targeting, and the CRISPR-Cas systems they encode lack a key gene involved in DNA degradation.

[0510] In this Example, a CRISPR-Cas effector complex from Vibrio cholerae directed an accompanying transposase to integrate DNA downstream of a genomic target site complementary to a guide RNA. This system exemplifies a facile, site-specific DNA integration without homologous recombination.

### Cascade Directs Site-Specific DNA Integration

[0511] A well-studied cut-and-paste DNA transposon, E. coli Tn7, was used to develop assays for monitoring transposition from a plasmid-encoded donor into the genome (FIG. 6A). The Tn7 transposon contains characteristic left and right end sequences and encodes five tns genes, tnsA E, which collectively encode a heteromeric transposase: TnsA and TnsB are catalytic enzymes that excise the transposon donor via coordinated double-strand breaks; TnsB, a member of the retroviral integrase superfamily, catalyzes DNA integration; TnsD and TnsE constitute mutually exclusive targeting factors that specify DNA integration sites; and TnsC is an ATPase that communicates between TnsAB and TnsD or TnsE. Prior studies have shown that EcoTnsD mediates site-specific Tn7 transposition into a conserved Tn7 attachment site (attTn7) downstream of the glmS gene in E. coli, whereas EcoTnsE mediates random transposition into the lagging-strand template during replication. TnsD-mediated transposition was recapitulated by transforming E. coli BL21 (DE3) cells with pEcoTnsABCD and pEcoDonor, and genomic transposon insertion events were detected by PCR and Sanger sequencing (SEQ ID NOs: 1-139 and FIGS. 6A-F).

[0512] To test whether CRISPR-associated targeting complexes directed transposons to genomic sites complementary to a guide RNA (FIG. 1A), a representative transposon from Vibrio cholerae strain HE-45, Tn6677, which encodes a variant Type I-F CRISPR-Cas system (as described in: McDonald, N. D., et al., BMC Genomics 20, 105 (2019) and Makarova, K. S., et al., The CRISPR Journal 1, 325-336 (2018), incorporated herein by reference) was selected (FIG. 6F, SEQ ID NOs: 140-153). This transposon is bounded by left and right end sequences, distinguishable by their TnsB binding sites, and includes a terminal operon comprising the tnsA, tnsB, and tnsC genes. Intriguingly, the tniQ gene, a homolog of E. coli tnsD, is encoded within the cas operon rather than tns operon, whereas tnsE is absent entirely. Like other such transposon-encoded CRISPR-Cas systems (Peters, J. E., et al., Proc Natl Acad Sci USA 114, E7358-E7366 (2017), incorporated herein by reference), the cas1 and cas2 genes responsible for spacer acquisition are absent, as is the cas3 gene responsible for target DNA degradation. The putative DNA-targeting complex Cascade, also known as Csy complex (Hille, F. et al. Cell 172, 1239-1259 (2018), incorporated herein by reference), for this Type I-F variant is encoded by three genes: cas6, cas7, and a natural cas8-cas5 fusion described by Makarova, K. S., et al., The CRISPR Journal 1, 325-336 (2018), incorporated herein by reference, (hereafter referred to simply as cas8 in this Example when referring to the Type I-F variant). The native CRISPR array, comprising four repeat and three spacer sequences, encodes distinct mature CRISPR RNAs (crRNAs), which are referred to as guide RNAs (gRNAs).

[0513] E. coli was transformed with plasmids encoding components of the V. cholerae transposon, including a transposon donor (pDonor), the tnsA-tnsB-tnsC operon (pTnsABC), and the Type I-F variant tniQ-cas8-cas7-cas6 operon alongside a synthetic CRISPR array (pQCascade) (FIG. 1B). The CRISPR array was designed to produce a non-targeting gRNA (gRNA-nt) or gRNA-1, which targets a genomic site downstream of glmS flanked by a 5′-CC-3′ protospacer adjacent motif (PAM) (FIG. 100). PCR products were observed from cellular lysates between a genome-specific primer and either of two transposon-specific primers in experiments containing pTnsABC, pDonor, and pQCascade expressing gRNA-1, but not with gRNA-nt or any empty vector controls (FIGS. 1C and 1D).

[0514] Because parallel reactions with oppositely oriented transposon primers revealed integration events within the same biological sample, RNA-guided transposition might occur in either orientation, unlike E. coli Tn7. Additional PCRs adding a downstream genomic primer and targeting an additional site with gRNA-2 found in the same genomic locus but on the opposite strand were performed. For both gRNA-1 and gRNA-2, transposition products in both orientations were present, although with distinct orientation preferences based on relative band intensities (FIG. 1E). Based on the presence of discrete bands, it appeared that integration was occurring a set distance from the target site, and indeed, Sanger and next-generation sequencing (NGS) revealed that >95% of integration events for gRNA-1 occurred 49-bp from the 3′ edge of the target site. The observed pattern with gRNA-2 was more complex, with integration clearly favoring distances of 48- and 50-bp over 49-bp. Both sequencing approaches also revealed the expected 5-bp target site duplication (TSD) that is a feature of Tn7 transposition products (FIGS. 1F and 1G).

[0515] The V. cholerae Tn6677 transposon is not naturally present downstream of glmS nor immediately proximal to DNA sequences highly similar to the known EcoTnsD binding site (attTn7), and no evidence of site-specific transposition within this locus was found when the gRNA was omitted (FIG. 1D). Nevertheless, to ensure that integration specificity was solely guided by gRNA sequence, and not by any intrinsic preference for the glmS locus, gRNA-3 and gRNA-4, which target opposite strands within the lacZ coding sequence, were cloned and tested. Bidirectional integration 48-50 bp downstream of both target sites was again observed, and clonally integrated lacZ knockout strains were able to be isolated after performing blue-white colony screening on X-gal-containing LB-agar plates (FIGS. 1H, 1I and 7A-G). Collectively, these experiments demonstrate transposon integration downstream of genomic target sites complementary to guide RNAs.

### Protein Requirements of RNA-Guided DNA Integration

[0516] To confirm the involvement of transposon- and CRISPR-associated proteins in catalyzing RNA-guided DNA integration, a series of plasmids in which each individual tns and cas gene was deleted, or in which each individual enzymatic active site was mutated were cloned and tested. Removal of any protein component abrogated transposition activity, as did active site mutations in the TnsB transposase, which catalyzes DNA integration, in the TnsC ATPase, which regulates target site selection, and in the Cas6 ribonuclease, which catalyzes gRNA processing (FIG. 2A). A catalytically impaired TnsA mutant still facilitated RNA-guided DNA integration. Based on previous studies of E. coli Tn7, this variant system was expected to mobilize via replicative transposition as opposed to cut-and-paste transposition.

[0517] In E. coli, site-specific transposition includes attTn7 binding by EcoTnsD, followed by interactions with the EcoTnsC regulator protein to directly recruit the EcoTnsA-TnsB-donor DNA. Given the role of tniQ (a tnsD homolog) in RNA-guided transposition, and its location within the Type I-F variant cas8-cas7-cas6 operon, Cascade might directly bind TniQ and thereby deliver it to genomic target sites. CRISPR RNA and the V. cholerae tniQ-cas8-cas7-cas6 operon containing an N-terminal His₁₀ tag on the TniQ subunit were recombinantly expressed (FIG. 8A). TniQ co-purified with Cas8, Cas7, and Cas6, as shown by SDS-PAGE and mass spectrometry, and the relative band intensities for each Cas protein were similar to TniQ-free Cascade and consistent with the 1:6:1 Cas8:Cas7:Cas6 stoichiometry described by Wiedenheft, B. et al. (Proc Natl Acad Sci USA 108, 10092-10097 (2011), incorporated herein by reference) for a I-F variant Cascade complex (FIG. 2B and FIG. 8B). The complex migrated through a gel filtration column with an apparent molecular weight of ˜440 kDa, in good agreement with its approximate expected mass, and both Cascade and TniQ-Cascade co-purified with a 60-nt RNA species, which was confirmed as mature gRNA by deep sequencing (FIGS. 2C, 2D, 8C and 8D). To further validate the interaction between Cascade and TniQ, separately purified samples were incubated in vitro and complex formation was demonstrated by size exclusion chromatography (FIG. 8E). Together, these results revealed the existence of a novel TniQ-Cascade co-complex, representing an example of a type I CRISPR RNA-guided effector complex directly interacting with a non-Cas protein.

[0518] To determine whether specific TniQ-Cascade interactions are required, or if TniQ could direct transposition adjacent to generic R-loop structures or via artificial recruitment to DNA, S. pyogenes Cas9 (SpyCas9) and P. aeruginosa Cascade (PaeCascade) were used as orthogonal RNA-guided DNA targeting systems. After generating protein-RNA expression plasmids and programming both effector complexes with gRNAs targeting the same lacZ sites as described in the above transposition experiments, DNA targeting was validated by demonstrating efficient cell killing in the presence of an active Cas9 nuclease or the PaeCascade-dependent Cas2-3 nuclease (FIGS. 9A and 9B). When strains harboring pTnsABCQ and pDonor were transformed with a plasmid encoding either catalytically deactivated Cas9-sgRNA (dCas9-sgRNA) or PaeCascade, and PCR analysis of the resulting cell lysate was performed, no evidence of site-specific transposition was found (FIG. 2E), indicating that a genomic R-loop was insufficient for site-specific integration. Transposition when TniQ was directly fused to either terminus of dCas9, or to the Cas8 or Cas6 subunit of PaeCascade was also not detected (FIG. 2E), at least for the linker sequences tested. Interestingly, however, a similar fusion of TniQ to the Cas6 subunit of VchCascade, but not to the Cas8 subunit, restored RNA-guided transposition activity (FIGS. 2E and 9C).

[0519] Taken together with the biochemical results, it was concluded that TniQ forms interactions with Cascade, possibly via the Cas6 subunit, which could account for the finding that RNA-guided DNA integration occurs downstream of the PAM-distal end of the target site where Cas6 bound (FIG. 2F). Because TniQ is utilized for transposition in these experiments, it may serve as a functional link between the CRISPR- and transposon-associated machineries during DNA targeting and DNA integration.

### Donor DNA Requirements of RNA-Guided DNA Integration

[0520] Tn7 transposons are characterized by conserved left and right ends ˜100-150 bp in length, which contain 8-bp terminal inverted repeats and three and four ˜20-bp TnsB binding sites, respectively (FIG. 11A). To determine the minimal donor requirements for RNA-guided DNA integration, as well as the effects of truncating the transposon ends and altering the cargo size, a quantitative PCR (qPCR) method for scoring transposition efficiency that could accurately and sensitively measure genomic integration events in both orientations was developed (FIGS. 10A-10E). Analysis of cell lysates from transposition experiments using lacZ-targeting gRNA-3 and gRNA-4 yielded overall integration efficiencies of 62% and 42% without selection, respectively. The preference for integrating the ‘right’ vs. the ‘left’ transposon end proximal to the genomic site targeted by Cascade was 39-to-1 for gRNA-3 and 1-to-1 for gRNA-4, suggesting the existence of additional sequence determinants that regulate integration orientation (FIGS. 3A and 3B). When both ends of the transposon were separately truncated, up to 40-bp and 80-bp of the left and right ends could be deleted without any substantive defect in overall integration efficiency. The dispensable portions of the ‘right’ end included the third and fourth putative TnsB binding sites, whereas removal of any of the three TnsB binding sites in the left end was detrimental.

[0521] Using this quantitative assay, the effect of transposon size on RNA-guided integration efficiency and possible size constraints were determined. The DNA cargo in between the donor ends, beginning with the original transposon donor plasmid (977 bp), was progressively shortened or lengthened and integration efficiency with a three-plasmid expression system was maximal with a ˜775-bp transposon and decayed with both the shorter and longer cargos tested (FIGS. 3C and 3H). Interestingly, naturally occurring Tn7-like transposons that encode CRISPR-Cas systems range from 20 to >100 kb, though their capacity for active mobility is unknown.

[0522] Both ends of the transposon were separately truncated and it was found that approximately 105 bp of the left end and approximately 47 bp of the right end were important for efficient RNA-guided DNA integration, corresponding to three and two intact putative TnsB binding sites, respectively (FIGS. 11A-11D). Shorter transposons containing right end truncations were integrated more efficiently, accompanied by a drastic change in the orientation bias.

### Guide RNA and Target DNA Requirements

[0523] The Tn6677-encoded CRISPR-Cas system is most closely related to the I-F subtype, in which DNA target recognition by Cascade requires a consensus 5′-CC-3′ PAM, a high degree of sequence complementarity within a PAM-proximal seed sequence, and additional base-pairing across the entire 32-bp protospacer. To determine sequence determinants of RNA-guided DNA targeting, 12 dinucleotide PAMs were tested by sliding the guide sequence in 1-bp increments along the lacZ gene relative to gRNA-4 (FIG. 3D). In total, 8 distinct dinucleotide PAMs supported transposition at levels that were >25% of the 5′-CC-3′ PAM, and transposition occurred at >1% total efficiency across the entire set of PAMs tested (FIG. 3D). This efficiency was conserved when the dinucleotide PAM had the same sequence as the 3′ end of the CRISPR repeat sequence. Although this so-called “self sequence” is typically excluded during PAM-dependent target search in canonical immune responses involving DNA interference or priming, DNA binding by Vch Cascade does not lead to Cas3 recruitment, which in well-studied type I CRISPR-Cas systems is PAM-sensitive. Additional deep sequencing revealed that the distance between the Cascade target site and primary transposon integration site remained at approximately 47-51 bp across the panel of gRNAs tested (FIGS. 3E and 12A). Nevertheless, these experiments highlight how PAM recognition plasticity can be harnessed to direct a high degree of insertion flexibility and specificity at base-pair resolution.

[0524] To probe the sensitivity of transposition to RNA-DNA mismatches, consecutive blocks of 4-nt mismatches along the guide portion of gRNA-4 were tested (FIGS. 3F and 3J). Mismatches within the 8-nt seed sequence severely reduced transposition, likely due to the inability to form a stable R-loop. Unexpectedly, though, the results highlighted a second region of mismatches at positions 25-29 that abrogated DNA integration, despite previous studies demonstrating that DNA binding stability is largely insensitive to mismatches in this region. For the terminal mismatch block, which retained 17% integration activity, the distribution of observed integration sites was markedly skewed to shorter distances from the target site relative to gRNA-4 (FIG. 12B), which may be the result of R-loop conformational heterogeneity.

[0525] The model for RNA-guided DNA integration involves Cascade-mediated recruitment of TniQ to target DNA. Prior work with E. coli Cascade has demonstrated that gRNAs with extended spacers form complexes containing additional Cas7 subunits, which would increase the distance between the PAM-bound Cas8 and Cas6 at the other end of the R-loop. Modified gRNAs containing spacers that were either shortened or lengthened in 6-nt increments from the 3′ end were cloned and tested. gRNAs with truncated spacers showed little or no activity, whereas extended spacers facilitated targeted integration, albeit at reduced levels with increasing length (FIGS. 12C and 12D). The +12-nt gRNA directed transposition to two distinct regions: one ˜49-bp from the 3′ end of the wild-type 32-nt spacer, and an additional region shifted 11-13 bp away, in agreement with the expected increase in the length of the R-loop measured from the PAM (FIGS. 3G and 3K). These data, together with the mismatch panel, provide evidence that TniQ is tethered to the PAM-distal end of the R-loop structure.

### Programmability and Genome-Wide Specificity

[0526] A series of gRNAs targeting additional genomic sites flanked by 5′-CC-3′ PAMs within the lac operon were cloned and tested. Using the same primer pair for each resulting cellular lysate, it was shown by PCR that transposition was predictably repositioned with each distinct gRNA (FIG. 4A).

[0527] To test whether there was non-specific integration simultaneously occurring elsewhere, either at off-target genomic sites bound by Cascade, or independent of Cascade targeting, a transposon insertion sequencing (Tn-seq) pipeline previously developed for mariner transposons, in which all integration sites genome-wide are revealed by NGS, was adopted (FIGS. 4B and 13A-13B). Tn-seq was applied to a plasmid-encoded mariner transposon and the pipeline successfully recapitulated the genome-wide integration landscape previously observed with the Himar1c9 transposase (FIGS. 4C, 4D, 13C and 13D).

[0528] The same analysis was performed for the RNA-guided V. cholerae transposon programmed with gRNA-4, and exquisite selectivity for lacZ-specific DNA integration was observed (FIG. 4C). The observed integration site, which accounted for 99.0% of all Tn-seq reads that passed the filtering criteria, precisely matched the site observed by prior PCR amplicon NGS analysis (FIG. 4E), and no off-target integration events were reproducibly observed elsewhere in the genome across three biological replicates (FIGS. 13E and 13F). Tn-seq data yielded diagnostic read pileups that highlighted the 5-bp TSD and corroborated the previous measurements of transposon insertion orientation bias discussed above (FIG. 4F). Tn-seq libraries from E. coli strains harboring pQCascade programmed with the non-targeting gRNA-nt, or from strains lacking Cascade altogether (but still containing pDonor and pTnsABCQ), yielded far fewer genome-mapping reads, and no integration sites were consistently observed across multiple biological replicates (FIGS. 4C and 13G-131).

[0529] In addition to performing Tn-seq with the gRNAs targeting glmS and lacZ genomic loci (FIG. 14A), an additional 16 gRNAs targeting the E. coli genome at 8 arbitrary locations spaced equidistantly around the circular chromosome were cloned and tested. Beyond requiring that target sites were unique, flanked by a 5′-CC-3′ PAM, and located within intergenic regions, no further design rules or empirical selection criteria were applied. When the resulting Tn-seq data was analyzed, 16/16 gRNAs directed highly precise RNA-guided DNA integration 46-55 bp downstream of the Cascade target, with ˜95% of all filtered Tn-seq reads mapping to the primary integration site (FIGS. 4G and 14B-E). These experiments highlight the high degree of intrinsic programmability and genome-wide integration specificity directed by transposon-encoded CRISPR-Cas systems.

[0530] Transposases and integrases are generally thought to mobilize their specific genetic payloads by integrating either randomly, with a low degree of sequence specificity, or by targeting specialized genomic loci through inflexible, sequence-specific homing mechanisms. A fully programmable integrase was found in which the DNA insertion activity of a heteromeric transposase from Vibrio cholerae is directed by an RNA-guided complex called Cascade, whose DNA targeting specificity can be easily tuned. Beyond defining fundamental parameters governing this activity, a novel complex between Cascade and TniQ that mechanistically connects the transposon- and CRISPR-associated machineries was also found. Based on the above results, and on previous studies of Tn7 transposition, proposed models for the RNA-guided mobilization of Tn7-like transposons encoding CRISPR-Cas systems (using the Type I-F variant as an Example) are shown in FIGS. 5A and 5B.

[0531] Many biotechnology products require genomic integration of large genetic payloads, including gene therapies, engineered crops, and biologics, and the advent of CRISPR-based genome editing has increased the need for effective knock-in methods. Yet current genome engineering solutions are limited by a lack of specificity, as with randomly-integrating transposases, and non-homologous end joining approaches, or by a lack of efficiency and cell type versatility, as with homology-directed repair. The ability to insert transposable elements by guide RNA-assisted targeting (INTEGRATE) provides for site-specific DNA integration that obviates the need for double-strand breaks in the target DNA, homology arms in the donor DNA, and host DNA repair factors. By virtue of its facile programmability, this technology finds use for multiplexing and large-scale screening using guide RNA libraries.

### Materials and Methods

### Plasmid Construction.

[0532] All plasmids used in this study are SEQ ID NOs: 1-139, disclosed in SEQ ID NOs: 1-139, and a subset are available on Addgene. Briefly, genes encoding V. cholerae strain HE-45 TnsA-TnsB-TnsC and TniQ-Cas8-Cas7-Cas6 (SEQ ID NOs: 141, 143, 145, 147, 149, 151, and 153) were synthesized by GenScript and cloned into pCOLADuet-1 and pCDFDuet-1, respectively, yielding pTnsABC and pQCascadeΔCRISPR. A pQCascade entry vector (pQCascade_entry) was generated by inserting tandem BsaI restriction sites flanked by two CRISPR repeats downstream of the first T7 promoter, and specific spacers (FIG. 100) were subsequently cloned by oligoduplex ligation, yielding pQCascade. To generate pDonor, a gene fragment (GenScript) encoding both transposon ends was cloned into pUC19, and a chloramphenicol resistance gene was subsequently inserted within the transposon. Further derivatives of these plasmids were cloned using a combination of methods, including Gibson assembly, restriction digestion-ligation, ligation of hybridized oligonucleotides, and around-the-horn PCR. Plasmids were cloned and propagated in NEBR Turbo cells (New England Biolabs (NEB)), purified using Miniprep Kits (Qiagen), and verified by Sanger sequencing (GENEWIZ®).

[0533] For transposition experiments involving the E. coli Tn7 transposon, pEcoDonor was generated similarly to pDonor, and pEcoTnsABCD was subcloned from pCW4 (Addgene plasmid #8484). Briefly, E. coli tnsA-tnsB-tnsC-tnsD operon was cloned into pCOLADuet-1 downstream of a T7 promoter, generating pEcoTnsABCD, and an E. coli transposon donor construct into pUC19, generating pEcoDonor. For transposition and cell killing experiments involving the I-F system from P. aeruginosa, genes encoding Cas8-Cas5-Cas7-Cas6 (also known as Csy1-Csy2-Csy3-Csy4) were subcloned from pBW64, and the gene encoding the natural Cas2/3 fusion protein was subcloned from pCas1_Cas2/3 (Addgene plasmid #89240). For transposition and cell killing experiments involving the II-A system from S. pyogenes, the gene encoding Cas9 was subcloned from a vector in-house. For control Tn-seq experiments using the mariner transposon and Himar1C9 transposase, the relevant portions were subcloned from pSAM_Ec (Addgene plasmid #102939).

[0534] Expression plasmids for protein purification were subcloned from pQCascade into p2CT-10 (Addgene plasmid #55209), and the gRNA expression construct was cloned into pACYCDuet-1.

[0535] Multiple sequence alignments were performed using Clustal Omega with default parameters and visualized with ESPript 3.0. Analysis of spacers from C2c5 CRISPR arrays (FIG. 15) were performed using CRISPRTarget.

### Transposition Experiments.

[0536] All transposition experiments were performed in E. coli BL21 (DE3) cells (NEB). For experiments including pDonor, pTnsABC, and pQCascade (or variants thereof), chemically competent cells were first co-transformed with either pDonor and pTnsABC, pDonor and pQCascade, or pTnsABC and pQCascade, and transformants were isolated by selective plating on double antibiotic LB-agar plates. Liquid cultures were then inoculated from single colonies, and the resulting strains were made chemically competent using standard methods, aliquoted and snap frozen. The third plasmid was introduced in a new transformation reaction by heat shock, and after recovering cells in fresh LB medium at 37° C. for one hour, cells were plated on triple antibiotic LB-agar plates containing 100 μg/mL carbenicillin, 50 μg/mL kanamycin, and 50 μg/mL spectinomycin. After overnight growth at 37° C. for 16 hours, hundreds of colonies were scraped from the plates, and a portion was resuspended in fresh LB medium before being re-plated on triple antibiotic LB-agar plates as before, this time supplemented with 0.1 mM IPTG to induce protein expression. Solid media culturing was chosen over liquid culturing in order to avoid growth competition and population bottlenecks. Cells were incubated an additional 24 hours at 37° C. and typically grew as densely spaced colonies, before being scraped, resuspended in LB medium, and prepared for subsequent analysis. Control experiments lacking one or more molecular components were performed using empty vectors and the exact same protocol as above. Experiments investigating the effect of induction level on transposition efficiency had variable IPTG concentrations in the media (FIG. 10D). To isolate clonal, lacZ-integrated strains via blue-white colony screening, cells were re-plated on triple antibiotic LB-agar plates supplemented with 1 mM IPTG and 100 μg/mL X-gal (GoldBio) and grown overnight at 37° C. prior to colony PCR analysis.

### PCR and Sanger Sequencing Analysis of Transposition Products.

[0537] Optical density measurements at 600 nm were taken of scraped colonies that had been resuspended in LB medium, and ˜3.2×10⁸ cells (the equivalent of 200 μL of OD₆₀₀=2.0) were transferred to a 96-well plate. Cells were pelleted by centrifugation at 4000×g for 5 minutes and resuspended in 80 μL of H₂O, before being lysed by incubating at 95° C. for 10 minutes in a thermal cycler. The cell debris was pelleted by centrifugation at 4000×g for 5 minutes, and 10 μL of lysate was removed and serially diluted with 90 μL of H₂O to generate 10- and 100-fold lysate dilutions for qPCR and PCR analysis, respectively.

[0538] PCR products were generated with Q5® Hot Start High-Fidelity DNA Polymerase (NEB) using 5 μL of 100-fold diluted lysate per 12.5 μL reaction volume serving as template. Reactions contained 200 μM dNTPs and 0.5 μM primers, and were generally subjected to 30 thermal cycles with an annealing temperature of 66° C. Primer pairs contained one genome-specific primer and one transposon-specific primer, and were varied such that all possible integration orientations could be detected both upstream and downstream of the target site (see FIG. 101 for selected oligonucleotides). Colony PCRs (FIGS. 7B and 7G) were performed by inoculating overnight cultures with individual colonies and performing PCR analysis as described above. PCR amplicons were resolved by 1-2% agarose gel electrophoresis and visualized by staining with SYBR® Safe (Thermo Scientific). Negative control samples were always analyzed in parallel with experimental samples to identify mispriming products, some of which presumably result from the analysis being performed on crude cell lysates that still contain the high-copy pDonor. PCRs were initially performed with different DNA polymerases, variable cycling conditions, and different sample preparation methods. It was noted that higher concentrations of the crude lysate appeared to inhibit successful amplification of the integrated transposition product.

[0539] To map integration sites by Sanger sequencing, bands were excised after separation by gel electrophoresis, DNA was isolated by Gel Extraction Kit (Qiagen), and samples were submitted to and analyzed by GENEWIZ®.

### Integration Site Distribution Analysis by Next-Generation Sequencing (NGS) of PCR Amplicons.

[0540] PCR-1 products were generated as described above, except that primers contained universal Illumina® adapters as 5′ overhangs (Table 5) and the cycle number was reduced to 20. These products were then diluted 20-fold into a fresh polymerase chain reaction (PCR-2) containing indexed p5/p7 primers and subjected to 10 additional thermal cycles using an annealing temperature of 65° C. After verifying amplification by analytical gel electrophoresis, barcoded reactions were pooled and resolved by 2% agarose gel electrophoresis, DNA was isolated by Gel Extraction Kit (Qiagen), and NGS libraries were quantified by qPCR using the NEBNext® Library Quant Kit (NEB). Illumina® sequencing was performed using a NextSeq mid output kit with 150-cycle single-end reads and automated demultiplexing and adapter trimming (Illumina®). Individual bases with Phred quality scores under 20 (corresponding to a base miscalling rate of >1%) were changed to ‘N,’ and only reads with at least half the called bases above Q20 were retained for subsequent analysis.

[0541] To determine the integration site distribution for a given sample, the following steps were performed using custom Python scripts. First, reads were filtered based on the requirement that they contain 20-bp of perfectly matching transposon end sequence. 15 bp of sequence immediately flanking the transposon were then extracted and aligned to a 1-kb window of the E. coli BL21 (DE3) genome (GenBank accession CP001509) surrounding the gRNA-matching genomic target site. The distance between the nearest transposon-genome junction and the PAM-distal edge of the 32-bp target site was determined. Histograms were plotted after compiling these distances across all the reads within a given library.

### Cell Killing Experiments.

[0542] For experiments with Cas9, 40 μL chemically competent BL21 (DE3) cells were transformed with 100 ng Cas9-sgRNA expression plasmid encoding either sgRNA-3 or sgRNA-4, which target equivalent lacZ sites as V. cholerae gRNA-3 and gRNA-4 but on opposite strands, or a truncated/non-functional sgRNA derived from the BsaI-containing entry vector (FIG. 100). After a one-hour recovery at 37° C., variable dilutions of cells were plated on LB-agar plates containing 100 μg/mL carbenicillin and 0.1 mM IPTG and grown an additional 16 hours at 37° C. The number of resulting colonies was quantified across three biological replicates, and the data were plotted as colony forming units (cfu) per μg of plasmid DNA. Additional control experiments used an expression plasmid encoding Cas9 nuclease-inactivating D10A and H840A mutations (dCas9).

[0543] For experiments with Cascade and Cas2-3 from P. aeruginosa, BL21 (DE3) cells were first transformed with a Cas2-3 expression vector, and the resulting strains were made chemically competent. 40 μL of these cells were then transformed with 100 ng PaeCascade expression plasmid encoding either gRNA-Pae3 or gRNA-Pae4, which target equivalent lacZ sites as V. cholerae gRNA-3 and gRNA-4, or a truncated/non-functional gRNA derived from the BsaI-containing entry vector (FIG. 100). After a one-hour recovery at 37° C., variable dilutions of cells were plated on LB-agar plates containing 100 μg/mL carbenicillin and 50 μg/mL kanamycin and grown an additional 16 hours at 37° C. The number of resulting colonies was quantified across three biological replicates, and the data were plotted as colony forming units (cfu) per μg of plasmid DNA. Even low concentrations of IPTG led to gRNA-independent toxicity in these experiments, whereas gRNA-dependent cell killing was readily observed in the absence of induction, presumably from leaky expression by T7 RNAP. IPTG was omitted from experiments using PaeCascade and Cas2-3.

qPCR Analysis of Transposition Efficiency.

[0544] For both gRNA-3 and gRNA-4, pairs of transposon- and genome-specific primers were designed to amplify a ˜140-240-bp fragment resulting from RNA-guided DNA integration at the expected lacZ locus in either orientation. A separate pair of genome-specific primers was designed to amplify an E. coli reference gene (rssA) for normalization purposes (FIG. 101). qPCR reactions (10 μL) contained 5 μL of SsoAdvanced Universal SYBR® Green Supermix (BioRad), 1 μL H₂O, 2 μL of 2.5 μM primers, and 2 μL of 10-fold diluted lysate prepared from scraped colonies, as described for the PCR analysis above. Reactions were prepared in 384-well clear/white PCR plates (BioRad), and measurements were performed on a CFX384 Real-Time PCR Detection System (BioRad) using the following thermal cycling parameters: polymerase activation and DNA denaturation (98° C. for 2.5 min), 40 cycles of amplification (98° C. for 10 s, 62° C. for 20 s), and terminal melt-curve analysis (65-95° C. in 0.5° C./5 s increments).

[0545] Lysates were prepared from a control BL21 (DE3) strain containing pDonor and both empty expression vectors (pCOLADuet-1 and pCDFDuet-1), and from strains that underwent clonal integration into the lacZ locus downstream of both gRNA-3 and gRNA-4 target sites in both orientations. By testing the primer pairs with each of these samples diluted across five orders of magnitude, and then determining the resulting Cq values and PCR efficiencies, it was verified that the experimental and reference amplicons were amplified with similar efficiencies, and that the primer pairs selectively amplified the intended transposition product (FIGS. 10A and 10B). Variable transposition efficiencies across five orders of magnitude (ranging from 0.002-100%) were simulated by mixing control lysates and clonally-integrated lysates in various ratios, and accurate and reproducible detection of transposition products at both target sites, in either orientation, was shown at levels >0.01% (FIG. 10B). Finally, variable integration orientation biases were simulated by mixing clonally-integrated lysates together in varying ratios together with control lysates, and it was shown that these could also be accurately measured (FIGS. 10C and 10E).

[0546] In another qPCR analysis protocol, each biological sample was analyzed in three parallel reactions: one reaction contained a primer pair for the E. coli reference gene, a second reaction contained a primer pair for one of the two possible integration orientations, and a third reaction contained a primer pair for the other possible integration orientation. Transposition efficiency for each orientation was then calculated as 24C4, in which ΔCq is the Cq (quantitation cycle) difference between the experimental reaction and the control reaction. Total transposition efficiency for a given experiment was calculated as the sum of transposition efficiencies for both orientations. All measurements presented in the text and figures were determined from three independent biological replicates.

[0547] Experiments with pDonor variants were performed by delivering pDonor in the final transformation step, whereas most other experiments were performed by delivering pQCascade in the final transformation step. Integration efficiencies between samples from these two experiments appeared to differ slightly as a result (compare FIG. 3B to FIG. 3C). Additionally, to not bias the qPCR analysis of the donor end truncation samples by successively shortening the PCR amplicon, different primer pairs were used for these samples. Within the left and right end truncation panel (FIGS. 11B-11D), the transposon end that was not being perturbed was selectively amplified for qPCR analysis.

### Recombinant Protein Expression and Purification.

[0548] The protein components for Cascade, TniQ, and TniQ-Cascade were expressed from a pET-derivative vector containing an N-terminal His₁₀-MBP-TEVsite fusion on Cas8, TniQ, and TniQ, respectively (see FIG. 8A). The gRNAs for Cascade and TniQ-Cascade were expressed separately from a pACYC-derivative vector. E. coli BL21 (DE3) cells harboring one or both plasmids were grown in 2×YT medium with the appropriate antibiotic(s) at 37° C. to OD₆₀₀=0.5-0.7, at which point IPTG was added to a final concentration of 0.5 mM and growth was allowed to continue at 16° C. for an additional 12-16 hours. Cells were harvested by centrifugation at 4,000×g for 20 minutes at 4° C.

[0549] Cascade and TniQ-Cascade were purified as follows. Cell pellets were resuspended in Cascade Lysis Buffer (50 mM Tris-Cl, pH 7.5, 100 mM NaCl, 0.5 mM PMSF, EDTA-free Protease Inhibitor Cocktail tablets (Roche), 1 mM DTT, 5% glycerol) and lysed by sonication with a sonic dismembrator (Fisher) set to 40% amplitude and 12 minutes total process time (cycles of 10 seconds on and 20 seconds off, for a total of 4 minutes on and 8 minutes off). Lysates were clarified by centrifugation at 15,000×g for 30 minutes at 4° C. Initial purification was performed by immobilized metal-ion affinity chromatography with Ni-NTA Agarose (Qiagen) using NiNTA Wash Buffer (50 mM Tris-Cl, pH 7.5, 100 mM NaCl, 10 mM imidazole, 1 mM DTT, 5% glycerol) and NiNTA Elution Buffer (50 mM Tris-Cl pH 7.5, 100 mM NaCl, 300 mM imidazole, 1 mM DTT, 5% glycerol). The His₁₀-MBP fusion was removed by incubation with TEV protease overnight at 4° C. in NiNTA Elution Buffer, and complexes were further purified by anion exchange chromatography on an AKTApure system (GE Healthcare) using a 5 mL HiTrap® Q HP Column (GE Healthcare) with a linear gradient from 100% Buffer A (20 mM Tris-Cl, pH 7.5, 100 mM NaCl, 1 mM DTT, 5% glycerol) to 100% Buffer B (20 mM Tris-Cl, pH 7.5, 1 M NaCl, 1 mM DTT, 5% glycerol) over 20 column volumes. Pooled fractions were identified by SDS-PAGE analysis and concentrated, and the sample was further refined by size exclusion chromatography over one or two tandem Superose 6 Increase 10/300 columns (GE Healthcare) equilibrated with Cascade Storage Buffer (20 mM Tris-Cl, pH 7.5, 200 mM NaCl, 1 mM DTT, 5% glycerol). Fractions were pooled, concentrated, snap frozen in liquid nitrogen, and stored at −80° C.

[0550] TniQ was purified similarly, except the Lysis, NiNTA Wash, and NiNTA Elution Buffers contained 500 mM NaCl instead of 100 mM NaCl. Separation by ion exchange chromatography was performed on a 5 mL HiTrap® SP HP Column (GE Healthcare) using the same Buffer A and Buffer B as above, and the final size exclusion chromatography step was performed on a HiLoad Superdex® 75 16/600 column (GE Healthcare) in Cascade Storage Buffer. The TniQ protein used in TniQ-Cascade binding experiments (FIG. 8E) contained an N-terminal StrepII tag.

### Mass Spectrometry Analysis.

[0551] 0.5-5 μg of total protein were separated on 4-20% gradient SDS-PAGE and stained with Imperial Protein Stain (Thermo Scientific). In-gel digestion was performed essentially as described by Shevchenko, A., et al. (Nat Protoc 1, 2856-2860 (2006), incorporated herein by reference), with minor modifications. Protein gel slices were excised, washed with 1:1 acetonitrile: 100 mM ammonium bicarbonate (v/v) for 30 minutes, dehydrated with 100% acetonitrile for 10 minutes, and dried in a speed-vac for 10 minutes without heat. Gel slices were reduced with 5 mM DTT for 30 minutes at 56° C. and then alkylated with 11 mM iodoacetamide for 30 minutes at room temperature in the dark. Gel slices were washed with 100 mM ammonium bicarbonate and 100% acetonitrile for 10 minutes each, and excess acetonitrile was removed by drying in a speed-vac for 10 minutes without heat. Gel slices were then rehydrated in a solution of 25 ng/μl trypsin in 50 mM ammonium bicarbonate for 30 minutes on ice, and trypsin digestion was performed overnight at 37° C. Digested peptides were collected and further extracted from gel slices in MS Extraction Buffer (1:2 5% formic acid/acetonitrile (v/v)) with high-speed shaking. Supernatants were dried down in a speed-vac, and peptides were dissolved in a solution containing 3% acetonitrile and 0.1% formic acid.

[0552] Desalted peptides were injected onto an EASY-Spray PepMap RSLC C18 50 cm×75 μm column (Thermo Scientific), which was coupled to the Orbitrap Fusion Tribrid mass spectrometer (Thermo Scientific). Peptides were eluted with a non-linear 100-minute gradient of 5-30% MS Buffer B (MS Buffer A: 0.1% (v/v) formic acid in water; MS Buffer B: 0.1% (v/v) formic acid in acetonitrile) at a flow rate of 250 nL/min. Survey scans of peptide precursors were performed from 400 to 1575 m/z at 120K FWHM resolution (at 200 m/z) with a 2×10⁵ ion count target and a maximum injection time of 50 milliseconds. The instrument was set to run in top speed mode with 3-second cycles for the survey and the MS/MS scans. After a survey scan, tandem MS was performed on the most abundant precursors exhibiting a charge state from 2 to 6 of greater than 5×10³ intensity by isolating them in the quadrupole at 1.6 Th. CID fragmentation was applied with 35% collision energy, and resulting fragments were detected using the rapid scan rate in the ion trap. The AGC target for MS/MS was set to 1×10⁴ and the maximum injection time limited to 35 milliseconds. The dynamic exclusion was set to 45 seconds with a 10-ppm mass tolerance around the precursor and its isotopes. Monoisotopic precursor selection was enabled.

[0553] Raw mass spectrometric data were processed and searched using the Sequest HT search engine within the Proteome Discoverer 2.2 software (Thermo Scientific) with custom sequences and the reference Escherichia coli BL21 (DE3) strain database downloaded from Uniprot. The default search settings used for protein identification were as follows: two mis-cleavages for full trypsin, with fixed carbamidomethyl modification of cysteine and oxidation of methionine; deamidation of asparagine and glutamine and acetylation on protein N-termini were used as variable modifications. Identified peptides were filtered for a maximum 1% false discovery rate using the Percolator algorithm, and the PD2.2 output combined folder was uploaded in Scaffold (Proteome Software) for data visualization. Spectral counting was used for analysis to compare the samples.

gRNA Analysis and RNA-Seq.

[0554] To analyze the nucleic acid component co-purifying with Cascade and TniQ-Cascade, nucleic acids were isolated by phenol-chloroform extraction, resolved by 10% denaturing urea-PAGE, and visualized by staining with SYBR® Gold (Thermo Scientific). Analytical RNase and DNase digestions were performed in 10 μL reactions with ˜4 pmol nucleic acid and either 10 μg RNase A (Thermo Scientific) or 2 Units DNase I (NEB), and were analyzed by 10% denaturing urea-PAGE and SYBR® Gold staining.

[0555] RNA-seq was performed generally as described in Heidrich, N., et al., Methods Mol Biol 1311, 1-21 (2015), incorporated herein by reference. Briefly, RNA was isolated from Cascade and TniQ-Cascade complexes by phenol-chloroform extraction, ethanol precipitated, and 5′-phosphorylated/3′-dephosphorylated using T4 polynucleotide kinase (NEB), followed by clean-up using the ssDNA/RNA Clean & Concentrator Kit (Zymo Research). A ssDNA universal Illumina® adapter containing 5′-adenylation and 3′-dideoxycytidine modifications (Table 5) was ligated to the 3′ end with T4 RNA Ligase 1 (NEB), followed by hybridization of a ssDNA reverse transcriptase primer and ligation of ssRNA universal Illumina® adapter to the 5′ end with T4 RNA Ligase 1 (NEB). cDNA was synthesized using Maxima H Minus Reverse Transcriptase (Thermo Scientific), followed by PCR amplification using indexed p5/p7 primers. Illumina® sequencing was performed using a NextSeq® mid output kit with 150-cycle single-end reads and automated demultiplexing and adapter trimming (Illumina®). Individual bases with Phred quality scores under 20 (corresponding to a base miscalling rate of >1%) were changed to ‘N,’ and only reads with at least half the called bases above Q20 were retained for subsequent analysis. Reads were aligned to the gRNA expression plasmid used for recombinant Cascade and TniQ-Cascade expression and purification.

### TniQ-Cascade Binding Experiments.

[0556] Binding reactions (120 μL) contained 1 μM Cascade and 5 μM StrepII-tagged TniQ, and were prepared in Cascade Storage Buffer and incubated at room temperature for 30 minutes, prior to being loaded into a 100 μL sample loop on an AKTApure system (GE Healthcare). Reactions were resolved by size exclusion chromatography over a Superose 6 Increase 10/300 column (GE Healthcare) in Cascade Storage Buffer, and proteins in each peak fraction were acetone precipitated and analyzed by SDS-PAGE. Control reactions lacked either Cascade or TniQ.

### Tn-Seq Experiments.

[0557] Transposition experiments were performed as described above, except pDonor contained two point mutations in the transposon right end that introduced an MmeI restriction site (FIGS. 13A-13B). Colonies from triple antibiotic LB-agar plates containing IPTG (typically numbering in the range of 10²-10³) were resuspended in 4 mL fresh LB medium, and 0.5 mL (corresponding to ˜2×10⁹ cells) was used for genomic DNA (gDNA) extraction with the Wizard® Genomic DNA Purification Kit (Promega). This procedure typically yielded 50 μL of 0.5-1.5 μg/μL gDNA, which is a mixture of the E. coli circular chromosome (4.6 Mbp, copy number of 1), pDonor (3.6 kb, copy number 100+), pTnsABC (6.9 kb, copy number ˜20-40), and pQCascade (8.4 kb, copy number ˜20-40).

[0558] NGS libraries were prepared in parallel on 96-well plates, as follows. First, 1 μg of gDNA was digested with 4 Units of MmeI (NEB) for 12 hours at 37° C. in a 50 μL reaction containing 50 μM S-adenosyl methionine and 1× CutSmart Buffer, prior to heat inactivation at 65° C. for 20 minutes. MmeI cleaves the transposon 17/19 nucleotides (nt) outside of the terminal repeat, leaving 2-nt 3′-overhangs. Reactions were cleaned up using 1.8× Mag-Bind TotalPure NGS magnetic beads (Omega) according to the manufacturer's instructions, and eluted using 30 μL of 10 mM Tris-Cl, pH 7.0. MmeI-digested gDNA was ligated to a double-stranded i5 universal adapter containing a terminal 5′-NN-3′ overhang (FIG. 101) in a 20 μL ligation reaction containing 16.86 μL of MmeI-digested gDNA, 280 nM adapter, 400 Units of T4 DNA ligase (NEB), and 1×T4 DNA Ligase Buffer. Reactions were incubated at room temperature for 30 minutes, before being cleaned up with magnetic beads as before. To reduce the degree of pDonor contamination within the NGS libraries, since pDonor also contains the full-length transposon with an MmeI site, a unique HindIII restriction site just outside the transposon right end within pDonor was used. The entirety of the adapter-ligated gDNA sample was thus digested with 20 Units of HindIII (NEB) in a 34.4 μL reaction for one hour at 37° C., before a heat inactivation step at 65° C. for 20 minutes. Magnetic bead-based DNA clean-up was performed as before.

[0559] Adapter-ligated transposons were enriched in a PCR-1 step using a universal i5 adapter primer and a transposon-specific primer containing a universal i7 adapter as 5′ overhang. Reactions were 25 μL in volume and contained 16.75 μL of HindIII-digested gDNA, 200 μM dNTPs, 0.5 μM primers, 1×Q5® Reaction Buffer, and 0.5 Units Q5® Hot Start High-Fidelity DNA Polymerase (NEB). Amplification was allowed to proceed for 25 cycles, with an annealing temperature of 66° C. Reaction products were then diluted 20-fold into a second 20 μL polymerase chain reaction (PCR-2) containing indexed p5/p7 primers, and this was subjected to 10 additional thermal cycles using an annealing temperature of 65° C. After verifying amplification for select libraries by analytical gel electrophoresis, barcoded reactions were pooled and resolved by 2% agarose gel electrophoresis, DNA was isolated by Gel Extraction Kit (Qiagen), and NGS libraries were quantified by qPCR using the NEBNext Library Quant Kit (NEB). Illumina® sequencing was performed using a NextSeq® mid output kit with 150-cycle single-end reads and automated demultiplexing and adapter trimming (Illumina®). Individual bases with Phred quality scores under 20 (corresponding to a base miscalling rate of >1%) were changed to ‘N,’ and only reads with at least half the called bases above Q20 were retained for subsequent analysis.

[0560] Tn-seq libraries with the mariner/Himar1C9 were prepared as for the V. cholerae, but with the following changes. Transformation reactions utilized BL21 (DE3) cells and a single pDonor plasmid, which encodes a KanR-containing mariner transposon with MmeI sites on both ends, and a separate expression cassette for the Himar1C9 transposase controlled by a lac promoter. Transformed cells were recovered at 37° C. for one hour before being plated on bioassay dishes containing 100 μg/mL carbenicillin, yielding on the order of 5×10⁴ colonies. Cells were resuspended in 20 mL fresh LB medium after a single 16-hour overnight growth, and the equivalent of ˜2×10⁹ cells were used for genomic DNA (gDNA) extraction. NGS libraries were prepared as described above, except the restriction enzyme digestion reactions to deplete pDonor contained 20 Units of BamHI and KpnI instead of HindIII.

### Tn-Seq Data Visualization and Bioinformatic Analysis.

[0561] The software application Geneious Prime was used to further filter reads based on three criteria: that read lengths correspond to the expected products resulting from MmeI cleavage of and adapter ligation to genomically integrated transposons (112-113-bp for the V. cholerae transposon and 87-88-bp for mariner); that each read contain the expected transposon end sequence (allowing for one mismatch); and that the transposon-flanking sequence (trimmed to 17-bp for the V. cholerae transposon and 14-bp for mariner) map perfectly to the reference genome. Mapping to the E. coli BL21 (DE3) genome (GenBank accession CP001509) was done using the function ‘Map to reference’ and the following settings. Mapper: Geneious; Fine tuning: None (fast/read mapping); Word length: 17; Maximum mismatches: 0%; Maximum Ambiguity: 1. The ‘Map multiple best matches’ setting was set to either ‘none,’ effectively excluding any reads except those that map uniquely to a single site (referred to as ‘uniquely mapping reads’), or to ‘all,’ which allows reads to map to one or multiple sites on the E. coli genome (referred to as ‘processed mapping reads’). Both sets of reads were exported as fastq files and used for downstream analysis using custom Python scripts. Many reads removed in this process perfectly mapped to the donor plasmid, indicating that HindIII or BamHI/KpnI cleavage was insufficient to completely remove contaminating pDonor-derived sequences. Coverage data for ‘processed mapping reads’ were exported to generate FIG. 4F.

[0562] To visualize the genome-wide integration site distribution for a given sample, ‘uniquely mapping reads’ were mapped to the same E. coli reference genome but this time with custom Python scripts. The integration site for each read was defined as the genomic coordinate (with respect to the reference genome) corresponding to the 3′ edge of the mapped read. For visualization purposes, integration events within 5-kb bins were computed and plotted as genome-wide histograms in FIGS. 4C, 4, 14A and 14B. Plots were generated using the Matplotlib graphical library. The sequence logo in FIG. 4D was generated using WebLogo 3.

[0563] Plots comparing integration sites among biological replicates (FIG. 13D-131) were generated by either binning the genome wide histograms based on gene annotations (mariner) using GenBank accession CP001509, or into 100-bp bins (V. cholerae transposon). For the V. cholerae transposon, the bins were shifted so that the 3′ end of the Cascade target site for each sample would correspond to the start of its corresponding 100-bp bin. Linear regression and bivariate analysis for the mariner plot (FIG. 13D) was performed using the SciPy statistical package.

[0564] To analyze the primary integration site for each sample, custom Python scripts were used to map ‘processed mapping reads’ to a 600-bp genomic window surrounding the corresponding genomic target site. For reads mapping to the opposite strand as the target (i.e. for the T-LR orientation, in which integration places the ‘left’ transposon end closest to the Cascade binding site), the integration site was shifted 5-bp from the 3′ edge of the target site in order to account for the 5-bp TSD. The primary integration site within this 600-bp window was defined by the largest number of mapped reads, while it was arbitrarily designated that the 100 bp centered at the primary integration site as the ‘on-target’ window. The percentage of on-target integration for each sample was calculated as the number of reads resulting from transposition within the 100-bp window, divided by the total number of reads mapping to the genome. The ratio of integration in one orientation versus the other was also determined; this parameter only utilized on-target reads, and was calculated as the number of reads resulting from integration of the transposon ‘right’ end closest to the Cascade binding site (T-RL), divided by the number reads resulting from integration of the transposon left end closest to the Cascade target site (T-LR). The distribution of integration around the primary site was plotted for both orientations for each sample, and was used to generate FIGS. 4E and 14C-E. This analysis was susceptible to potential biases from differential efficiencies in the ligation of 5′-NN-3′ overhang adapters, which was not considered.

### Statistics and Reproducibility.

[0565] Analytical PCRs resolved by agarose gel electrophoresis gave similar results in three independent replicates (FIGS. 1D, 1E, 1I, 2A and 4A) or were analyzed by gel electrophoresis once (FIGS. 2E, 6D, 7B, 7D, and 7F) but verified with qPCR for three independent replicates (FIG. 2E). Sanger sequencing and next-generation sequencing of PCR amplicons was performed once (FIGS. 1F, 1G, 3E, 3G, 4E, 6E, 7A, and 7E). SDS-PAGE experiments were performed for two or more different preparations of the same protein complexes and yielded similar results (FIGS. 2B and 8B). Protein binding reactions were performed and analyzed by SDS-PAGE once (FIG. 8E). Nucleic acid extraction from purified protein preparations and urea-PAGE analysis of samples with and without RNase or DNase treatment was performed twice, with similar results (FIGS. 2C and 8D); RNA sequencing was performed once (FIG. 2D).

### Example 2

### RNA-Guided DNA Integration in Eukaryotic Cells Via CRISPR-Tn7 Systems

[0566] Tn7-like transposons that encode CRISPR-Cas systems can be used for programmable DNA integration, in which the nuclease-deficient CRISPR-Cas machinery (either Cascade from Type I systems, or C2c5 from Type V systems) coordinates with Tn7 transposon-associated proteins to mediate RNA-guided DNA targeting and DNA integration, respectively.

[0567] Herein are described experiments to heterologously express the machinery in human cells, in order to perform RNA-guided DNA integration experiments in eukaryotic cells. The expression constructs and experimental details described below may be used for performing RNA-guided DNA integration in immortalized human cell lines (e.g. HEK293T). They may be modified to enable expression and reconstitution of RNA-guided DNA integration in other eukaryotic cell types, e.g., by altering the promoters, codon optimization, nuclear localization signals, vector designs, and delivery methods, among other parameters. The other eukaryotic cells where CRISPR-Tn7 may be expressed and reconstituted include, but are not limited to, other Homo sapiens cell lines (immortalized or primary, T-cells, B-cells, hematopoietic stem cells, embryonic stem cells, induced pluripotent stem cells, etc.), cells derived from M. musculus, Caenorhabditis elegans, Drosophila melanogaster, Saccharomyces cerevisae, and more.

[0568] There are currently large limitations and risks associated with the use of CRISPR-Cas9 and other programmable nucleases for insertion of large gene cargos into eukaryotic genomes.

[0569] Gene integration with CRISPR-Cas9 requires introduction of DSBs and the use of synthetic repair donor templates carrying appropriate designed homology arms. Homology donors work with the highest efficiency when supplied as recombinant AAV vectors or ssDNA, but these are also extremely laborious to produce [see e.g. H. Li, M. D. Leonetti, BioRxiv, 1-24 (2017), incorporated herein by reference]. Furthermore, cloning of dsDNA donor templates with homology arms can be time-consuming and tedious. In contrast, the method described herein obviates the need for homology arms to be redesigned for every new target site, because the targeting comes exclusively from the guide RNA, and the same donor, namely the engineered transposon donor DNA, is used for any arbitrary target site.

[0570] Gene integration with CRISPR-Cas9 and donor templates relies on homology-directed repair (HDR) for proper integration of the donor template. However, HDR efficiencies are known to be extremely low in many different cell types, and the DSBs that precede HDR are always repaired in heterogeneous ways across a cell population: some cells undergo HDR at one or both alleles, whereas far more cells undergo non-homologous end joining (NHEJ) at one or both alleles, which leads to small insertions or deletions being introduced at the target site [reviewed in: K. S. Pawelczak, N. S. Gavande, P. S. Vander Vere-Carozza, J. J. Turchi, ACS Chem Biol. 13, 389-396 (2018), incorporated herein by reference]. This means that, across a cell population (e.g. as would be edited in a therapeutic or experimental application), only a small percentage of cells undergo the desired site-specific gene integration, whereas a far greater percentage undergoes heterogeneous repairs. In contrast, an RNA-guided transposase mechanism for gene integration does not proceed through a DSB intermediate, and thus does not allow for NHEJ-mediate insertions or deletions to arise. Rather, targeting of the DNA leads to direct integration through a concerted transesterification reaction, such that targeting involves direct integration without any other off-pathway alternatives.

[0571] The endogenous machinery for HDR is virtually absent in post-mitotic cells (i.e. non-dividing cells, which do not undergo DNA replication), such as neurons and terminally differentiated cells. Thus, there are no options for precise, targeted gene integration in these cell types. The RNA-guided DNA integration method described herein, on the other hand, offers an alternative approach for precise integration in these cell types.

[0572] DSBs, which are necessary precursors for CRISPR-Cas9 mediated HDR pathways for gene integration, are known to pose hazards for cells. DSBs at off-target sites introduce off-target mutations; DSBs can provoke a DNA damage response [E. Haapaniemi, S. Botla, J. Persson, B. Schmierer, J. Taipale, Nat. Med. 24, 927-930 (2018)]; DSBs can lead to selection for p53 null cells, which have increased risk of tumorigenesis [R. J. Ihry et al., Nat. Med. 24, 939-946 (2018)]; and DSB repair at on-target sites can cause large-scale gene deletions, inversions, or chromosome translocations [M. Kosicki, K. Tomberg, A. Bradley, Nat Biotechnol. 36, 765-771 (2018)]. The method for integrating DNA in an RNA-guided target-specific manner obviates the need to introduce DSBs, and thus precludes all of the above hazards.

[0573] Many gene therapy products, either commercialized or in clinical trials, use randomly integrating viruses to ferry therapeutics into the genome of patient cells [Naldini et al., Science 353, 1101-1102 (2016)]. With the method described herein, these therapeutic genes are integrated into known safe harbor loci within the genome, where stable expression can be assured, and risks of insertional mutagenesis are entirely avoided [M. Bokhoven et al., J Virol. 83, 283-294 (2009)].

[0574] In one embodiment, the system described herein can be used for cancer immunotherapy, a rapidly growing and promising area for cancer treatment. Recent advances have showcased the potential for CAR-T therapy, in which chimeric antigen receptors are integrated into T cells designed to recognize particular epitopes particular to certain cancer types [C. H. June, M. Sadelain, N. Engl. J. Med. 379, 64-73 (2018)]. Recent work has shown that CAR-T cells have increased efficacy when the CAR gene is integrated into defined sites in the genome, rather than random sites [J. Eyquem et al., Nature. 543, 113-117 (2017)].

### Expression Vector Design

[0575] In one embodiment, the guide RNA (gRNA) and CRISPR- and Tn7-associated genes are all expressed from individual plasmids and delivered transiently (FIG. 18). The gRNA is encoded as a repeat-spacer-repeat CRISPR array, and is cloned downstream of a human U6 promoter; other promoters may be used, and in other embodiments, the CRISPR array may be expressed from promoters recognized by RNA Polymerase II, for example if the CRISPR array is encoded within the 3′ untranslated region (UTR) of a coding mRNA, allowing for export to and processing in the cytoplasm. The CRISPR-associated (cas) and Tn7-associated (tns and tni) genes are cloned downstream of a cytomegalovirus (CMV) enhancer and promoter, allowing for expression by RNA Pol II, though in other embodiments the promoter may be replaced with other constitutive mammalian promoters, or inducible promoters, allowing for small molecule control of gene expression. The above vector designs require co-transfection of all the components, in order to reconstitute the CRISPR-Tn7 machinery inside eukaryotic cells, though other strategies are possible too (e.g. stable transfection via integration of one or more of the components, viral transduction, etc.).

[0576] In another embodiment, the CRISPR- and Tn7-associated machineries are expressed from two polycistronic vectors (FIG. 19), which are also delivered to cells via transient transfection; in other embodiments, the expression constructs are stably transfected or integrated via viral transduction. In experiments expressing the CRISPR-Tn7 system from Type IF variant Vibrio cholerae, one polycistronic vector is denoted pTnsABC_hCO and encodes TnsA, TnsB, and TnsC; and a second polycistronic vector is named pQCascade_hCO and encodes TniQ, Cas8 (Cas8 is a natural fusion of Cas8 and Cas5 polypeptides, hereafter referred to simply as Cas8 in this Example for Type IF variants), Cas7, Cas6, and the gRNA, encoded as a CRISPR array (i.e. repeat-spacer-repeat). The polycistronic vectors exhibit the following design criteria:
[0577] a single CMV promoter drives expression of a single polypeptide fusion construct;
[0578] each protein-coding gene encodes an N-terminal nuclear localization signal (NLS);
[0579] each protein-coding gene within the fusion construct, except the 3′-terminal gene, encodes a C-terminal 2A virally derived ‘ribosome skipping’ peptide; and
[0580] a human U6 promoter drives expression of the precursor CRISPR RNA.

[0581] The 2A peptides are derived from Thosea asigna virus (T2A), but may also be derived from other viral 2A sequences; these peptides cause the ribosome to anomalously terminate translation at the C-terminus of the peptide but then immediately reinitiate translation on the following codon, allowing multiple polypeptide products to be expressed from a single mRNA transcript (Liu, Z. et al. Sci Rep 7, 2193 (2017)). In other embodiments of this approach, different promoters are used, the NLS is moved from the N-terminus to the C-terminus, the NLS is removed or additional NLSs are added, and/or the order of genes within a polycistronic construct is rearranged. One or more polycistronic vectors may also be co-transfected with expression vectors encoding individual components (an “add-back” strategy), in order to provide higher levels of expression of particular molecular components. The CRISPR may also be separately encoded on its own plasmid, and pQCascade_hCO may be modified so that it no longer encodes the hU6-driven CRISPR RNA.

### Alternative Delivery Approaches for CRISPR-Tn7 Machinery

[0582] The CRISPR- and Tn7-associated machinery may also be delivered via mRNA transfection. In one embodiment, individual capped and polyadenylated mRNAs encoding each of the CRISPR- and Tn7-associated proteins are co-transfected, together with a CRISPR RNA (FIG. 20). The CRISPR RNA may be delivered as a fully mature gRNA; it may be delivered as a precursor CRISPR RNA containing complete repeat sequences on the 5′ and 3′ ends, which would be processed by Cas6 in cells; it may contain additional chemical modifications for increased cellular stability. In another embodiment, the CRISPR RNA is delivered similarly, together with capped and polyadenylated mRNAs encoding multiple protein products connected with 2A linker sequences, as described above.

[0583] The CRISPR- and Tn7-associated machinery may also be delivered as purified protein and ribonucleoprotein (RNP) components. TniQ-Cascade, TnsA, TnsB, and TnsC are purified separately and then mixed together, prior to transfection.

[0584] The CRISPR RNA may also be encoded on a synthetic repeat-spacer-repeat CRISPR array that is generated by PCR amplification and transfected directly as a linear DNA, rather than being cloned into pQCascade_hCO.

### Experimental Strategy for Reconstituting RNA-Guided DNA Integration in HEK293T Cells

[0585] Experiments to monitor RNA-guided DNA integration activity by CRISPR-Tn7 in eukaryotic cells are performed with multiple distinct approaches.

[0586] In one embodiment (see FIG. 21A), the donor DNA is present on a circular plasmid, denoted pDonor, and the target DNA, defined as the DNA sequence complementary to the gRNA, is present on a separate circular plasmid, denoted pTarget. HEK293T cells are co-transfected with the expression vectors (described above) and both pDonor and pTarget, leading to excision of the genetic cargo from pDonor (defined by the Tn7 transposon end sequences) and integration of the genetic cargo a fixed distance downstream of the target DNA on pTarget. Detection of successful integration events is described below. pDonor and pTarget may also be transfected together with mRNA and CRISPR RNA components, or with purified protein and RNP components.

[0587] In another embodiment (see FIG. 21B), the donor DNA is present on a circular plasmid, denoted pDonor, and the target DNA, defined as the DNA sequence complementary to the gRNA, is present on the Homo sapiens genome. HEK293T cells are co-transfected with the expression vectors (described above) and pDonor, leading to excision of the genetic cargo from pDonor (defined by the Tn7 transposon end sequences) and integration of the genetic cargo a fixed distance downstream of the target DNA within the genome. Detection of successful integration events is described below. pDonor may also be transfected together with mRNA and CRISPR RNA components, or with purified protein and RNP components.

[0588] The donor DNA, which contains the right and left transposon end sequences flanking the genetic cargo of interest, may also be delivered as part of a viral vector (e.g. rAAV), or as a linear double-stranded DNA (dsDNA). In the context of a linear dsDNA, the transfected construct may terminate immediately with the transposon left and right ends, or may contain additional flanking sequence.

### Transfection and HEK293T Cell Culturing

[0589] HEK293T cells are passaged and plated at 10% confluency (media: DMEM, 10% Hi-FBS, 1% PSG). Approximately 16 hrs after passaging, the cells are transfected with the CRISPR-Tn7 machinery, pDonor, and pTarget (when present), according to the various design parameters described above. Cells are cultured for minimum 24 hrs, and no longer than to confluency. When confluent, the cells are lifted from the plate and divided into thirds, one third is taken for flow cytometry, one third is lysed and the cell lysate is used as template for PCR-based assays, the last third are passaged without further splitting. Cells selected for flow cytometry analysis are gated to achieve live singlets, and from that gate, visualized on a GFP axis by mCherry axis. As described in the following section, in one embodiment, the population of HEK293T cells in the mCherrynegative/EGFP-positive quadrant should have undergone successful RNA-guided DNA integration, and these cells may be sorted (either bulk or single-cell), grown to confluency, and lysed for PCR-based assays. Multiple transfection methods may be used, including, but not limited to, lipofection (e.g. Lipofectamine) or nucleofection (e.g. by electroporation).

Strategies for Selecting for and/or Detecting RNA-Guided DNA Integration Events

[0590] In one embodiment, termed a ‘promoter capture’ assay (FIG. 22A) the genetic cargo within the transposon ends on pDonor encode an EGFP fluorescent reporter protein downstream of a puromycin resistance gene (PuroR) and 2A peptide. The expression construct contains a 5′ Kozak sequence and 3′ polyadenylation site, but no promoter element, such that expression of the reporter protein is absent within the pDonor context. However, upon RNA-guided DNA integration downstream of a DNA target site complementary to the gRNA, in which the integration site is downstream of an endogenous promoter element, the reporter gene becomes expressed. This expression may be selected for by culturing cells in the presence of puromycin, since only successful integration events will lead to expression of PuroR and thus puromycin resistance. Integration may also be detected using flow cytometry, by assaying an EGFP-positive cell population.

[0591] In a related embodiment, the target and/or integration site is embedded within an orthogonal fluorescence reporter gene, such as mCherry (FIG. 22B). In this case, the HEK293T cells initially express mCherry, but upon RNA-guided DNA integration, the mCherry open reading frame (ORF) is disrupted by the integration of the genetic cargo, and EGFP becomes expressed by virtue of inserting downstream of the promoter element that previously drove mCherry expression.

[0592] Thus, successful RNA-guided DNA integration manifests itself as a phenotype change from EGFP-negative/mCherry-positive to EGFP-positive/mCherry-negative. This approach may be performed by targeting mCherry encoded on pTarget, or mCherry that is genomically integrated.

[0593] In another embodiment, pDonor contains a fluorescent reporter gene within the transposon ends, as well as its own internal promoter element (FIG. 22C). The fluorescent reporter protein is expressed from pDonor upon transfection, but the cells are cultured for a sufficiently long time, such that pDonor is eventually lost due to the transient transfection. In this scenario, the dividing cells will only maintain reporter protein expression if the integration event occurs, either within the genome, or within pTarget that also contains an SV40 origin and is thus replicated by dividing HEK293T cells.

[0594] Other embodiments leverage additional selection strategies, such as other fluorescence reporter genes and/or other drug resistance markers.

Screening of Additional gRNAs

[0595] Beyond targeting sites within mCherry, additional gRNAs are chosen to demonstrate successful RNA-guided DNA integration within alternative genomic contexts, for example, euchromatin and heterochromatin regions, coding and noncoding regions, and template and nontemplate strands within coding regions. Additional gRNAs are also chosen to screen mismatch sensitivity, PAM specificity, integration site specificity, and other parameters of the RNA-guided DNA integration reaction.

### Genotypic Detection and Characterization of RNA-Guided DNA Integration in Eukaryotic Cells

[0596] HEK293T cells are cultured for a certain time after transfection and may be subjected to drug selection or fluorescence-activated cell sorting (FACS), in order to enrich for a cell population that is likely to have undergone RNA-guided DNA integration. Cells are then harvested, lysed, and subjected to PCR analysis. Primer pairs are designed to selectively amplify the integrated allele, in which one primer has a binding site within the transposon genetic cargo, and another primer has a binding site within the DNA flanking the integration site; this may reside on pTarget, for plasmid-to-plasmid transposition experiments, or it may reside on the genome, for plasmid-to-genome transposition experiments. An amplicon is successfully generated by PCR in the case of an RNA-guided DNA integration event, whereas no amplicon is generated in the absence of targeted integration.

[0597] In order to determine the precise site of integration by Sanger sequencing, amplified DNA from the analytical PCR reactions described above are excised after separation by gel electrophoresis, DNA is isolated by Gel Extraction Kit (Qiagen), and samples are submitted to and analyzed by GENEWIZ®. Analysis of the resulting Sanger sequencing data reveals the junction between the transposon ends (encoded by pDonor) and the targeted DNA. By analyzing this junction across experiments with multiple distinct gRNAs, and comparing the relative position of the integration site with the target site specified by the gRNA, the parameters governing the distance between the Cascade binding site (dictated by the gRNA) and the integration site (where TnsB catalyzes transposition into) in eukaryotic cells can be readily determined. Coupled with the choice of genome- and transposon cargo-specific primers, these experiments also reveal the preferred orientation of integration; namely, whether the Tn7 transposon is directed to integrate in only one orientation, or whether both orientations are sampled during the integration reaction.

[0598] In order to define the integration site with more precision, PCR amplicons are also analyzed by next-generation sequencing (NGS). PCR-1 products are generated as described above, except that primers contain universal Illumina® adapters as 5′ overhangs and the cycle number is reduced to 20. These products are then diluted 20-fold into a fresh polymerase chain reaction (PCR-2) containing indexed p5/p7 primers and subjected to 10 additional thermal cycles using an annealing temperature of 65° C. Amplification is verified by analytical gel electrophoresis, and barcoded reactions are pooled and resolved by 2% agarose gel electrophoresis, DNA is isolated by Gel Extraction Kit (Qiagen), and NGS libraries are quantified by qPCR using the NEBNext® Library Quant Kit (NEB). Illumina® sequencing is performed using a NextSeq® mid output kit with 150-cycle single-end reads and automated demultiplexing and adapter trimming (Illumina®). Individual bases with Phred quality scores under 20 (corresponding to a base miscalling rate of >1%) are changed to ‘N,’ and only reads with at least half the called bases above Q20 are retained for subsequent analysis.

[0599] To determine the integration site distribution for a given sample, the following steps are performed using custom Python scripts. First, reads are filtered based on the requirement that they contain 20-bp of perfectly matching transposon end sequence. 15 bp of sequence immediately flanking the transposon are then extracted and aligned to a 1-kb window of the DNA sequence surrounding the gRNA-matching genomic target site. The distance between the nearest transposon-genome junction and the PAM-distal edge of the 32-bp target site is determined. Histograms are plotted after compiling these distances across all the reads within a given library.

[0600] A qPCR approach is used to quantify transposition efficiency, allowing for careful comparison across large parameter space, including but not limited to different protein and/or gRNA variants, different transfection conditions, different expression construct designs, different delivery methods, and different culturing and selection methods. Pairs of transposon- and genome-specific primers are designed to amplify a ˜140-240-bp fragment resulting from RNA-guided DNA integration at the expected locus in either orientation. A separate pair of genome-specific primers is designed to amplify a Homo sapiens reference gene for normalization purposes. qPCR reactions (10 μL) contain 5 μL of SsoAdvanced Universal SYBR® Green Supermix (BioRad), 1 μL H2O, 2 μL of 2.5 M primers, and 2 μL of diluted HEK293T lysate. Reactions are prepared in 384-well clear/white PCR plates (BioRad), and measurements are performed on a CFX384 Real-Time PCR Detection System (BioRad) using the following thermal cycling parameters: polymerase activation and DNA denaturation (98° C. for 2.5 min), 40 cycles of amplification (98° C. for 10 s, 62° C. for 20 s), and terminal melt-curve analysis (65-95° C. in 0.5° C./5 s increments).

[0601] In another qPCR analysis protocol, each biological sample is analyzed in three parallel reactions: one reaction contains a primer pair for the H. sapiens reference gene, a second reaction contains a primer pair for one of the two possible integration orientations, and a third reaction contains a primer pair for the other possible integration orientation. Transposition efficiency for each orientation is then calculated as 24Cq, in which ΔCq is the Cq difference between the experimental reaction and the control reaction. Total transposition efficiency for a given experiment is calculated as the sum of transposition efficiencies for both orientations.

### Defining Genome-Wide Specificity of RNA-Guided DNA Integration in Eukaryotic Cells

[0602] In order to probe genome-wide transposition, transposon-insertion sequencing (Tn-seq) is performed. Specifically, RNA-guided DNA integration experiments are performed as described above, except pDonor contain point mutations in the transposon ends that introduced MmeI restriction site. After extracting genomic and plasmid DNA from harvested HEK293T cells, NGS libraries are prepared in parallel on 96-well plates, as follows. First, 1 μg of gDNA is digested with 4 Units of MmeI (NEB) for 12 hours at 37° C. in a 50 μL reaction containing 50 μM S-adenosyl methionine and 1× CutSmart Buffer, prior to heat inactivation at 65° C. for 20 minutes. MmeI cleaves the transposon directly outside of the terminal repeat, leaving 2-nt 3′-overhangs.

[0603] Reactions are cleaned up using 1.8× Mag-Bind TotalPure NGS magnetic beads (Omega) according to the manufacturer's instructions, and elutions are performed using 30 μL of 10 mM Tris-Cl, pH 7.0. MmeI-digested gDNA is ligated to a double-stranded i5 universal adapter containing a terminal 5′-NN-3′ overhang in a 20 μL ligation reaction containing 16.86 μL of MmeI-digested gDNA, 280 nM adapter, 400 Units of T4 DNA ligase (NEB), and 1×T4 DNA Ligase Buffer. Reactions are incubated at room temperature for 30 minutes, before being cleaned up with magnetic beads as before. To reduce the degree of pDonor contamination within the NGS libraries, since pDonor also contains the full-length transposon with an MmeI site, the presence of a unique HindIII restriction site just outside the transposon right end within pDonor is utilized. The entirety of the adapter-ligated gDNA sample is thus digested with 20 Units of HindIII (NEB) in a 34.4 μL reaction for one hour at 37° C., before a heat inactivation step at 65° C. for 20 minutes. Magnetic bead-based DNA clean-up is performed as before.

[0604] Adapter-ligated transposons are enriched in a PCR-1 step using a universal i5 adapter primer and a transposon-specific primer containing a universal i7 adapter as 5′ overhang. Reactions are 25 μL in volume and contained 16.75 μL of HindIII-digested gDNA, 200 μM dNTPs, 0.5 μM primers, 1×Q5® Reaction Buffer, and 0.5 Units Q5® Hot Start High-Fidelity DNA Polymerase (NEB). Amplification is allowed to proceed for 25 cycles, with an annealing temperature of 66° C. Reaction products are then diluted 20-fold into a second 20 μL polymerase chain reaction (PCR-2) containing indexed p5/p7 primers, and this is subjected to 10 additional thermal cycles using an annealing temperature of 65° C. After verifying amplification for select libraries by analytical gel electrophoresis, barcoded reactions are pooled and resolved by 2% agarose gel electrophoresis, DNA is isolated by Gel Extraction Kit (Qiagen), and NGS libraries are quantified by qPCR using the NEBNext® Library Quant Kit (NEB). Illumina® sequencing is performed using a NextSeq® mid output kit with 150-cycle single-end reads and automated demultiplexing and adapter trimming (Illumina®). Individual bases with Phred quality scores under 20 (corresponding to a base miscalling rate of >1%) are changed to ‘N,’ and only reads with at least half the called bases above Q20 are retained for subsequent analysis. Analysis of Tn-seq data is performed, as described previously.

[0605] In an alternative method for determining the genome-wide specificity of RNA-guided DNA integration, genomic and plasmid DNA is purified from harvested HEK293T cells, the DNA is randomly fragmented, and then Illumina® adapters are ligated onto free ends after end repair (e.g. using the NEBNext® Illumina® library prep kit). Then, targeted PCR is used to selectively amplify only those DNA molecules containing the transposon and genetic cargo sequence, by combining an Illumina® adapter-specific primer with a transposon or cargo-specific primer. These PCR amplicons are then further amplified to append indices, and the Illumina® NGS and analysis is performed generally as described above.

### Example 3

### Optimization and Streamlining of Expression Plasmid Construction for RNA-Guided DNA Integration in Bacterial Cells

[0606] Tn7-like transposons that encode CRISPR-Cas systems can be used for programmable DNA integration, in which the nuclease-deficient CRISPR-Cas machinery (either Cascade from Type I systems, or C2c5 from Type V systems) coordinates with Tn7 transposon-associated proteins to mediate RNA-guided DNA targeting and DNA integration, respectively.

[0607] Initial experiments with the Tn7 transposon from Type IF variant Vibrio cholerae strain HE-45, expressed the CRISPR- and Tn7-associated molecular components from two different expression vectors driven by T7 promoters, termed pQCascade (TniQ-Cas8-Cas7-Cas6 and gRNA) and pTnsABC (TnsA-TnsB-TnsC). Cas8 is a natural fusion of Cas8 and Cas5 polypeptides, hereafter referred to simply as Cas8 in this Example for Type IF variants. The mini-transposon construct, containing a genetic cargo cloned in between the transposon left and right ends, was encoded on a third plasmid termed pDonor. See FIG. 1B.

[0608] The molecular components may also be combined into fewer plasmids without negatively affecting RNA-guided DNA integration efficiency. In one embodiment, combining all the components onto one unified cassette driven by a single promoter allows for convenient and straightforward modular designs of further expression plasmid derivations, including: the use of different promoters, such as promoters that would be recognized in many different bacterial species; the use of different plasmid backbones with variable copy numbers; and the use of conjugative plasmids that mediate transfer between phylogenetically distinct bacterial strains. Furthermore, such all-in-one single plasmids remove the need for combining multiple compatible plasmid backbones and multiple antibiotic resistance cassettes, while also streamlining the bacterial transformation process. In some embodiments, all the CRISPR- and Tn7-associated machinery are encoded on the same plasmid as the mini-transposon donor DNA itself, but are not contained within the transposon ends; in this format, the molecular components act to mobilize the donor DNA, but they do not travel with it. In other embodiments, the CRISPR- and Tn7-associated machinery are encoded directly within the mini-transposon donor DNA itself, such that mobilization of the transposon leads to mobilization of the machinery that is required for RNA-guided DNA integration. This allows the transposon to act autonomously.

### Reduction of Promoter and Plasmid Components for RNA-Guided DNA Integration

[0609] Within a three-plasmid delivery approach to reconstitute RNA-guided DNA integration, the expression of the guide RNA (gRNA) and the Type IF variant TniQ-Cas8-Cas7-Cas6 operon on the original pQCascade plasmid (pSL0828) were tested with a single T7 promoter, rather than by two tandem T7 promoters (FIG. 23). The gRNA was encoded by a synthetic CRISPR array comprising a repeat-spacer-repeat array; the precursor CRISPR RNA transcript was processed enzymatically by Cas6 into the mature CRISPR RNA (crRNA), or gRNA. Two designs were generated: pQCascade-B (pSL1016) encodes the CRISPR array upstream of the TniQ-Cas8-Cas7-Cas6 operon, whereas pQCascade-C (pSL1018) encodes the TniQ-Cas8-Cas7-Cas6 operon upstream of the CRISPR array (FIGS. 23A and 23B). Chemically competent E. coli BL21 (DE3) cells containing the V. cholerae pDonor (pSL0527) and pTnsABC (pSL0283) plasmids (FIG. 23C, as previously described) were individually transformed with either pQCascade-B or pQCascade-C by heat shock, and after recovering cells in fresh LB medium at 37° C., for one hour, cells were plated on triple antibiotic LB-agar plates containing 100 μg/mL carbenicillin, 50 μg/mL kanamycin, and 50 μg/mL spectinomycin. After overnight growth at 37° C. for 16 hours, hundreds of colonies were scraped from the plates, and a portion was resuspended in fresh LB medium before being re-plated on triple antibiotic LB-agar plates as before, except for supplementation with 0.1 mM IPTG to induce protein expression. Solid media culturing was chosen over liquid culturing in order to avoid growth competition and population bottlenecks. Cells were incubated an additional 24 hours at 37° C. and grew as densely spaced colonies, before being scraped, resuspended in LB medium, and prepared for subsequent analysis.

[0610] Optical density measurements at 600 nm were taken of scraped colonies that had been resuspended in LB medium, and ˜3.2×10⁸ cells (the equivalent of 200 μL of OD₆₀₀=2.0) were transferred to a 96-well plate. Cells were pelleted by centrifugation at 4000×g for 5 minutes and resuspended in 80 μL of H2O, before being lysed by incubating at 95° C. for 10 minutes in a thermal cycler. The cell debris was pelleted by centrifugation at 4000×g for 5 minutes, and 10 μL of lysate was removed and diluted with 90 μL of H2O to generate 10-fold lysate dilutions for qPCR analysis. Pairs of transposon and genome-specific primers were designed to amplify a ˜140-240-bp fragment resulting from RNA-guided DNA integration at the expected gRNA-4 lacZ locus in either orientation. A separate pair of genome-specific primers was designed to amplify an E. coli reference gene (rssA) for normalization purposes. qPCR reactions (10 μL) contained 5 μL of SsoAdvanced Universal SYBR® Green Supermix (BioRad), 1 μL H₂O, 2 μL of 2.5 M primers, and 2 μL of 10-fold diluted lysate prepared from scraped colonies.

[0611] Reactions were prepared in 384-well clear/white PCR plates (BioRad), and measurements were performed on a CFX384 Real-Time PCR Detection System (BioRad) using the following thermal cycling parameters: polymerase activation and DNA denaturation (98° C. for 2.5 min), 40 cycles of amplification (98° C. for 10 s, 62° C. for 20 s), and terminal melt-curve analysis (65-95° C. in 0.5° C./5 s increments).

[0612] The results from qPCR analysis (FIG. 23D) demonstrated that RNA-guided DNA integration with pQCascade-B and pQCascade-C exhibited similar efficiencies as the original pQCascade plasmid with tandem promoters previously described. Expression of both the gRNA and the Type IF variant TniQ-Cas8-Cas7-Cas6 operon can be driven by a single T7 promoter, and crRNA processing by the Cas6 subunit does not substantially affect protein synthesis.

[0613] Expression and delivery conditions in which the total number of separate plasmids required for RNA-guided DNA integration was reduced to two were tested. The TnsA-TnsB-TnsC operon was expressed on the same plasmid as the gRNA and TniQ-Cas8-Cas7-Cas6 operon; denoted pTnsABC-QCascade-CRISPR, or pTQC (FIG. 24). The TnsA-TnsB-TnsC operon from pTnsABC was cloned either downstream of the TniQ-Cas8-Cas7-Cas6 operon on pQCascade (pSL0828) to generate pTQC-A (pSL1020, FIG. 24A), or upstream of the TniQ-Cas8-Cas7-Cas6 operon on pQCascade-C (pSL1018) to generate pTQC-C (pSL1024, FIG. 24C). Starting with pTQC-A, the T7 promoter in between the CRISPR and the protein operon was removed to generate the single promoter design of pTQC-B (pSL1022, FIG. 24B). Starting with pTQC-C, the T7 promoter in between the TnsA-TnsB-TnsC operon and the TniQ-Cas8-Cas7-Cas6 operon was removed to generate the single promoter design of pTQC-D (pSL1026, FIG. 24D). Both single-promoter plasmids (pTQC-B and pTQC-D) were designed so that the CRISPR array was positioned at either the 5′ or 3′ end of the mRNA transcript, so that precursor CRISPR RNA processing by Cas6 would not disrupt the protein-coding genes within the mRNA, since the remaining transcript would be left intact (FIG. 24E).

[0614] Chemically competent E. coli BL21 (DE3) cells containing the V. cholerae pDonor (pSL0527) were individually transformed with either pTQC-A, pTQC-B, PTQC-C, or pTQC-D by heat shock, and after recovering cells in fresh LB medium at 37° C. for one hour, cells were plated on double antibiotic LB-agar plates containing 100 μg/mL carbenicillin and 50 μg/mL spectinomycin. After overnight growth at 37° C. for 16 hours, hundreds of colonies were scraped from the plates, and a portion was resuspended in fresh LB medium before being re-plated on double antibiotic LB-agar plates as before, this time supplemented with 0.1 mM IPTG to induce protein expression. Cells were subsequently lysed, and RNA-guided DNA integration efficiencies were determined using qPCR of cell lysates as described above.

[0615] RNA-guided DNA integration efficiencies determined by qPCR (FIG. 24F) show that all four pTQC plasmid designs resulted in efficiencies comparable to, or significantly higher than, integration using the original three-plasmid system previously described (compare ˜70% efficiency with pTQC-B to ˜40% efficiency with the three-plasmid system utilizing pSL0828 as pQCascade). Between the two designs for single-promoter expression (pTQC-B and pTQC-D), pTQC-B demonstrates superior activity. Thus, for subsequent streamlined expression plasmid designs, the CRISPR-TniQ-Cas8-Cas7-Cas6-TnsA-TnsB-TnsC ordering of components in a single expression cassette from pTQC-B was used.

[0616] Having shown that expression of the entire set of CRISPR- and Tn7-associated components necessary for RNA-guide DNA integration can be achieved in one streamlined cassette driven by a single T7 promoter, an “all-in-one” single plasmid approach was designed for performing RNA-guided DNA integration. In this embodiment, the streamlined V. cholerae cassette from pTQC-B (pSL1022) is cloned onto the pDonor plasmid (pSL0527), either outside of the minitransposon itself to generate pAIO-A (pSL1120, FIG. 25A), or inside the mini-transposon itself, to generate pAIO-B (pSL1123, FIG. 25B). Chemically competent E. coli BL21 (DE3) cells are transformed with either pAIO-A or pAIO-B by heat shock, and cells are plated on single antibiotic LB-agar plates containing 100 μg/mL carbenicillin. After overnight growth at 37° C. for 16 hours, hundreds of colonies are scraped from the plates, and a portion is resuspended in fresh LB medium before being re-plated on antibiotic LB-agar plates as before, this time supplemented with 0.1 mM IPTG to induce protein expression. Subsequent lysis and qPCR assays are performed as described above in order to determine the transposition efficiencies of the pAIO plasmids. Successful RNA-guided DNA integration with this approach enables transformation of E. coli or other bacterial species to be accomplished with just a single expression vector, which comprises all the necessary CRISPR-Tn7 machinery and donor DNA to direct RNA-guided DNA integration.

### Optimization of Promoter and Vector Copy Number for RNA-Guided DNA Integration

[0617] After validating the baseline RNA-guided DNA integration activity of the Vibrio cholerae CRISPR-Tn7 system using the all-in-one pAIO-A plasmid design (pSL1120, FIG. 25A), the optimal expression level of the system is determined by simultaneously varying the strength of the single promoter driving expression of the entire cassette, in parallel with varying the copy number of the all-in-one plasmid. This series of experiments highlights the modularity of the all-in-one design: with the pAIO-A plasmid as a starting point, different promoters and plasmid backbones can be cloned and compared in parallel.

[0618] The set of pAIO plasmid designs is generated and cloned within the pUC19 parent vector backbone, with CRISPR-Tn7 expression driven by each of four distinct constitutive E. coli promoters of decreasing strengths: J23119, J23101, J23105 and J23114. These promoters are derived from the Registry of Standard Biological Parts and have been previously validated (Yan, Q. & Fong, S. S. J Biol Eng 11, 33 (2017)). In other embodiments, a greater set of promoters are also tested, combined with further changes to the precise expression construct, include gene order, untranslated region (UTR) design, and codon usage, among other parameters. Each of the complete cassettes is cloned onto 3 other parent plasmid backbones: pSC101 (˜5 copies/cell), PACYC (˜10-12 copies/cell), and pBBR1 (˜15-40 copies/cell), to generate a panel of 16 all-in-one plasmids that combine four promoter strengths with four copy number levels (FIG. 26A). The RNA-guided DNA integration efficiency enabled with each plasmid design is tested in E. coli BL21 (DE3) cells E. coli and determined by qPCR, as described above. In other embodiments, a greater set of parent vector backbones is tested, including conjugative plasmids, plasmids whose replication is restricted to certain E. coli strains, and temperature-sensitive plasmids that can be cured from a population of bacteria.

[0619] In order to determine the limits to the cargo size that can be efficiently mobilized by the all-in-one expression approach using pAIO-A, the 0.98 kb original cargo on pAIO-A is replaced with cargo sequences of various lengths that have been described previously in the three-plasmid approach: 2.00 kb (pSL1168), 3.26 kb (pSL1169), 4.24 kb (pSL1170), 5.32 kb (pSL1171), and 10.1 kb (pSL1172; see FIG. 26B). The transposition efficiencies for the 5 and 10 kb cargos, which have potential for industrial applications such as insertion of metabolic pathways, have been previously shown to drop to less than 15% of the efficiencies of the 0.98 kb cargo in the three-plasmid system; however, using the more efficient all-in-one approach may improve these efficiencies for larger cargos. A “minimal” cargo comprising 172-bp and the necessary transposon end sequences, as previously described, is also tested for RNA-guided DNA integration efficiency.

### RNA-Guided DNA Integration in Other Bacterial Species

[0620] With the optimization and streamlining of expression and delivery described above, the CRISPR-Tn7 system may be further leveraged to achieve RNA-guided DNA integration in other bacterial hosts, with a focus on both industrial biotechnology applications, and on targeting of clinically and biomedically relevant human pathogenic bacterial species. Starting with all-in-one plasmids in which the vector backbone is chosen to show broad host range compatibility with the bacterial species being targeted, the single promoter is swapped out with additional promoters that are chosen to match the species of interest. Further promoters may be selected that are known to be broadly active in phylogenetically distinct bacteria, such as the diverse bacteria that inhabit the gut microbiome (Johns et al. Nat Meth 15, 323-329 (2018); Ronda et al. Nat Meth 16, 167-170 (2019)). A list of candidate bacterial species and strains that may be selected for heterologous RNA-guided DNA integration experiments is listed in Table 1; some E. coli strains are chosen as model strains that are known to be deficient in homologous recombination (HR), so that experiments are performed to show that RNA-guided DNA integration with CRISPR-Tn7 does not rely on any HR host factors. In other embodiments, additional promoters are selected, and additional bacterial species are selected for heterologous reconstitution of RNA-guided DNA integration with the CRISPR-Tn7 system.

TABLE 1
Potential bacterial species and strains for heterologous RNA-guided DNA integration

| | | | | | Gram | Relevant |
|---|---|---|---|---|---|---|
| Phylum | Genus | Species | Serovar | Strain | Stain | Mutation(s) |
| Proteobacteria | Escherichia | coli | N/A | MG1655 | Negative | None |
| Proteobacteria | Escherichia | coli | N/A | BW25113 | Negative | None |
| Proteobacteria | Escherichia | coli | N/A | JS2669-1 | Negative | RecA |
| | | | | | | knockout |
| Proteobacteria | Escherichia | coli | N/A | JW2788-1 | Negative | RecB |
| | | | | | | knockout |
| Proteobacteria | Escherichia | coli | N/A | JW2790-1 | Negative | RecC |
| | | | | | | knockout |
| Proteobacteria | Escherichia | coli | N/A | JW2787-1 | Negative | RecD |
| | | | | | | knockout |
| Proteobacteria | Escherichia | coli | N/A | JW3677-1 | Negative | RecF |
| | | | | | | knockout |
| Proteobacteria | Escherichia | coli | N/A | JW2703-2 | Negative | MutS |
| | | | | | | knockout |
| Proteobacteria | Escherichia | coli | N/A | ER | Negative | AsnA, asnB |
| | | | | | | knockout |
| Firmicutes | Bacillus | subtilis | N/A | 168 | Positive | None |
| Proteobacteria | Vibrio | cholerae | O1 | E1Tor | Negative | None |
| | | | | N19691 | | |
| Proteobacteria | Pseudomonas | aeruginosa | N/A | PA01 | Negative | None |
| Proteobacteria | Pseudomonas | aeruginosa | N/A | PAK | Negative | None |
| Proteobacteria | Salmonella | enterica | typhi | ty2 | Negative | None |
| Proteobacteria | Klebsiella | pneuomoniae | N/A | KPPR1 | Negative | None |
| Firmicutes | Staphylococcus | aureus | N/A | RN4220 | Positive | None |
| Actinobacteria | Corynebacterium | glutamicum | N/A/ | ATCC | Positive | None |
| | | | | 13032 | | |

### Example 4

RNA-Guided DNA Integration Using Tn7-Like Transposons that Encode and are Programmed by Type V CRISPR-Cas Systems

### System Selection

[0621] A psi-BLASTp analysis using the C2c5 protein from Geminocystis sp. NIES-3709 as a query (NCBI accession ID: WP_066116114.1) was performed. After 2 iterations, a list of 403 candidate C2c5 homologs distributed throughout various bacterial phyla (see SEQ ID NOs: 450-847) was compiled. From a multiple sequence alignment of these homologs, a phylogenetic tree was generated and homologs were prioritized for further analysis and investigation that were distributed throughout the phylogenetic tree (see FIG. 28). A set of 20 homologs were prioritized for further analysis. First, pairwise sequence alignments were performed between the 20 homologs, in order to avoid selecting any two homologs for further testing that were highly similar, and thus, expected to have similar function. The genomic loci surrounding each c2c5 gene was investigated, and the following parameters were extracted (see FIGS. 57 and 58): the presence and length of the flanking CRISPR array; the length of the C2c5 gene; whether the Tn7-like transposon encoding c2c5 appears to be integrated proximal to a tRNA gene; whether c2c5 is flanked by a merR gene; the nature of the genetic cargo that is also contained within the putative Tn7-like transposon; the length of the Tns operon (which consists of TnsB, TnsC, and TniQ; any other peculiarities of the system. Criteria that excluded a given system from being prioritized for experimental study included gene/operon lengths that deviated largely from the average, or the absence of critical components such as the CRISPR array. merR was frequently found adjacent to the c2c5 gene. Based on this gene being annotated as encoding a transcriptional regulator, merR may control expression of C2c5 and serve as a point of regulation.

[0622] Based on the analyses, a selection of five transposon-associated Type V CRISPR-Cas systems was made. These systems derive from: Anabaena variabilis ATCC 29413 (Ava), Cyanobacterium aponinum IPPAS B-1202 (Cap), Filamentous cyanobacterium CCP2 (Fcy), Nostoc punctiforme PCC 73102 (Npu), and Scytonema hofmannii PCC 7110 (Sho). A schematic of the gene organization for these systems is shown in FIG. 29. Note that Anabaena variabilis ATCC 29413 appears to also be referred to by a different species name, Trichormus variabilis ATCC 29413 (see GenBank CP000117.1).

### Cloning Approach

[0623] For initial experiments, operons encoding tnsB, tnsC, and tniQ were synthesized and cloned downstream of a T7 promoter in the pCOLADuet-1 backbone, hereafter referred to as pTnsBCQ. The c2c5 gene and a CRISPR consisting of two repeats and a single spacer were cloned downstream of separate T7 promoters in the entry vector pCDFDuet-1, hereafter referred to as pC2c5. The Tn7-like transposon ends and a chloramphenicol resistance gene were cloned as cargo into pUC19, hereafter referred to as pDonor. A schematic of pTnsBCQ, pC2c5, and pDonor is presented in FIG. 30A, and the actual plasmid sequences for each of these plasmids, for each of the 5 systems prioritized for experimental investigation can be found in FIG. 57. The sequences for each gene and the resulting protein component can be found in SEQ ID NOs: 410-449.

### Transposition Assays

[0624] The same experimental set-up as used for RNA-guided DNA integration by the TniQ-Cascade complex in the V. cholerae Type I-F CRISPR-Cas system was used to test the selected Tn7-like transposons that encode C2c5 systems (schematized in FIG. 30B). In brief, chemically competent BL21 (DE3) cells harboring two out of three plasmids used in the final transposition assays (pTnsBCQ, pC2c5, and pDonor) were prepared. The third plasmid was introduced in a new transformation reaction by heat shock, and after recovering cells in fresh LB medium at 37° C. for one hour, cells were plated on triple antibiotic LB-agar plates containing 100 μg/mL carbenicillin, 50 μg/mL kanamycin, and 50 μg/mL spectinomycin. After overnight growth at 37° C. for 16 hours, hundreds of colonies were scraped from the plates, and a portion was resuspended in fresh LB medium before being re-plated on triple antibiotic LB-agar plates as before, supplemented with 0.1 mM IPTG to induce protein expression. Cells were incubated an additional 24 hours at 37° C. before being scraped and resuspended in LB medium. Aliquots were taken so that each sample contains ˜3.2×10⁸ cells (based on optical density measurements) and cells were pelleted by centrifugation at 4000×g for 5 minutes, resuspended in 80 μL of H₂O, before being lysed by incubating at 95° C. for 10 minutes in a thermal cycler. The cell debris was pelleted by centrifugation at 4000×g for 5 minutes, and 10 μL of lysate was used for serial dilution with 90 μL of H₂O to generate 10- and 100-fold lysate dilutions for qPCR and PCR analysis, respectively. PCR products were generated with Q5® Hot Start High-Fidelity DNA Polymerase (NEB) using 5 μL of 100-fold diluted lysate per 12.5 μL reaction volume serving as template. Reactions contained 200 μM dNTPs and 0.5 μM primers, and were generally subjected to 30 thermal cycles with an annealing temperature of 66° C. Primer pairs contained one genome-specific primer and one transposon-specific primer, to exclusively detect integration events. PCR amplicons were resolved by 1-2% agarose gel electrophoresis and visualized by staining with SYBR® Safe (Thermo Scientific).

[0625] Similar to previous experiments with the V. cholerae Tn7 transposon encoding a Type I-F variant CRISPR-Cas system, the integration site of the C2c5-containing Tn7-like transposons was reprogrammed by changing the spacer sequence within the CRISPR array, in order to encode a gRNA with distinct target specificity. By cloning different spacer sequences into pC2c5, integration was directed to the lacZ gene in the E. coli BL21 (DE3) genome (see Table 2). Type V systems, in general, have a preference for T-rich PAMs and, therefore, ‘TTT’, ‘TTG’, ‘TTC’, and ‘TTTT’ (SEQ ID NO: 385) PAMs were initially tested. Additional PAM variants may also be viable as PAM recognition can be somewhat promiscuous, depending on the Cas protein variant.

[0626] Preliminary data for the Tn7-like transposon from Cyanobacterium aponinum IPPAS B-1202 (Cap) is shown in FIGS. 31A and 31B. The presence of specific amplicons in the experimental samples (lanes 4-5), but an absence of specific amplicons in the negative control lane, in which the spacer was replaced with non-targeting sequence that does not have a match in the E. coli genome, indicated that DNA integration is occurring proximal to the lacZ primer binding site. The positive control on the same gel (+C) was the transposition product from experiments with the V. cholerae Tn7 transposon guided by TniQ-Cascade programmed with gRNA-4, which was in the immediate vicinity of the DNA sites targeted with the panel of gRNAs tested with C2c5 in these experiments.

TABLE 2
Sequence of DNA sites targeted by unique C2c5 gRNAs, all found
within the lacZ gene in E. coli

| Target | | PAM | |
|---|---|---|---|
| ID | Description | (5′→3′) | Spacer (5′→3′) |
| nt | C2c5, BsaI stuffer, | — | CGAGACCTCAATTGGTCTCC (SEQ ID NO: 386) |
| | non-targeting | | |
| 1 | C2c5, lacZ sense, | GTTT | CACCCTGCCATAAAGAAACTGTTACCCGTAGGTAGTC |
| | TTTPAM (lacZ-1) | (SEQ ID | (SEQ ID NO: 387) |
| | | NO: 380) | |
| 2 | C2c5, lacZ antisense, | GTTG | CCACTCGCTTTAATGATGATTTCAGCCGCGCTGTACT |
| | TTG PAM (lacZ-2) | (SEQ ID | (SEQ ID NO: 388) |
| | | NO: 381) | |
| 3 | C2c5, lacZ sense, | TTTG | TGTAGTCGGTTTATGCAGCAACGAGACGTCACGGAAA |
| | TTG PAM (lacZ-3) | (SED ID | (SEQ ID NO: 389) |
| | | NO: 382) | |
| 4 | C2c5, lacZ antisense, | TTTC | ATCTGTGGTGCAACGGGCGCTGGGTCGGTTACGGCCA |
| | TTC PAM (lacZ-4) | (SEQ ID | (SEQ ID NO: 390) |
| | | NO: 383) | |
| 5 | C2c5, lacZ sense, | CTTC | CAGATAACTGCCGTCACTCCAGCGCAGCACCATCACC |
| | TTC PAM (lacZ-5) | (SEQ ID | (SEQ ID NO: 391) |
| | | NO: 384) | |
| 6 | C2c5, lacZ antisense, | TTTT | CCGTGACGTCTCGTTGCTGCATAAACCGACTACACAA |
| | TTTT PAM (lacZ-6) | (SEQ ID | (SEQ ID NO: 392) |
| | | NO: 385) | |

### Defining the Integration Site for Transposition Mediated by C2c5

[0627] In order to determine the precise site of integration by Sanger sequencing, amplified DNA from the analytical PCR reactions described above are excised after separation by gel electrophoresis, DNA is isolated by Gel Extraction Kit (Qiagen), and samples are submitted to and analyzed by GENEWIZ®. Analysis of the resulting Sanger sequencing data reveals the junction between the mini-Tn7-like transposon (encoded by pDonor) and the E. coli genome. By analyzing this junction across experiments with multiple distinct gRNAs, and comparing the relative position of the integration site with the target site specified by the gRNA, the parameters governing the distance between the C2c5 binding site (dictated by the gRNA) and the integration site (where TnsB catalyzes transposition into) can be readily determined. Coupled with the choice of genome- and transposon cargo-specific primers, these experiments also identify the preferred orientation of integration; namely, whether the Tn7-like transposon guided by C2c5-gRNA is directed to integrate in only one orientation, or whether both orientations are sampled during the integration reaction.

[0628] In order to define the integration site with more precision, PCR amplicons are also analyzed by next-generation sequencing (NGS). PCR-1 products are generated as described above, except that primers contain universal Illumina® adapters as 5′ overhangs and the cycle number is reduced to 20. These products are then diluted 20-fold into a fresh polymerase chain reaction (PCR-2) containing indexed p5/p7 primers and subjected to 10 additional thermal cycles using an annealing temperature of 65° C. Amplification is verified by analytical gel electrophoresis, and barcoded reactions are pooled and resolved by 2% agarose gel electrophoresis, DNA is isolated by Gel Extraction Kit (Qiagen), and NGS libraries are quantified by qPCR using the NEBNext® Library Quant Kit (NEB). Illumina® sequencing is performed using a NextSeq® mid output kit with 150-cycle single-end reads and automated demultiplexing and adapter trimming (Illumina®). Individual bases with Phred quality scores under 20 (corresponding to a base miscalling rate of >1%) are changed to ‘N,’ and only reads with at least half the called bases above Q20 are retained for subsequent analysis.

[0629] To determine the integration site distribution for a given sample, the following steps are performed using custom Python scripts. First, reads are filtered based on the requirement that they contain 20-bp of perfectly matching transposon end sequence. 15 bp of sequence immediately flanking the transposon are then extracted and aligned to a 1-kb window of the E. coli BL21 (DE3) genome (GenBank accession CP001509) surrounding the gRNA-matching genomic target site. The distance between the nearest transposon-genome junction and the PAM-distal edge of the 37-bp target site is determined. Histograms are plotted after compiling these distances across all the reads within a given library.

[0630] These analyses define the distance between the DNA target site specified by the gRNA, and the integration site where the transposon itself is integrated. Experiments are performed for the five different C2c5-encoding Tn7-like transposons described above, across a panel of unique gRNAs targeting a variety of distinct target sites with distinct protospacer adjacent motifs (PAMs).

qPCR Analysis of Transposition Efficiency

[0631] In order to quantify transposition efficiency, allowing for careful comparison across different protein and/or gRNA variants, a qPCR approach is used. Pairs of transposon- and genome-specific primers are designed to amplify a ˜140-240-bp fragment resulting from RNA-guided DNA integration at the expected locus in either orientation. A separate pair of genome-specific primers is designed to amplify an E. coli reference gene (rssA) for normalization purposes. qPCR reactions (10 μL) contain 5 μL of SsoAdvanced Universal SYBR® Green Supermix (BioRad), 1 μL H₂O, 2 μL of 2.5 μM primers, and 2 μL of 10-fold diluted lysate prepared from scraped colonies, as described for the PCR analysis above. Reactions are prepared in 384-well clear/white PCR plates (BioRad), and measurements are performed on a CFX384 Real-Time PCR Detection System (BioRad) using the following thermal cycling parameters: polymerase activation and DNA denaturation (98° C. for 2.5 min), 40 cycles of amplification (98° C. for 10 s, 62° C. for 20 s), and terminal melt-curve analysis (65- 95° C. in 0.5° C./5 s increments).

[0632] In order to benchmark the qPCR assay, lysates are prepared from a control BL21 (DE3) strain containing pDonor and both empty expression vectors (pCOLADuet-1 and pCDFDuet-1), and from strains that undergo clonal integration into the lacZ locus. By testing the primer pairs with each of these samples diluted across five orders of magnitude, and then determining the resulting Cq values and PCR efficiencies, the experimental and reference amplicons are verified as amplified with similar efficiencies, and that the primer pairs selectively amplify the intended transposition product. Variable transposition efficiencies across five orders of magnitude (ranging from 0.002-100%) are simulated by mixing control lysates and clonally-integrated lysates in various ratios, and is used to show accurate and reproducible detection of transposition products in either orientation, at levels >0.01%. Variable integration orientation biases are simulated by mixing clonally-integrated lysates together in varying ratios together with control lysates, and use this to show that these can also be accurately measured.

[0633] In another qPCR analysis protocol, each biological sample is analyzed in three parallel reactions: one reaction contains a primer pair for the E. coli reference gene, a second reaction contains a primer pair for one of the two possible integration orientations, and a third reaction contains a primer pair for the other possible integration orientation. Transposition efficiency for each orientation is then calculated as 24Cq, in which ΔCq is the Cq difference between the experimental reaction and the control reaction. Total transposition efficiency for a given experiment is calculated as the sum of transposition efficiencies for both orientations.

Defining the Genetic Requirements of RNA-Guided DNA Integration by Tn7-Like Transposons that Encode C2c5

[0634] In order to define the essential requirements for RNA-guided DNA integration with Tn7-like transposons that encode C2c5, pTnsBCQ and pC2c5 are altered so that each gene (tnsB, tnsC, tniQ, and c2c5) is deleted one at a time. The PCR and qPCR assays described above are then used to quantify transposition efficiency for each altered plasmid that lacks one of the key genes. In cases where transposition efficiency drops to or close to 0%, these data indicate that the gene deleted in that experiment is essential for RNA-guided DNA integration by that particular Tn7-like transposon. The role of individual genes can be tested by including point mutations in tnsB predicted to abrogate transposon excision and integration enzymatic activities, or mutations in the zinc finger domain of TniQ, or mutations in the regions of C2c5 predicted to be involved in DNA binding. A resulting drop in transposition efficiency may indicate that these protein products are likely necessary for efficient RNA-guided DNA integration.

[0635] In a further series of experiments, the transposon ends for each Tn7-like transposon tested is systematically truncated, in order to define the minimum essential recognition sequences that are required for faithful recognition of the engineered transposon by Tn7-associated proteins. For example, putative TnsB binding sites can be readily identified by manual inspection of the inverted repeat nature of both the transposon left and right ends, and removal of these binding sites may cause a drop in transposition efficiency. By truncating the transposon ends in 1-, 5- and 10-bp increments, a minimal transposon end sequence can be experimentally defined. This information guides the future engineering of the transposon for development of RNA-guided DNA integration-based tools. These experiments are carried out for each of the Tn7-like transposons encoding C2c5 that show RNA-guided DNA integration activity.

[0636] An additional experiment involves defining the cargo size that can be effectively mobilized by the Tn7- and CRISPR-associated machinery. Starting with pDonor for each of the active systems, the internal cargo is either shortened through molecular cloning, or lengthened by cloning additional cargo sequences inside of the transposon ends, and the transposition assays described above are repeated. By using PCR and/or qPCR as a read-out for RNA-guided DNA integration, the relative efficiencies for each of the engineered mini-Tn7-like transposon cargos can be compared. These experiments define both the minimum and maximum genetic payload that can be mobilized by the system of interest.

Determining the Precise gRNA Molecule that Directs DNA Binding by C2c5

[0637] To analyze the nucleic acid component that directs DNA binding by C2c5, small-RNA sequencing from E. coli lysates that undergo transposition is performed. Specifically, nucleic acids of a specific size range (e.g. <100, <90, <80, <70, or <60-nt) are resolved by gel electrophoresis (10% denaturing urea-PAGE), visualized by staining with SYBR® Gold (Thermo Scientific), extracted from the gel, eluted into aqueous buffer, and isolated by phenol-chloroform extraction. Analytical RNase and DNase digestions are performed in 10 μL reactions with ˜4 pmol nucleic acid and either 10 μg RNase A (Thermo Scientific) or 2 Units DNase I (NEB), and are analyzed by 10% denaturing urea-PAGE and SYBR® Gold staining. RNA-seq is performed generally as described (Heidrich, N., et al., Methods Mol Biol 1311, 1-21 (2015)). Briefly, RNA is 5′-phosphorylated/3′-dephosphorylated using T4 polynucleotide kinase (NEB), followed by clean-up using the ssDNA/RNA Clean & Concentrator Kit (Zymo Research). A ssDNA universal Illumina® adapter containing 5′-adenylation and 3′-dideoxycytidine modifications is ligated to the 3′ end with T4 RNA Ligase 1 (NEB), followed by hybridization of a ssDNA reverse transcriptase primer and ligation of ssRNA universal Illumina® adapter to the 5′ end with T4 RNA Ligase 1 (NEB). cDNA is synthesized using Maxima H Minus Reverse Transcriptase (Thermo Scientific), followed by PCR amplification using indexed p5/p7 primers. Illumina® sequencing is performed using a NextSeq® mid output kit with 150-cycle single-end reads and automated demultiplexing and adapter trimming (Illumina®). Individual bases with Phred quality scores under 20 (corresponding to a base miscalling rate of >1%) are changed to ‘N,’ and only reads with at least half the called bases above Q20 are retained for subsequent analysis. Reads are aligned to pC2c5, and the sharp boundaries of the coverage indicate processing sites for the gRNA, which is presumed to be catalyzed by a ribonuclease domain within C2c5, based on homology with other effectors from Type V CRISPR-Cas systems such as Cpf1, Cas12c, and Cas12d.

### Defining Specificity for the PAM and Target Site

[0638] In order to determine the flexibility in PAM recognition by C2c5, the gRNA for each of the different C2c5 homologs is varied, so that target sites with variable PAMs are all tested. In one embodiment, the PAMs are varied simply by tiling gRNAs in 1-bp increments along a locus of interest; in another embodiment, the gRNA is changed so that different loci are queried while the PAM is also altered. Using the qPCR approach described above, the RNA-guided DNA integration efficiency for each target site can be quantified, and comparison of the data allows robust definition of high-activity PAM sequences, as well as future avoidance of PAM sequences that show little or no activity for targeting.

[0639] In order to test the specificity of DNA targeting by RNA-guided C2c5, and the resulting impacts on DNA integration activity by the Tn7 transposase, mismatches are systematically introduced into gRNAs that target a fixed sequence in the E. coli genome. Specifically, mismatches are introduced in 1-, 2-, 3-, or 4-nt increments along the entire 37-nt length of the spacer sequence, and then the transposition experiments are performed described above. By using qPCR to quantify the resulting RNA-guided DNA integration efficiencies across the panel of gRNAs tested, the sequence specificity of DNA targeting afforded by C2c5 is determined, and any discrimination (or lack of discrimination) for mismatches in the RNA-DNA heteroduplex as a function of position along the length of the gRNA/target is identified. By performing the experiment across multiple distinct target sites, general rules for target site selection can be derived.

[0640] In further embodiments of these experiments, libraries of gRNAs are used to more exhaustively define sequence requirements upon PAM recognition and target recognition during RNA-guided DNA integration. Specifically, in a pooled library format, in which the CRISPR array is cloned within the Tn7-like transposon cargo itself, transposition is performed across a large pool of cells (e.g. 10⁶-10⁸ cells), and then transposition products are deep sequenced. By using paired-end sequencing, the integration site, as well as the particular gRNA variant that enabled integration can be determined, since the spacer sequence itself is embedded within the amplicon being sequenced. Mutagenized libraries of gRNAs are designed so that every possible single, double, triple, and quadruple mismatch is probed within a single pooled library experiment, and the resulting data analysis allow extrapolation of a richer set of rules defining target site selection during DNA binding by C2c5.

### Defining RNA-Guided DNA Integration Specificity Genome-Wide

[0641] In order to probe genome-wide transposition, transposon-insertion sequencing is performed. Specifically, transposition experiments are performed as described above, except pDonor contains point mutations in the transposon ends that introduced MmeI restriction site. Colonies from triple antibiotic LB-agar plates containing IPTG (typically numbering in the range of 10²-10³) are resuspended in 4 mL fresh LB medium, and 0.5 mL (corresponding to ˜2×10⁹ cells) is used for genomic DNA (gDNA) extraction with the Wizard® Genomic DNA Purification Kit (Promega). This procedure typically yields 50 μL of 0.5-1.5 μg/μL gDNA, which is a mixture of the E. coli circular chromosome, pDonor, pTnsBCQ, and pC2c5.

[0642] NGS libraries are prepared in parallel on 96-well plates, as follows. First, 1 μg of gDNA is digested with 4 Units of MmeI (NEB) for 12 hours at 37° C. in a 50 μL reaction containing 50 μM S-adenosyl methionine and 1× CutSmart Buffer, prior to heat inactivation at 65° C. for 20 minutes. MmeI cleaves the transposon directly outside of the terminal repeat, leaving 2-nt 3′-overhangs. Reactions are cleaned up using 1.8× Mag-Bind TotalPure NGS magnetic beads (Omega) according to the manufacturer's instructions, and elutions are performed using 30 μL of 10 mM Tris-Cl, pH 7.0. MmeI-digested gDNA is ligated to a double-stranded i5 universal adapter containing a terminal 5′-NN-3′ overhang in a 20 μL ligation reaction containing 16.86 μL of MmeI-digested gDNA, 280 nM adapter, 400 Units of T4 DNA ligase (NEB), and 1×T4 DNA Ligase Buffer. Reactions are incubated at room temperature for 30 minutes, before being cleaned up with magnetic beads as before. To reduce the degree of pDonor contamination within the NGS libraries, since pDonor also contains the full-length transposon with an MmeI site, the presence of a unique HindIII restriction site just outside the transposon right end within pDonor is utilized. The entirety of the adapter-ligated gDNA sample is thus digested with 20 Units of HindIII (NEB) in a 34.4 μL reaction for one hour at 37° C., before a heat inactivation step at 65° C. for 20 minutes. Magnetic bead-based DNA clean-up is performed as before.

[0643] Adapter-ligated transposons are enriched in a PCR-1 step using a universal i5 adapter primer and a transposon-specific primer containing a universal i7 adapter as 5′ overhang. Reactions are 25 μL in volume and contained 16.75 μL of HindIII-digested gDNA, 200 μM dNTPs, 0.5 μM primers, 1×Q5® Reaction Buffer, and 0.5 Units Q5® Hot Start High-Fidelity DNA Polymerase (NEB). Amplification is allowed to proceed for 25 cycles, with an annealing temperature of 66° C. Reaction products are then diluted 20-fold into a second 20 μL polymerase chain reaction (PCR-2) containing indexed p5/p7 primers, and this is subjected to 10 additional thermal cycles using an annealing temperature of 65° C. After verifying amplification for select libraries by analytical gel electrophoresis, barcoded reactions are pooled and resolved by 2% agarose gel electrophoresis, DNA is isolated by Gel Extraction Kit (Qiagen), and NGS libraries are quantified by qPCR using the NEBNext® Library Quant Kit (NEB). Illumina® sequencing is performed using a NextSeq® mid output kit with 150-cycle single-end reads and automated demultiplexing and adapter trimming (Illumina®). Individual bases with Phred quality scores under 20 (corresponding to a base miscalling rate of >1%) are changed to ‘N,’ and only reads with at least half the called bases above Q20 are retained for subsequent analysis.

[0644] Analysis of Tn-seq data is performed, as follows. The software application Geneious Prime is used to further filter reads based on three criteria: that read lengths correspond to the expected products resulting from MmeI cleavage of and adapter ligation to genomically integrated transposons; that each read contain the expected transposon end sequence (allowing for one mismatch); and that the transposon-flanking sequence map perfectly to the reference genome. Mapping to the E. coli BL21 (DE3) genome (GenBank accession CP001509) is done using the function ‘Map to reference’ and the following settings. Mapper: Geneious; Fine tuning: None (fast/read mapping); Word length: 17; Maximum mismatches: 0%; Maximum Ambiguity: 1. The ‘Map multiple best matches’ setting is set to either ‘none,’ effectively excluding any reads except those that map uniquely to a single site (referred to as ‘uniquely mapping reads’), or to ‘all,’ which allows reads to map to one or multiple sites on the E. coli genome (referred to as ‘processed mapping reads’). Both sets of reads are exported as fastq files and used for downstream analysis using custom Python scripts.

[0645] To visualize the genome-wide integration site distribution for a given sample, ‘uniquely mapping reads’ are mapped to the same E. coli reference genome with custom Python scripts. The integration site is defined for each read as the genomic coordinate (with respect to the reference genome) corresponding to the 3′ edge of the mapped read. For visualization purposes, integration events within 5-kb bins are computed and plotted as genome-wide histograms using the Matplotlib graphical library.

[0646] Plots comparing integration sites among biological replicates are generated by binning the genome wide histograms into 100-bp bins. The bins were shifted so that the 3′ end of the C2c5 target site for each sample corresponds to the start of its corresponding 100-bp bin.

[0647] To analyze the primary integration site for each sample, custom Python scripts are used to map ‘processed mapping reads’ to a 600-bp genomic window surrounding the corresponding genomic target site. For reads mapping to the opposite strand as the target (i.e. for the T-LR orientation, in which integration places the ‘left’ transposon end closest to the C2c5 binding site), the integration site is shifted from the 3′ edge of the target site in order to account for the target-site duplication. The primary integration site within this 600-bp window is defined by the largest number of mapped reads, while 100 bp centered at the primary integration site is defined as the ‘on-target’ window. The percentage of on-target integration for each sample is calculated as the number of reads resulting from transposition within the 100-bp window, divided by the total number of reads mapping to the genome. The ratio of integration in one orientation versus the other is determined; this parameter utilizes on-target reads, and is calculated as the number of reads resulting from integration of the transposon ‘right’ end closest to the C2c5 binding site (T-RL), divided by the number reads resulting from integration of the transposon left end closest to the C2c5 target site (T-LR). The distribution of integration around the primary site is plotted for both orientations for each sample.

### Additional Areas of Investigation

[0648] Unlike Tn7 transposon that encode Type I-F CRISPR-Cas systems, such as the V. cholerae system, the Tn7-like transposons that encode Type V-U5 CRISPR-Cas systems (C2c5) appear to lack the tnsA gene. The TnsA protein in well-studied Tn7 transposons directs cleavage of the 5′ end of the Tn7 transposon during excision, thus leaving open the possibility that Tn7-like transposons whose mobilization is guided by C2c5 may transposase through a different mechanism other than the cut-and-paste mechanism employed by E. coli Tn7 and V. cholerae RNA-guided Tn7, specifically, through replicative transposition. By designing PCR experiments to monitor the entire cargo that ends up genomically integrated, cut-and-paste versus copy-and-paste mobilization pathways can be distinguished.

[0649] Additionally, C2c5-containing Tn7-like transposons are often present next to tRNA genes in the genomes in which they reside. The above experiments indicate if these transposons retain a mechanism to transpose directly adjacent to tRNA genes.

### Example 5

### Targeted DNA Enrichment Via Programmable RNA-Guided DNA Integration

[0650] Despite the reduced cost of next-generation DNA sequencing (NGS), it remains impractical to subject large numbers of genomes, and eukaryotic genomes in particular (e.g. clinical human samples), to whole genome sequencing. Thus, it is often necessary to enrich select genomic regions of interest for targeted enrichment and sequencing, to save time, money, and data storage needs, while increasing sample throughput. As a result, considerable efforts have focused over recent years on target enrichment methods, whereby regions of interest are ‘captured’ from a purified DNA sample, before being subjected to NGS. Current target enrichment strategies can generally be group into three categories: PCR-based target enrichment, in which the choice of PCR primers allows user-defined loci to be specified; molecular inversion probes (MIPs), based on target circularization; and direct selection based on hybridization capture.

[0651] In PCR-based target enrichment, multiplex PCR may be performed to simultaneously amplify many regions in a single reaction vessel, however this often leads to high levels of nonspecific amplification, and many amplicons fail to amplify efficiently. Another major disadvantage of PCR-based methods is that amplification efficiency differs widely across distinct amplicons, and so individual PCRs must be validated prior to pooling and barcoding, so that even coverage of the PCR products of interest is achieved in downstream NGS applications. Microdroplet technology may be used, similar to emulsion PCR and other strategies may be used to improve the fidelity of PCR-based target enrichment, e.g., rhAmpSeq (Integrated DNA Technologies; Dobosy et al., BMC Biotechnol. 11, 80 (2011)).

[0652] Molecular inversion probes suffer from poor capture uniformity, and the fact that MIP oligonucleotides can be costly and difficult to obtain in large numbers.

[0653] Direct selection based on hybridization capture relies on synthetic oligonucleotides to capture desired molecules from a shotgun input library based on nucleic acid hybridization, and may be performed either on a solid support (array capture), or in solution (solution hybridization). In array capture, a DNA microarray is designed to contain short probes against the genomic regions of interest, the input sample is added to the array in a hybridization step, and after a series of washes, the captured DNA molecules are eluted and prepared for downstream NGS. In-solution capture relies on bead-based pull-down of hybrid molecules of interest, followed by elution and preparation for downstream NGS. These methods have important disadvantages, including requiring expensive hardware (in the case of on-array capture); a strong bias of fragment length on capture efficiency; severe biases against low or high G+C content DNA; poor recovery for clinical specimens that may have lower sample integrity; anomalous recovery due to issues with poor annealing and/or secondary structure, since the input DNA and probes must be denatured and used as single-stranded DNAs.

[0654] For a review of target enrichment strategies, see FIGS. 32A-32C and Mamanova et al., Nat Meth 7, 111-118 (2010).

[0655] More recently, researchers have also explored the use of CRISPR-Cas9 and dCas9-based approaches for target enrichment (see for example: Slesarev et al., Sci Rep 9, 3587 (2019); Lee et al., Nucleic Acids Res. 47, e1 (2019); and references therein). However, these methods perform poorly with respect to actual DNA enrichment (i.e. very low on-target ratios, and large recovery of off-target DNAs), and the NGS data produced from libraries generated with these methods had low sequencing quality.

[0656] Targeted DNA enrichment is presently used in a number of clinically important workflows, including, but not limited to: whole exome sequencing (WES; see Suwinski et al., Front. Genet. 10, 49 (2019); Warr et al., G3 (Bethesda) 5, 1543-1550 (2015)); deep sequencing of patient adaptive immune repertoires, specifically, T-cell receptor and immunoglobulin diversification (see Friedensohn et al., Trends Biotechnol 35, 203-214 (2017); Rosati et al., BMC Biotechnol. 17, 61 (2017)); and targeted enrichment and deep sequencing of cancer biomarkers in the context of oncology (Kamps et al., Int J Mol Sci 18, (2017)).

[0657] The CRISPR-Tn7 system for biochemical RNA-guided DNA integration in vitro (i.e. with purified protein/RNA components and input DNA), may be used as a method for targeted DNA enrichment. All of the sufficient or necessary molecular components of the CRISPR-Tn7 system are expressed recombinantly and purified, which in the case of the CRISPR-Tn7 system from Vibrio cholerae, includes, for example, Ich TnsA, TnsB, TnsC, TniQ, Cas8, Cas7, Cas6, and gRNA. Cas8 is a natural fusion of Cas8 and Cas5 polypeptides, hereafter in this Example referred to simply as Cas8. The gRNA may comprise a single gRNA, but in most embodiments, comprises a library of gRNAs that are designed to target complementary DNA sequences of interest (e.g. the 32-bp protospacer, flanked by a protospacer adjacent motif, or PAM), such that RNA-guided DNA integration occurs proximal to a DNA sequence of interest for downstream enrichment.

[0658] The protein and gRNA components are combined with engineered transposon Left (“L”) and Right (“R”) end sequences, which may be present as a single linear double-stranded DNA (dsDNA) flanking an internal genetic payload, or as two separate DNA molecules, each one of which comprises a dsDNA L or R end; the transposon ends may also be covalently attached to a genetic payload. The genetic payload may be a short adaptor, such as a sequence used for downstream primer binding during a PCR amplification step, as would be performed for NGS library preps for massively parallel DNA sequencing, such as with the Illumina® platform. The transposon end sequences themselves may also serve as the primer binding sites for downstream NGS library preparation. The protein and RNA molecular components, together with the transposon end sequences which are sometimes linked to a user-defined genetic payload, or adaptor, are then combined with input DNA containing the sequence(s) of interest to be enriched. The DNA may be purified genomic DNA, genomic DNA within a cellular lysate or other cellular extracts, mixtures of DNA from metagenomic samples, DNA from viruses, DNA from bacterial, archaeal, and/or eukaryotic cells, or other types of DNA samples.

[0659] In one embodiment, the input DNA is subjected to highly multiplexed, in vitro RNA-guided DNA integration (FIGS. 33A-33D), whereby the transposon ends, with or without distinct adaptor sequences, become covalently fused at 1-10, 10-100, 100-1,000, 1,000-10,000, or 10,000-100,000 distinct integration sites, specified by the particular library of gRNAs used.

[0660] In this embodiment, the RNA-guided DNA integration serves two purposes: the input DNA (e.g. purified genomic DNA), becomes fragmented by the enzymatic activity of TnsB during the integration reaction, and the transposon end sequences (and when present, adaptor sequences) are covalently linked to the DNA molecules of interest. These transposon end sequences, or when present, the adaptor sequences, are then amplified by PCR in a subsequent amplification step using primer pairs that specifically bind to these universal sequences, obviating any requirement for multiplexed PCR or oligo and hybridization-based capture approaches. RNA-guided DNA integration effectively serves to specify the DNA sequences to be enriched and integrate convenient and universal primer binding sites proximally, for standard NGS library preparation steps.

[0661] Conceptually, the use of CRISPR-Tn7 for target enrichment, as an alternative to other methods such as multiplex PCR and/or hybrid capture, offers similar advantages for streamlined NGS library preparation, as are enabled by tagmentation-based methods of NGS library preparation, e.g. the use of engineered Tn5 transposases for DNA fragmentation and adaptor insertion in the ‘Nextera’ kit (FIGS. 34A and 34B). However, the Tn5 transposase intrinsically has little to no target specificity, though there are noted insertion biases (Reznikoff, Annu Rev Genet 42, 69-286 (2008); Adey et al., Genome Biol 11, R119 (2010)). Conversely, the CRISPR-Tn7 system is fully programmable, in that DNA targeting is dictated exclusively by the sequence of the gRNA, and the integration of the transposon (or engineered mini-transposon) occurs at the integration site a fixed distance downstream of the gRNA-complementary target site. Thus, unlike Tn5 and Nextera, which can only be leveraged for random insertion of a genetic tag or adaptor of interest, CRISPR-Tn7 is leveraged for the precise and highly accurate insertion of a genetic tag or adaptor of interest, at user-defined genomic sites. This enables gRNAs to be designed for selective insertion of the adaptor at regions flanking all the DNA sequences to be enriched, such that subsequent PCR allows for a uniform and universal primer set to amplify all the DNA sequences in a single step, but without the complexities of multiplexed primer pairs, MIPs, or hybrid capture methods.

[0662] Advantages of this method include, but are not limited to:
[0663] a significant decrease in labor; RNA-guided DNA integration obviates the need for labor-intensive mechanical and enzymatic manipulations, such as DNA fragmentation, end repair, ligation, DNA microarray synthesis, capture or MIP probe synthesis, etc.;
[0664] a decrease in time; many steps are replaced with a single biochemical RNA-guided DNA integration reaction, which is performed in 5-10, 10-30, 30-60, or 60-120, or 120-240 minutes;
[0665] low input requirements; because of the reduced steps and reduced number of molecular biology steps, this method allows for smaller input DNA samples to be adapted for downstream NGS library preparation; and
[0666] lower sequence biases and better uniformity in targeted enrichment.

[0667] Because this method introduces universal adaptor sequences, the PCR amplification steps to generate NGS libraries do not suffer from anomalous and variable amplification efficiencies, probe or input DNA secondary structure issues, G+C bias in amplification, primer binding site variation, etc. Rather than the numerous steps typically required, including, to fragment the DNA; to add common adaptor sequences that are needed for clonal amplification and/or priming sequencing reactions; and to enrich the target sequences of interest via one of the methods described above, the described method performs these steps in a single reaction with purified CRISPR-Tn7 components and gRNAs designed against the targeted DNA sequences of interest. A single PCR step may then be used to amplify and thereby selectively enrich the targeted sequences that underwent adaptor integration. In another embodiment, the integrated DNA may be used directly for massively parallel DNA sequencing, without a requirement for PCR amplification.

[0668] This method may be applied to various application areas, such as for clinically important workflows. These include, but are not limited to: whole exome sequencing (WES; see Suwinski et al., Front. Genet. 10, 49 (2019) and Warr et al., G3 (Bethesda) 5, 1543-1550 (2015), incorporated herein by reference); deep sequencing of patient adaptive immune repertoires, specifically, T-cell receptor and immunoglobulin diversification (see Friedensohn et al., Trends Biotechnol 35, 203-214 (2017) and Rosati et al., BMC Biotechnol. 17, 61 (2017), incorporated herein by reference); and targeted enrichment and deep sequencing of cancer biomarkers in the context of oncology (Kamps et al., Int J Mol Sci 18, (2017), incorporated herein by reference).

### Purification of CRISPR-Tn7 Components

[0669] In one embodiment, all V. cholerae protein components (TnsA, TnsB, TnsC, TniQ, Cas6, Cas7, and Cas8) are recombinantly expressed and purified individually, and RNA-guided DNA integration is later reconstituted by mixing the proteins in vitro together with gRNA.

[0670] Expression plasmids were generated to encode each of the individual proteins from Vibrio cholerae with an N-terminal decahistidine tag and maltose binding protein (MBP) solubilization tag, driven by a T7 promoter (FIG. 35A). The plasmid also codes for a TEV protease recognition site downstream of the MBP solubilization tag, allowing for removal of the N-terminal tag during purification. In other embodiments, the histidine tag may be moved to the C-terminus or replaced with an alternative affinity tag; the MBP tag may be moved to the C-terminus, replaced with an alternative solubilization tag, or removed from the expression construct altogether; the T7 promoter may be replaced with an alternative promoter; and other design criteria of the expression vectors may be altered. The gRNA may be produced by run-off in vitro transcription, from a DNA template encoding the mature gRNA; it may be produced by run-off in vitro transcription from a DNA template that also contains ribozymes at the 5′ and/or 3′ end, followed by ribozyme cleavage to liberate the mature gRNA; or it may be synthesized chemically as a mature 60-nucleotide gRNA (FIG. 35B). Often, a pooled library of gRNAs is generated, either through the chemical synthesis of the pool directly, or via in vitro transcription, starting with a pool of DNA templates that encode the mature gRNA or a precursor thereof. The pool of DNA templates may be generated by DNA oligo array synthesis. The gRNA may also be produced as a precursor CRISPR RNA, and then processed enzymatically by purified Cas6, which is naturally a ribonuclease that processes the precursor CRISPR RNA into the mature CRISPR RNA (i.e. the gRNA).

[0671] In another embodiment, the TniQ-Cascade complex, harboring either a user-defined gRNA, or a pooled library of user-defined gRNAs, is recombinantly expressed and purified as a co-complex. The TniQ-Cascade complex comprises TniQ, Cas6, Cas7, and Cas8, in a 2:1:6:1 stoichiometry, and is expressed in E. coli from a plasmid denoted pQCascade together with pCRISPR (FIG. 35C); the CRISPR array may also be encoded directly on the same protein-coding pQCascade plasmid. The plasmid may code for a single mature gRNA, or may contain a library of spacers coding for a corresponding library of gRNAs, such that the recombinantly purified TniQ-Cascade complex represents a pool of RNA-guided DNA targeting complexes containing gRNAs against all the target DNA sequences of interest for targeted DNA enrichment.

[0672] TnsA and TnsB from E. coli are known to form direct heterodimeric interactions (Choi et al., Proc Natl Acad Sci USA 110, E2038-45 (2013)), and TnsA and TnsC from E. coli also form a specific interaction (Ronning et al., EMBO J 23, 2972-2981 (2004); Peters, Microbiol Spectr 2, (2014)). In one embodiment, V. cholerae TnsA and TnsB are cloned into an E. coli expression vector as a single operon, with an affinity and solubilization tag present on only the TnsA subunit, and the TnsA-TnsB complex is co-purified (FIG. 35D). In another embodiment, the entire TnsA-TnsB-TnsC operon is cloned into an E. coli expression vector with a single affinity and solubilization tag present on TnsA, and the TnsA-TnsB-TnsC complex is co-purified (FIG. 35D). In further embodiments, the order of genes may be switched, and the choice and location of affinity and/or solubilization tags may be altered.

[0673] Proteins are purified according to the following general protocol, though differences are introduced based on protein-specific requirements for various embodiments. E. coli BL21 (DE3) cells harboring one or more plasmids were grown at 37° C. to OD₆₀₀=0.5-0.7, at which point IPTG is added to a final concentration of 0.5 mM and growth is allowed to continue at 16° C. for an additional 12-16 hours. Cells are harvested by centrifugation at 4,000×g for 20 minutes at 4° C. Cell pellets are resuspended in Lysis Buffer (50 mM Tris-Cl, pH 7.5, 100 mM NaCl, 0.5 mM PMSF, EDTA-free Protease Inhibitor Cocktail tablets (Roche), 1 mM DTT, 5% glycerol) and lysed by sonication with a sonic dismembrator (Fisher) set to 40% amplitude and 12 minutes total process time (cycles of 10 seconds on and 20 seconds off, for a total of 4 minutes on and 8 minutes off). Lysates are clarified by centrifugation at 15,000×g for 30 minutes at 4° C. Initial purification is performed by immobilized metal-ion affinity chromatography with Ni-NTA Agarose (Qiagen) using NiNTA Wash Buffer (50 mM Tris-Cl, pH 7.5, 100 mM NaCl, 10 mM imidazole, 1 mM DTT, 5% glycerol) and NiNTA Elution Buffer (50 mM Tris-Cl pH 7.5, 100 mM NaCl, 300 mM imidazole, 1 mM DTT, 5% glycerol). The His₁₀-MBP fusion is removed by incubation with TEV protease overnight at 4° C. in NiNTA Elution Buffer, and proteins/complexes are further purified by ion exchange chromatography on an AKTApure system (GE Healthcare) using a 5 mL HiTrap® Q HP Column or HiTrap® SP HP Column (GE Healthcare) with a linear gradient from 100% Buffer A (20 mM Tris-Cl, pH 7.5, 100 mM NaCl, 1 mM DTT, 5% glycerol) to 100% Buffer B (20 mM Tris-Cl, pH 7.5, 1 M NaCl, 1 mM DTT, 5% glycerol) over 20 column volumes. Pooled fractions are identified by SDS-PAGE analysis and concentrated, and the sample is further refined by size exclusion chromatography. Fractions are pooled, concentrated, snap frozen in liquid nitrogen, and stored at −80° C. Generally, Lysis Buffer and Ni-NTA Buffers contain 100 mM NaCl when multiprotein complexes are purified, but contain 500 mM NaCl when individual proteins are purified.

### Engineering of the CRISPR-Tn7 Left and Right Transposon Ends

[0674] In one embodiment utilizing the CRISPR-Cas-containing Tn7-like transposon from V. cholerae, the transposon Left and Right ends are engineered to facilitate targeted DNA enrichment (FIGS. 33B and 11A-11C). This engineering may include, among other possible changes: 1) truncation of the transposon ends, beginning distal from the outermost sequences, down to a minimal length that still retains RNA-guided DNA integration activity (this activity may be determined in vivo or in vitro); 2) creation of chimeric transposon ends, in which the Left or Right end sequence is duplicated on both ends; 3) rearrangement of the putative and annotated TnsB binding sites within the Left and/or Right ends; 4) changes in the relative spacing between the putative/annotated TnsB binding sites within the Left and/or Right ends; 5) mutagenesis of the transposon Left and Right ends.

[0675] Experiments are performed to determine essential transposon end sequences during RNA-guided DNA integration by the V. cholerae CRISPR-Tn7 system. In one approach, each end sequence is subjected to exhaustive random mutagenesis, by cloning modified mini-transposons using synthetic oligonucleotides that have mixed bases at each position, such that the resulting pooled oligos contain all possible single, double, and triple mismatches within the length of the transposon ends (FIGS. 35A-35D). Mini-transposon plasmid libraries are prepared with each transposon end separately mutagenized in this manner, and the plasmid libraries are used in RNA-guided DNA integration experiments in vivo. By performing experiments whereby the internal genetic payload within the mini-transposon contains an antibiotic resistance gene that is only expressed after targeted RNA-guided DNA integration downstream of a promoter within the E. coli genome (promoter capture assay), cells are put through antibiotic selection, to enrich for cells that underwent successful RNA-guided DNA integration. The integrated transposon are then analyzed across a population of E. coli cells by massively parallel DNA sequencing (next-generation sequencing), for example by transposon-insertion sequencing (Tn-seq), such that the resulting NGS libraries contain information not only about the integration site, but also the sequence of the transposon end that led to successful integration. By sequencing the input transposon plasmid library, and the transposon library that underwent integration, the data are analyzed to determine those transposon end sequences that were depleted-meaning, the mutations were deleterious for function-versus those transposon end sequences that were enriched-meaning, the mutations still allowed for RNA-guided DNA integration. Based on these and related experiments, further engineered transposon are generated that contain minimal sequences that still recapitulate high-efficiency RNA-guided DNA integration.

[0676] For the in vitro RNA-guided DNA integration experiments described below, in which the input DNA (e.g. purified genomic DNA) is subjected to transposon insertion, the minimally necessary and engineered transposon L and R end sequences, as identified by the previously described experiments, are separated into two dsDNA molecules, each comprising the L and R ends to be used for target enrichment. These dsDNA molecules are bound and integrated by a single CRISPR-Tn7 transpososome complex during RNA-guided DNA integration, but the two ends are not themselves covalently linked, leading to fragmentation of the input DNA at the integration site, and covalent integration of the L and R ends on the upstream and downstream molecules of DNA relative to the integration site (FIGS. 11A-11C). Based on Example 1, which demonstrates that RNA-guided DNA integration with the V. cholerae CRISPR-Tn7 system can occur bidirectionally, and data described above with engineered transposon ends, the integration of the separate L and R ends at a targeted integration site may occur in both orientations with similar efficiency, or be biased to one orientation with some frequency, or be completely set in one of two defined orientations.

[0677] In one embodiment, the minimal and engineered transposon end sequences themselves serves as the primer binding sites for all subsequent PCR amplification steps within the target enrichment pipeline (FIG. 36). After the input DNA is subjected to multiplexed RNA-guided DNA integration, a universal pair of primers is used to further amplify all the regions targeted for enrichment, by binding to the integrated transposon L and R ends. This universal primer pair may contain additional overhangs tailored to the next-generation DNA sequencing platform of interest; for example, with the Illumina® sequencing platform, the p5 and p7 sequences necessary for bridge amplification and cluster generation may be introduced at this stage in the library prep.

[0678] In another embodiment, the Tn7 transposon ends are further engineered to contain additional sequencing adaptors just upstream (5′) of the minimally required transposon end sequence on both the right and left end. For example, these adaptors may be the same, or be similar to, the read primer sequences used for existing Illumina® sequencing with the Truseq or Nextera platforms. These exogenous adaptors could then serve as the primer binding sites for subsequent PCR amplification steps, allowing the target enrichment libraries generated with RNA-guided DNA integration to be used directly with existing Illumina® platforms. Primers annealing to the universal Illumina® adaptor sequences may contain additional overhangs tailored to the next-generation DNA sequencing platform of interest; for example, with the Illumina® sequencing platform, the p5 and p7 sequences necessary for bridge amplification and cluster generation may be introduced at this stage in the library prep. Note that in this embodiment, depending on the particular design of the engineered transposon ends and adaptors, and the choice of read primer, the ‘reads’ generated during next-generation sequencing with standard Illumina® read primers will contain bases derived from the transposon ends, as well as the target DNA sequences of interest.

[0679] In a further embodiment, during the PCR amplification step of the integrated input DNA, the universal primer pairs carry unique index sequences upstream of the region complementary to the integrated transposon ends or integrated adaptors, such as the i5 and i7 indices utilized within the Illumina® sequencing platform, to enable barcoding of distinct target enrichment libraries across many different samples. This indexing approach enables the same RNA-guided DNA integration to be perform within a 96- or 384-well plate format, in which each well contains a unique input DNA sample but all the same CRISPR-Tn7 protein/gRNA and transposon end components. After transposon end integration, the following PCR amplification uses indexed primer pairs to append a well-specific index or index pair, allowing subsequent library steps, and the downstream sequencing step, to be performed on pooled enrichment libraries across many different input samples.

[0680] In another embodiment, unique molecular identifiers (UMIs, also known as UIDs) are incorporated within the engineered transposon ends, 3′ of the sequence used as the primer binding site in subsequent PCR amplification (FIG. 37). The RNA-guided DNA integration reaction is performed the same way as described, followed by PCR amplification using universal primers against the primer binding sites (which may also contain unique indices). The UMIs are preserved within the resulting NGS libraries, allowing for error and bias correction in the resulting data analysis, as well as improved understanding of sequence/allele abundance within the input library.

### Reaction Design to Perform In Vitro RNA-Guided DNA Integration

[0681] Reactions to perform RNA-guided DNA integration within targeted input DNA contain the following components: purified TnsA, TnsB, TnsC, TniQ, Cas6, Cas7, Cas8, gRNA(s), engineered transposon ends (present as dsDNA), the input DNA (i.e. the ‘sample’), and reaction buffer. In one embodiment, the reaction contains purified TniQ-Cascade (comprising TniQ, Cas6, Cas7, Cas8, and gRNA) in place of the individual components. The gRNA may contain 1-10, 10-100, 100-1,000, 1,000-10,000, or 10,000-100,000 unique guide sequences. The engineered transposon ends may contain unique molecular identifiers (UMIs), and may be fully double-stranded or may contain regions that are double-stranded and regions that are single-stranded. The input DNA may be purified genomic DNA, genomic DNA within a cellular lysate or other cellular extract, mixtures of DNA from metagenomic samples, DNA from viruses, DNA from bacterial, archaeal, and/or eukaryotic cells, or other types of DNA samples.

[0682] The reaction buffer may contain various cofactors and additives, including, but not limited to: buffering agents (e.g. Tris, HEPES, sodium phosphate) set to varying pH values (e.g. 5.0, 5.5, 6.0, 6.5, 7.0, 7.5, 8.0, 8.5, 9.0); monovalent salts (e.g. NaCl, KCl, potassium glutamate, sodium glutamate); divalent salts (e.g. MgCl₂, CaCl₂), MnCl₂); nucleotides, such as ATP, ADP, ADPNP, ADPCP, and/or ATP-gammaS; crowding agents, such as polyethylene glycol (PEG); detergents (e.g. Triton X-100, Tween-20); cryoprotectants, such as glycerol; reducing agents (e.g. betamercaptoethanol, DTT, T-CEP).

[0683] Reactions are incubated for 5-10, 10-30, 30-60, or 60-120, or 120-240 minutes, and are incubated at 5-10° C., 10-15° C., 15-20° C., 20-25° C., 25-30° C., 30-35° C., 35-40° C., 40-45° C., or 45-50° C. Reactions may be quenched with various means, including but not limited to: addition of EDTA; heat inactivation; addition of denaturing agents such as phenol-chloroform or guanidinium hydrochloride; addition of protease agents such as proteinase K; addition of ribonuclease agents. Reactions are cleaned up to remove denatured debris and protein components, before being subjected to subsequent molecular biology steps necessary for next-generation sequencing library preparation, which may include PCR-based amplification.

### Method of Generating Short (˜50-Bp) Sequencing Libraries Flanked by the Target and Integration Sites During CRISPR-Tn7 RNA-Guided DNA Integration

[0684] The CRISPR-Tn7 system mobilizes by using gRNAs for recognition of a DNA target site that is complementary to the guide sequence, followed by integration of the transposon donor DNA a fixed distance downstream of the target site, at the integration site; in the V. cholerae CRISPR-Tn7 system, DNA targeting is facilitated by the TniQ-Cascade complex, and DNA integration is catalyzed by TnsB ˜49-bp downstream (PAM-distal) of the target site.

[0685] The relative arrangement of the target site and the integration site suggests a straightforward way for defining and amplifying/enriching DNA libraries that are ˜49-bp in size, from a heterogeneous input DNA sample, for downstream analysis by massively parallel next-generation DNA sequencing (NGS) (FIG. 38). The target site in this embodiment is of a known sequence, and for the V. cholerae CRISPR-Tn7 system, will be a 32-bp protospacer target site flanked by a 2-nucleotide PAM. The integration site is ˜49-bp downstream, and will also comprise a known sequence, since the transposon ends are user-defined and may be engineered, as described above. Thus, upon integration of the transposon ends-which may be part of one continuous dsDNA molecule, or may comprise two individual dsDNA molecules representing the L and R ends—the targeted input DNA will contain short ˜49-bp sequences abutted by the known target site and the experimental integration site. In subsequent molecular biology steps, PCR amplification with user-defined primer pairs whose primer binding sites are the target site itself and the transposon end sequence, can be used to generate large libraries of sequences in which the internal ˜49-bp ‘insert’ is unknown but may be sequenced in downstream steps by NGS.

### Example 6

### Inactivation of Microbial Antibiotic Resistance Genes Via Programmable RNA-Guided DNA Integration

[0686] The global rise of antibiotic resistance in bacteria is resulting in fewer methods for treatment of previously controllable infections. As traditional development of antibiotics slows, focus has started to shift towards developing newer ways of combating drug resistant pathological bacteria. In particular, antimicrobial approaches that can directly target the evolving resistant bacterial genomes has emerged, utilizing sequence-specific DNA targeting made possible with the CRISPR-Cas9 nuclease technology, as well as increasing ease of whole-genome sequencing of resistant strains. However, these methods have certain shortcomings, in particular the strong selection for survivor mutants resistant to Cas9 targeting or nuclease activity, as well as inefficient phage delivery limiting the use to very narrow target species and strains.

[0687] As described herein, the coding sequence of bacterial resistance genes are disrupted in vivo by insertion of a DNA sequence, leading to non-selective re-sensitization to drug treatment. This approach utilizes the herein described programmable system comprising molecular machineries encoded by the V. cholerae HE-45 transposon, also known as Tn6677, and sometimes referred to as V. cholerae Tn7-like transposon or Tn7 transposon, which enables site-specific RNA-guided insertion of a user-defined genetic cargo. In addition to disruption of resistance genes, the system can further propagate itself along with the target plasmid. Furthermore, by including spacers targeting bacterial genomes, the construct can also stably insert itself in “safe haven” genomic regions, allowing for stable maintenance of the system and prolonged immunity. Overall, demonstrating the utility of a platform for genomic engineering within complex bacterial consortia and immunization of a complex bacterial community against antibiotic resistance.

[0688] Using a three-plasmid expression strategy (FIG. 39A) for programmable RNA-guided DNA transposition, the seven genes are expressed in two operons on two separate plasmids driven by IPTG-inducible T7 promoters, and the DNA donor containing a cargo of interest is contained on a third. While this initial approach offered high modularity for studying of the mechanism, here the construct is simplified in order to efficiently deliver and express the system for downstream applications. The redesigned all-in-one plasmid (FIG. 39B) expresses all the essential components for transposition on a single continuous transcript, under the control of one promoter. Encoding the entire construct within the transposon ends allows for dissemination with the cargo as transposition occurs in vivo. This construct is capable of efficient transposition as previously shown by transforming E. coli BL21 (DE3) cells with the construct and quantifying the level of integration activity using targeted qPCR.

[0689] Since maintaining high levels of expression of the construct on high-copy plasmids may be unfavorable for efficient integration, the dependence of activity on expression level and backbone copy number is determined. The T7 promoter is substituted with constitutive E. coli promoters with a range of expression levels (Yan and Fong, J Biol Eng. 2017; 11:33), and the previously used high-copy-number pUC19 backbone is substitute with other backbones that maintain variable copy numbers. With this panel, the broad-host mobilizable vector pBBR1 (Szpirer et al. J Bacteriol. 2001; 183 (6): 2101-2110) and broad-host promoters described in a recent metagenomic mining study (Johns et al., Nat Methods. 2018; 15 (5): 323-329), which are useful for expressing the system in a multi-species context in later stages, are also included. The efficiencies of constructs within this panel are determined with qPCR.

[0690] “Cut-and-paste” transposition, where the donor DNA is fully excised from the donor site and inserted at the target location (Bainton et al., Cell, 1991; 65 (5), pp. 805-816), is supported. Thus, when multiple spacers or target sites are available, or through possible constant excision by the transposon machinery, the integrated cargo may be lost from the gene it is disrupting. If an original copy of the gene is present elsewhere in the cell, this leads to possible recapitulation of the original gene sequence through homologous recombination repair (Hagemann and Craig, Genetics. 1993; 133 (1): 9-16).

[0691] With a single point mutation in the TnsA active site (D114A) of the E. coli Tn7 transposon, DNA breakage has been shown to only occur at the 3′ end of each strand of the donor (May and Craig. Science, 1996; 272 (5260): 401-4). Without full excision of the donor DNA, the system switches to a replicative copy-and-paste mechanism, resulting in a cointegrate product that eventually is resolved by recombination to yield two identical copies of the cargo (FIG. 40).

[0692] This copy-and-paste mechanism is recapitulated using a similar mutation (D90A) in the V. cholerae TnsA protein, previously shown to support active transposition. By targeted PCR and sequencing of the product, the existence of the cointegrate product is shown. Using a similar targeted PCR approach characterizes resolution of this product by probing for the existence of a single inserted cargo at the genomic target site, either in a heterogeneous population cells, or by continuous culturing of a clonal cointegrate colony over time. In another embodiment, in order to increase the efficiency recombination and resolution of the cointegrate product, a site-specific recombinase such as Cre or CinH, is included in the cargo, along with its recognition sequence. In naturally occurring replicative transposons such as Tn3 and Mu, this recombinase-assisted strategy has been shown to be utilized for resolution of the cointegrate (Nicolas et al. Microbiology Spectrum. 2015; 3 (4)).

[0693] In addition, the efficiency of multiplexed integration is determined using this approach. In one embodiment, inclusion of multiple spacers in the targeting CRISPR array leads to simultaneous integration events at all of the respective target sites. By delivering the construct on a temperature-sensitive plasmid, curing the plasmid from the cells, and then introducing a second plasmid containing an identical copy of the target site, an integrated genomic copy of the cargo self-mobilizes and copies onto a target plasmid. Clones with simultaneous integration are isolated at both sites.

### Resistance Gene Disruption and Immunization in Multiple Bacterial Species

[0694] Here integration of a cargo into an antibiotic resistance gene leads to re-sensitization of the cell to antibiotic treatment is demonstrated (FIG. 42). In one embodiment, kanamycin resistant (KanR) BW25113 E. coli is transformed with an RNA-guided DNA Integration construct containing a spacer targeting the KanR gene. This experiment is repeated both in cells with a genomic copy of the KanR gene, and in cells with the KanR gene maintained on a stable, ampicillin selectable plasmid. Cells lose kanamycin resistance compared to control cells receiving a construct with a non-targeting gRNA, as determined by selective agar plating and CFU quantifications. Integration and disruption of the coding sequence is confirmed by targeted PCR and sequencing. Furthermore, these cells remain viable and robust by co-culturing with control cells over multiple generations, with comparable growth ratios. The target plasmid containing the disrupted KanR remains stably maintained in cells, and can be extracted and transformed into naïve cells. By apply the multiplexing capability and using different combination of spacers in the gRNA array, cells containing an ampicillin-selectable plasmid harboring both kanamycin and spectinomycin resistance genes become re-sensitized to treatment with either or both of these drugs.

[0695] In another embodiment of the invention, when stably maintained on a plasmid in E. coli, the RNA-guided DNA Integration machinery disrupts antibiotic-resistance genes introduced during subsequent transformation events. Using similar assays as before, RNA-guided DNA Integration machinery does not block transformation of the plasmid, but that cells fail to acquire resistance to drug treatment and thus are effectively immunized, as compared to cells containing a non-targeting system.

[0696] Expanding on this embodiment, RNA-guided DNA Integration machinery is inserted into the genome by the addition of a genomic targeting spacer and this inserted genomic copy of the system is capable of disrupting transformed resistance genes.

[0697] In order to apply the system to a complex bacterial population such as the intestinal flora, whether the system can support active transposition in several species of bacteria is investigated using the standard transformation and qPCR assay described herein. In one embodiment, an initial panel of bacteria includes laboratory cultured strains of E. coli, S. enterica, V. cholerae, and P. aeruginosa, which are all phylogenetically related gram-negative, common gut colonizing species that also have been previously shown to efficiently receive conjugative plasmids from E. coli donors. The RNA-guided DNA Integration machinery construct used for these experiments utilizes broad-host-range backbones and promoters. Multiple different “safe-harbor” loci within each species are screened to determine sites that allow for high integration efficiency and are sufficiently conserved between multiple strains of each species. These sites serve as stable genomic integration sites for the maintenance of the system into their respective species in vivo in later stages. The ability to isolate genomic-integrated clones is evaluated by inserting a conditionally expressed erythromycin resistance (ErmR) coding sequence (FIG. 41).

### In Vivo Immunization of the Gut Flora

[0698] The RNA-guided DNA integration machinery construct is delivered by conjugation and test efficiency using an auxotrophic donor E. coli strain containing RP4 conjugation machinery, following the previously described method. Following a direct conjugation assay between the donor and each individual recipient strain, growth on selective media is used to confirm successful conjugation. In order to recapitulate the immunization experiment, both the RNA-guided DNA Integration machinery plasmid, as well as an ampicillin-selectable target plasmid containing the target KanR cassette are simultaneously delivered via conjugation to each recipient strain. By selecting for successful double-transconjugants, immunization against drug resistance is demonstrated. The experiment is performed separately under aerobic and anaerobic growth conditions post-conjugation. Other embodiments take a similar approach but use different plasmid backbones aimed at conjugating into more bacterial species or use a library of plasmids that comprise a panel of different backbones.

[0699] In one embodiment, the activity of the system when delivered to a mixture of bacteria is evaluated. The conjugation and immunization experiments described above are recapitulation using an equal mixture of each of the four species previously evaluated. Double-transconjugants recovered are evaluated for kanamycin sensitivity, and 16S rRNA sequencing is also utilized to confirm the presence of all four recipient species.

[0700] In a further embodiment, the method is applied to gut bacteria freshly isolated from C57BL/6 mouse feces. Gut bacteria are isolated as a complex mixture of multiple different species, under anaerobic conditions, and conjugation assays are carried out as previously described (Ronda et al. Nat Methods 16:167-170, 2019). The ability to deliver via conjugation either the RNA-guided DNA Integration machinery plasmid, or the KanR-target plasmid, and then both simultaneously is evaluated. At each stage, transconjugants are selected and the recipient species are determined via 16S rRNA sequencing. In a further embodiment, stable insertion of RNA-guided DNA Integration machinery into the genome of isolated gut bacteria is demonstrated. Spacers are added to the array targeting multiple different genomic sites, as well as an ErmR gene into the cargo, and this expanded RNA-guided DNA Integration machinery construct is delivered by conjugation to extracted gut bacteria. Stably integrated bacteria are selected on erythromycin media and sequenced to confirm their phylogenetic identities.

[0701] The system's ability for in vivo immunization of the mouse gut microbiome is demonstrated using the expanded and genome-insertable RNA-guided DNA Integration machinery construct, targeting KanR. In one embodiment, the construct and KanR target plasmid are simultaneously introduced using two separate E. coli donor populations into the mouse gut via oral gavage, and bacteria is isolated from feces periodically afterwards. Controls include a construct without a KanR targeting spacer, and a construct without spacers targeting genomic sites. The latter leads to higher immunization against kanamycin resistance compared to the former, but a full system with spacers targeting both leads to even more effective immunization. By 16S analysis of transconjugants, taking advantage of the target plasmid for further dissemination allows genome-targeting RNA-guided DNA Integration machinery constructs with a KanR spacer to spread more effectively, as compared to constructs without a KanR spacer. In a further embodiment, the immunization experiment is repeated with delivery of the RNA-guided DNA Integration machinery construct into the mice preceding delivery of the KanR target.

[0702] The method described in this Example utilizes a programmable DNA integrase. This system, which originates from a Vibrio cholerae strain, leverages four Tn7-associated and the CRISPR-associated genes for specific integration of a DNA cargo at a target location (Klompe et al., Nature 571, 219-225 (2019), incorporated herein by reference). By demonstrating that targeting of the integrase can be defined by changing the spacer sequence encoded within the associated gRNA array, the system can be adapted into a highly programmable DNA insertion tool, Insertion of Transposable Elements by Guide RNA-Assisted Targeting (INTEGRATE).

[0703] Applying INTEGRATE allows one to specifically target and insert a DNA cargo into the coding sequence of antibiotic resistance genes, thereby disrupting its expression without generating lethal DSBs. Using this strategy, antibiotic resistance is combated without causing cell death, thereby avoiding the simultaneous selection for survivor mutants. By using a conjugative plasmid strategy similar to the MAGIC system described by the Harris Wang lab (Ronda et al., Nat Methods 16:167-170, 2019, incorporated herein by reference), the system is delivered to the model mouse gut microbiome, whereby the system inserts stably into the genomes of several species and serves as a surveillance tool. This causes the cell to be effectively immunized against becoming resistant to drug selection from horizontally inherited resistance genes (Blair et al., Nature Reviews Microbiology, 13, 42-51 (2015), incorporated herein by reference). Furthermore, by converting INTEGRATE to a replicative mode of action and including the entire INTEGRATE machinery on the cargo, the system copies itself from the donor to the target resistance gene, and thus propagate itself further along with any subsequent horizontal transfer of the target plasmid. Once introduced into a new cell, spacers in the gRNA array targeting genomic sites lead to insertion of a copy of the construct stably in the genome, completing the cycle. Thus, by hijacking the natural horizontal transfer of antibiotic resistance genes, the approach addresses the problem of effective delivery, while simultaneously exerting its intended interference effect.

[0704] The strategy to combat antibiotic resistance using INTEGRATE tackles resistance spreading in a complex bacterial population. This project also demonstrates the utility of programmable transposition via INTEGRATE for microbial engineering applications. For example, the approach can be easily redesigned to target and eliminate virulence genes from the population, to perform in situ gene knockouts, or to stably introduce new genetic elements to the metagenomic pool of a microbiome.

[0705] By non-lethal disruption of antibiotic resistance genes, the method circumvents challenges with survivor selection and exploits secondary propagation of the construct. Beyond resistance genes, this method may be redesigned to target any set of genes, such as virulence or metabolic genes, for clinical and industrial applications in other embodiments.

### Example 7

### Methods for Programmable RNA-Guided DNA Integration in Plants

### Targeted Mutation of a Mitogen-Activated Protein (MAP) Kinase Gene in Rice (a Monocot Cereal Crop)

[0706] The short PAM sequence is present in the plant genome at high frequency (for example, 141 PAMs were found in 1110 by coding region of the OsMPK5 gene), suggesting the possibility of targeting and editing of every plant gene using this method. Three 20-22 nt guide RNAs (gRNAs) are designed to target three specific sites of a mitogen-activated protein kinase gene in rice genome. Two RNA-guided Genome Editing vectors (pRGE3 and pRGE6) are created for expressing the components of the present system in plant cells. In both vectors, CaMV 35S promoter is used to control the expression of one or more proteins/enzymes which is fused with a nuclear localization signal and a FLAG tag. The pRGE3 and pRGE6 vectors contain: (1) a DNA-dependent RNA polymerase III (Pol III) promoter (rice snoRNA U3 or U6 promoter, respectively) to control the expression of gRNA molecules in the plant cell, where the transcription was terminated by a Pol III terminator (Pol III Term); (2) a DNA-dependent RNA polymerase II (Pol II) promoter (e. g., CaMV 35S promoter) to control the expression of one or more proteins/enzymes; (3) a multiple cloning site (MCS) located between the Pol III promoter and gRNA scaffold, which is used to insert a 15-30 nt DNA sequence encoding a gRNA. For the Agrobacterium tumefaciens-mediated transformation, the transposon-encoded CRISPR-Cas system cassettes from pRGE3 and pRGE6 are inserted into the T-DNA region of pCambia 1300 vector, respectively, to produce pRGEB3 and pRGEB6.

[0707] To demonstrate RNA-guided genome editing in plants, the OsMPK5 gene which encodes a stress-responsive rice mitogen-activated protein kinase is used for targeted mutation by the present system. Three guide RNA (gRNA) sequences are designed based on the corresponding target sites in the OsMPK5 locus (PS1, PS2 and PS3). The PS1-gRNA (22 nt) is specific for the template strand of OsMPK5. The PS2- and PS3-gRNA (20 and 22 nt, respectively) are specific for the coding strand of OsMPK5. Subsequently, three gRNA-Cas9 constructs are made by inserting the synthetic DNA oligonucleotides which encode the gRNAs into the pRGE3 vector.

[0708] Rice protoplast transient expression system is used to test the engineered gRNACas9 constructs. The efficient transformation of rice protoplasts is demonstrated with a plasmid construct carrying the green fluorescence protein (GFP) marker gene. Fluorescence microscopic analyses for GFP expression in protoplasts is conducted about 18 hours after transformation and about 36-72 hours after transformation. PCR and/or sequencing is performed to confirm the genome editing. To estimate the efficiency of genome editing, T7 endonuclease I (T7E1) assay is performed to detect mutation for all three targeted sites in the OsMPK5 locus. In this assay, amplicons encompassing targeted sites are amplified from genomic DNA and treated with mismatch sensitive T7E1 after melting and annealing, and cleaved DNA fragments would be detected if amplified products containing both mutated and wild type DNA.

[0709] Stable transgenic rice lines are generated expressing the present system via the Agrobacterium-mediated transformation. The transgenic rice plants expressing PS1-gRNA (TG4lines) and PS3-gRNA (TG5 lines) are examined by T7E1 assay, PCR and sequencing.

### Materials and Methods

### Construction of RNA-Guided Genome Editing Vectors for the Plant System

[0710] To construct pRGE3 and pRGE6 vectors, rice snoRNA U3 and U6 promoters are amplified from rice cultivar Nipponbare genomic DNA using primer pairs. The DNA sequence encoding the gRNA scaffold are amplified from the pX330 vector using a pair of primers. The PCR product of U3 or U6 promoter and gRNA scaffold re fused by overlapping PCR. The U3 or U6 promoter-gRNA fragment are then cloned into the Hind III site of pUGW11-BsaI vector through the Giboson assembly method to produce pUGW-U3-gRNA and pUGWU6-gRNA. pUGW11-BsaI is derived from pUGW11 by removing two Bsa I sites in Amp resistance gene and 35S promoter using site-directed mutangenesis (Strategene). The sequences encoding the proteins/enzymes of the present system are subsequently introduced into pUGW-U3-gRNA or pUGW-U6-gRNA by LR reaction (Invitrogen), resulting in the pRGE3 and pRGE6 vector. In addition, two binary vectors (pRGEB3 and pRGEB6) are made by inserting the transposon-encoded CRISPR-Cas system cassettes from pRGE3 and pRGE6 into the pCAMBIA 1300-BsaI vector. The pCAMBIA 1300-BsaI is derived from pCAMBIA1300 by removing BsaI sites in the 35S promoter using site-directed mutagenesis (Stratagene).

### Gene Targeting Constructs for Precise Disruption of the OsMPK5 Gene

[0711] DNA sequences encoding gRNAs are designed to target three specific sites in the exons of OsMPK5. For each target site, a pair of DNA oligonucleotides with appropriate cloning linkers are synthesized. Each pair of oligonucleotides is phosphorylated, annealed, and then ligated into Bsa I digested pRGE3 or pRGE6 vectors. After transformation into E. coli DH5-alpha, the resulting constructs are purified with QIAGEN Plasmid Midi kit (Qiagen) for subsequent use in rice protoplast transfection. For stable transformation, the DNA oligo which has been used to construct the PS1-gRNA and PS3-gRNA is inserted into pRGEB3. The resulting gene constructs are introduced into the Agrobacterium tumefaciens strain EHA105.

### Rice Protoplast Preparation and Transformation

[0712] Rice protoplasts are prepared from 10-day-old young seedlings of Nipponbare cultivar (Oryza sativa spp. japonica) after germination in MS media. The protoplasts re isolated by digesting rice sheath strips in Digestion Solution (10 mM MES pH5.7, 0.5 M Mannitol, 1 mM CaCl₂), 5 mM beta-mercaptoethanol, 0.1% BSA, 1.5% Cellulase R10 (Yakult Pharmaceutical, Japan), and 0.75% Macerozume R10 (Yakult Pharmaceutical, Japan)) for 5 hours. After filtering through Nylon mesh (35 um), the protoplasts are collected and incubated in W5 solution (2 mM MES pH5.7, 154 mM NaCl, 5 mM KCl, 125 mM CaCl₂)) at room temperature (25° C.) for 1 hour. The W5 solution is then removed by centrifugation at 300×g for 5 min, and rice protoplasts are resuspended in MMG solution (4 mM MES, 0.6 M Mannitol, 15 mM MgCl₂) to a final concentration of 1.0×10₇/ml. For transformation, 10 ul of plasmids (5-10 μg) is gently mixed with 100 ul of protoplasts and 110 ul of PEG-CaCl₂) solution (0.6 M Mannitol, 100 mM CaCl₂) and 40% PEG4000), and then incubated at room temperature for 20 min. Transformation are stopped by adding 2× volume of W5 solution.

[0713] Transformed protoplasts are collected by centrifugation and resuspended in WI solution (4 mM MES pH5.7, 0.6 M Mannitol, 4 mM KCl). The transformed protoplasts are maintained in 24-well culture plates. After 24-72 hours of incubation in WI solution, protoplasts are collected by centrifugation at 300×g for 2 min and frozen in −80° C.

### Agrobacterium-Mediated Rice Transformation

[0714] Embryogenic calli derived from seeds of Nipponbare cultivar are used for the Agrobacterium-mediated stable transformation according to the previously described method (Xiong and Yang, The Plant Cell, 2003, 15:745-759).

### Genomic DNA Extraction

[0715] Genomic DNA is extracted from rice protoplasts or seedling leaves by adding 100 μl of pre-heated CTAB buffer and incubated at 65° C. for 20 min. 40 μl of chloroform is then added; the resulting mixtures are incubated at room temperature (25° C.) in an end-to-top rocker for 20 min. After centrifugation at 16000×g for 5 min, the supernatant is transferred to a new tube and mixed with 250 μl of ethanol. Following incubation on ice for 10 min, genomic DNA is precipitated by centrifugation at 16000×g for 10 min at room temperature. The DNA pellet is washed with 0.5 ml of 70% ethanol and air dried. The genomic DNA is then dissolved in 100 μl of dH₂O and its concentration is determined by spectrophotometer.

### T7 Exonuclease I Assay

[0716] To detect mutation by T7 exonuclease I (T7E1) assay, the DNA fragments containing the targeted sites are amplified from genomic DNA using a pair of primers and Phusion High-Fidelity DNA Polymerase (NEB). The PCR product is purified using PCR Purification Column (Zymo Research) and the concentration is determined with a spectrophotometer. 100 ng of purified PCR product is then denatured-annealed under the following condition: 95° C. for 5 min, ramp down to 25° C. at 0.1° C./sec, and incubate at 25° C. for additional 30 min. Annealed PCR products are then digested with 5U of T7E1 for 2 hours at 37° C. The T7E1 digested product is separated by 1% agarose gel electrophoresis and stained with ethidium bromide. The intensity of DNA bands is calculated using Image J software.

Genome Editing in Potato (Solanum tuberosum, a Dicot Food Crop)

[0717] Guide RNAs are designed to target the potato asparagine synthase gene (StAS1). The present system is delivered into potato leaf protoplasts via transient expression. One Solanum tuberosum Genome Editing vector (pStGE3) is created to express engineered gRNA targeting a potato gene and the other components of the present system. The pStGE3 vector contains several important functional elements: (1) a DNA-dependent RNA polymerase III (pol III) promoter (Arabidopsis U3 promoter) to control the expression of engineered gRNA targeting potato genes in the plant cell, where the transcription will be terminated by a Pol III terminator (Pol III Term); (2) a DNA-dependent RNA polymerase II (pol II) promoter (CaMV 35S promoter) to drive the expression of proteins/enzymes; and (3) a cloning site located between the Pol III promoter and gRNA scaffold, which will be used to insert a DNA sequence encoding the gRNA. In addition, a binary vector suitable for the Agrobacterium-mediated transformation is also constructed by inserting the transposon-encoded CRISPR-Cas system cassettes as those of pStGE3 into the T-DNA region in the pCAMBIA 1300 vector.

StAS1 was previously identified and characterized to regulate the accumulation of acrylamide in potato products such as French fries and potato chips. Therefore, a successful targeted mutation of StAS1 will significantly decrease the asparagine content in potato, leading to a reduction of acrylamide present in the processed potato products. Two guide RNA (gRNA) sequences are designed based on the corresponding target sites in the StAS1 gene (PS1 and PS2). The Ps1-gRNA (20 nt) is designed to pair with the template strand of StAS1. The Ps2-gRNA (20 nt) pairs with the coding strand of StAS1. Subsequently, DNAs encoding PS1 and PS2 are inserted into the pStGE3 vector.

[0718] Protoplast transient expression system is used to test the PS1 and PS2 genome editing constructs. A simple and efficient procedure for the isolation and regeneration of protoplasts from tube potatoes was established previously, and a PEG-mediated transient transformation method has also been developed. Isolation and transfection of potato protoplasts is demonstrated using a plasmid construct carrying the green fluorescence protein (GFP) gene.

[0719] To detect the gRNA-guided genomic editing in protoplasts, potato genomic DNA is extracted from the transfected protoplasts at 24 hours after transformation. The extracted DNA is analyzed by PCR and/or sequencing.

### Plant Materials

[0720] Four- to six-week-old potato plants re grown in a greenhouse (23-25° C.). Solanum tuberosum DM1-3 516 R44 (referred to as DM), the sequenced cultivar from doubled monoploid clone derived classical tissue culture, is obtained.

### Gene Constructs for Targeted Gene Mutation

[0721] DNA sequences encoding gRNAs are designed to target two specific sites in the exons of StAS1. For each target site, a pair of DNA oligonucleotides with appropriate cloning linkers are synthesized. Each pair of oligonucleotides is phosphorylated, annealed, and then ligated into BsaI digested pStGE3 vectors. After transformation into E. coli DH5-alpha, the resulting constructs are purified with QIAGEN Plasmid Midi kit (Qiagen) for subsequent use in potato protoplast transformation.

### Potato Protoplast Preparation and Transformation

[0722] Potato protoplasts are prepared from 4- to 6-week-old potato leaves of DM cultivar (Diploid Solanum tuberosum). Potato leaves are first incubated in conditional medium containing 1×MS, 100 mg/L Casein hydrolysate, 3 mM MES pH 5.7, 0.35 M Mannitol, 2 mg/L NAA and 1 mg/L BA. Then the protoplasts are isolated by digesting these potato leaves in Digestion Solution (1×MS, 3 mM MES pH5.7, 0.3 M Mannitol, 1 mM CaCl₂), 5 mM betamercaptoethanol, 0.2% BSA, 1% Cellulase R10 [Yakult Pharmaceutical, Japan], and 0.375% Macerozume R10 (Yakult Pharmaceutical, Japan)) for 3.5 hours. After filtering through Nylon mesh (35 μm), the protoplasts are washed by W5 solution (2 mM MES pH5.7, 154 mM NaCl, 5 mM KCl, 125 mM CaCl₂)) at room temperature (25° C.) 3-5 times and then collected and incubated in W5 solution for 30 minutes. The W5 solution is then be removed by centrifugation at 300×g for 3 min, and potato protoplasts are resuspended in MMG solution (4 mM MES, 0.6 M Mannitol, 15 mM MgCl₂) to a final concentration of 5.0×10⁶/ml. For transformation, 10 μl of plasmids (5-10 μg) are gently mixed with 100 μl of protoplasts and 110 μl of PEG-CaCl₂) solution (0.6 M Mannitol, 100 mM CaCl₂) and 40% PEG4000), and then incubated at room temperature for 20 min. Transformation is stopped by adding 2× volume of W5 solution. Transformed protoplasts are then collected by centrifugation and resuspended in W5 solution. The transformed protoplasts re maintained in 24-well culture plates. After 24-48 hours of incubation in W5 solution, protoplasts are collected by centrifugation at 300×g for 2 min and frozen in −80° C. for further analysis.

### Genomic DNA Extraction

[0723] Genomic DNA is extracted from potato protoplasts by adding 150 μl of extraction buffer (200 mM Tris-HCl PH 7.5, 250 mM NaCl, 25 mM EDTA, 0.5% SDS, 10 mg/L Rnase I) and shaking the mixture for 1 min. After centrifugation at 12000 rpm for 5 min, the supernatant is transferred to a new tube and mixed with 150 isopropyl alcohol. Following incubation on ice for 20 min, genomic DNA is precipitated by centrifugation at 12000 rpm for 15 min at 4° C. The DNA pellet is washed with 0.5 ml of 70% ethanol and air dried. The genomic DNA is then dissolved in 80 μl of H₂O and its concentration is determined by spectrophotometer.

### Genome Modification in Maize Plants

[0724] Genes encoding the proteins/enzymes of the present system are maize codon optimized per standard techniques known in the art and the potato ST-LS1 intron is introduced in order to eliminate its expression in E. coli and Agrobacterium. To facilitate nuclear localization of the proteins/enzymes in maize cells, Simian virus 40 (SV40) monopartite amino terminal nuclear localization signal and Agrobacterium tumefaciens bipartite VirD2 T-DNA border endonuclease carboxyl terminal nuclear localization signal is incorporated at the amino and carboxyl-termini of the open reading frame, respectively. The maize optimized gene is operably linked to a maize constitutive or regulated promoter by standard molecular biological techniques.

[0725] To confer efficient guide RNA expression (or expression of the duplexed crRNA and tracrRNA) in maize, the maize U6 polymerase III promoter and maize U6 polymerase III terminator residing on chromosome 8 is isolated and operably fused to the termini of a guide RNA.

Targeted Mutation of AtPDS3 in Arabidopsis Via the Agrobacterium tumefaciens-Mediated Transformation

[0726] Two gRNAs are designed to target two distinct sites in the coding region of AtPDS3 which encodes the Arabidopsis phytoene dehydrogenase. Plants defective in AtPDS3 display leaf bleaching phenotype, which makes it easy to examine gene knock-out efficiency. Two DNA sequences encoding the gRNAs are synthesized and cloned into pRGEB3 and pStGEB3, respectively.

[0727] Two sets of RGE vectors are used for targeted mutagenesis of AtPDS3 in Arabidopsis using the Agrobacterium tumefaciens-mediated floral dip method. One contains the 35S promoter-driven proteins/enzymes and rice U3 promoter-driven gRNA in pRGEB3, while another contains the 35S promoter-driven proteins/enzymes and Arabidopsis U3 promoter-driven gRNA in pStGEB3. Following the Agrobacterium-mediated transformation, 30-40 transgenic Arabidopsis lines are analyzed.

### Example 8

### Methods for Programmable RNA-Guided DNA Integration in Animal Cells

[0728] Testing of Transposon-Encoded CRISPR-Cas System in Porcine Cells Porcine kidney PK15 cells are cultured in high glucose DMEM (Life Technologies, #31966) supplemented with 10% fetal bovine serum, 100 U/ml penicillin and 100 μg/ml streptomycin in a humidified incubator at 37° C. with 5% CO₂.

[0729] Potential small guide RNA target sites are initially identified based on the presence of protospacer adjacent motifs (PAM) within the coding sequence of the porcine gene of interest.

[0730] Plasmids encoding the sgRNA sequence, other components of the present system and a CMV-driven eGFP are co-transfected into 6×10⁵ PK15 cells using a Neon electroporator set at 2 pulses of 1400 mV for 20 ms each. Transfected cells are recovered in complete medium without antibiotic. Three days post transfection GFP positive cells are isolated by fluorescence activated cell sorting, expanded by culturing and genomic DNA prepared using the Qiagen DNeasy Blood and Tissue kit. PCR is carried out on this genomic DNA using Accuprime High Fidelity polymerase. Cell analysis is carried out on the PCR products as recommended by the manufacturer (Transgenomic). Digested PCR products are resolved on a 2% TAE agarose gel.

### Testing of Transposon-Encoded CRISPR-Cas System in Bovine Cells

[0731] Potential target sites for sgRNAs are initially identified based on the presence of PAM sequences within either the coding sequence of the bovine gene of interest or the sequence immediately flanking the coding sequence. Nine potential sgRNA-binding sites are selected (three 5′ to the coding sequence, three within the coding sequence, and three 3′ to the stop codon).

[0732] For each identified sgRNA binding site, two guide sequences re designed; a 20-mer binding sequence, and a 19-, 18- or 17-mer binding sequence.

[0733] One microgram of plasmid miniprep DNA (Qiagen) encoding components of the present system is transfected into 6×10⁵ bovine embryonic fibroblast cells (BEF) using a Neon electroporator set at a single pulse of 1800 mV for 20 ms. Two days post transfection genomic DNA is prepared using the Qiagen DNeasy Blood and Tissue kit. PCR is carried out on this genomic DNA using Accuprime High Fidelity polymerase.

[0734] T7 endonuclease analysis is carried out on purified PCR products as recommended by the manufacturer (NEB). Digested PCR products are resolved on a 1.4% TAE agarose gel.

### Transposon-Encoded CRISPR-Cas System for DNA Integration in Porcine Blastocyst

[0735] Following successful validation in cell culture, the guide RNA sequence(s) are assembled with a T7 promoter. Assembly with a T7 driven construct helps in vitro transcription and production of RNA. Briefly, sgRNA are transcribed using T7 in vitro transcription kit (Ambion). Likewise, other components of the present system re transcribed using T7 in vitro transcription kit and/or T7 Megascript in vitro transcription kit.

[0736] The mRNAs encoding components of the present system (100 ng/μL), and sgRNA targeting the porcine gene of interest (50 ng/μL) are injected into 1-cell porcine zygotes using an Eppendorf Femtojet injector on a continuous flow setting. The injected embryos are allowed to progress to blastocyst stage for an additional 6 days, DNA collected, and PCR amplified around the target site. The presence of target gene mutations is assessed by sequencing of the PCR amplicons. The sequence surrounding the target site is amplified using gene specific primers, cloned into PCR2.1 vector (Invitrogen), transformed into DH5a cells (NEB) and transformants selected based on Kanamycin resistance. The colonies are cultured overnight, miniprepped and the plasmids sequenced by Sanger sequencing.

### Generation of Genetically Modified Pig Models

[0737] The mRNAs encoding components of the present system, and sgRNA targeting the porcine gene of interest are injected into in vitro fertilized porcine embryos. Briefly, maturing oocytes from sows are purchased from ART Inc. (Madison, Wis.) and shipped overnight in their commercial maturation medium #1. Twenty-four hours after being placed in the maturation medium #1 (provided by ART), 50 to 75 cumulus-oocyte complexes (COCs) are placed in 500 μl of tissue culture medium 199 (TCM 199) containing 0.14% PVA, 10 ng/ml epidermal growth factor, 0.57 mM cysteine, 0.5 IU/ml porcine FSH, and 0.5 IU/ml ovine LH and cultured for an additional 20 hours at 38.5° C. and 5% CO₂ in air, 100% humidity. COCs are vortexed in 0.1% hyaluronidase in HEPES-buffered medium containing 0.01% PVA for 4 minutes to remove the cumulus cells following maturation. Groups of 30-35 mature, denuded oocytes are placed in 100 μL of a modified Tris-buffered medium (mTBM) and fertilized according to an established protocol using fresh extended boar semen. Briefly, 1-2 ml of extended semen are mixed with Dulbecco's Phosphate Buffered Saline (DPBS) containing 1 mg/ml BSA to a final volume of 10 ml and centrifuged at 1000×g, 25° C. for four minutes; spermatozoa are washed in DPBS for a total of three times. After the final wash, spermatozoa are resuspended in mTBM medium and added to oocytes at a final concentration of 5×10⁵ spermatozoa/ml, and co-incubated for 5 hours at 38.5° C. and 5% CO₂. Five hours following fertilization, the presumptive zygotes re injected with mRNAs encoding components of the present system, and sgRNA, and the intact embryos are surgically transferred into the oviducts of synchronized female recipient animals by exposing the reproductive tract by midline incision. Animals are allowed to recover from surgery.

[0738] Another alternative is to use in vivo fertilized 1-cell embryos for CRISPR mediated targeting of NANOS2 and generation of edited animals. Embryo donor animals are synchronized for estrus and superovulated by first feeding with Regumate (Alterenogest) for 14-16 days, followed by subcutaneous injections of PG600 (5 ml) on day 17 and 1000 IU of hCG on day 20. Animals are bred thrice, once on standing estrus (day 20), and two more inseminations 8 hours apart on day 21. Animals are humanely slaughtered on day 22 and the embryos are harvested by flushing the oviduct. Embryos are injected with mRNAs encoding components of the present system, and sgRNA, and surgically transferred into synchronized recipient (or surrogate) animals the same day as described above.

### Generation of Genetically Modified Animals Via Embryo Injections

[0739] A candidate sgRNA targeting a porcine gene of interest is designed. The mRNAs encoding components of the present system, and sgRNA targeting the porcine gene of interest are in vitro transcribed using T7 mMessage Machine kit (Ambion), cleaned by Megaclear Kit (Ambion) and injected into in vivo fertilized porcine 1-cell embryos. A cohort of 12 animals of 8-9 months of age are synchronized for estrus and used in the experiment. Eight of the synchronized animals are bred to serve as embryo donors, whereas the remaining 4 animals are synchronized but not bred to serve as surrogates. Estrus is synchronized by feeding 5 ml of progesterone analog, Regumate (or Matrix) for 14 days. 24 hours (h) after last Regumate feeding, the animals are given a dose of PMSG (1200 IU, Sigma) subcutaneously, and the ovulation is induced 72 h later by administration of HCG (1000 IU, Chorulon, Merck) subcutaneously. The donor animals (n=8) in standing heat are artificially inseminated with boar semen (PIC Genetics). In vivo embryos from donor animals are recovered surgically 24 h after artificial insemination by retrograde flushing with sterile PVA TL-Hepes medium from the oviduct. The in vivo derived embryos are injected with the mRNAs encoding components of the present system, and sgRNA, and cultured in PZM3 medium overnight. A day after microinjection, 30 embryos are transferred surgically into the oviducts of each surrogate animal.

[0740] For embryo transfers, donor and surrogate pigs are anesthetized by a mix of ketamine/xylazine (6.6 mg/kg and 1-2 mg/kg IM) and placed on their back on a surgical table. Adequate depth of anesthesia will be assessed by monitoring heart rate, temperature, full rhythmic respirations, constricted pupil, and reduced or absent palpebral reflex. The reproductive tract of anesthetized gilts is exposed via a midline abdominal incision. Only the oviducts and tips of the uterus are exposed. In donors, embryos are retrograde flushed through the utero-tubal junction, and the embryos collected from ostium of oviduct. For embryo transfer into surrogates, a tom-cat catheter containing the embryos is placed through the infundibulum and the embryos are deposited into the oviduct. Following three-layered closure of the incision using absorbable sutures (USP #3 body wall, #3 fat, #1 sub-q), the animals are allowed to recover. Pregnancies are confirmed by lack of return to Estrus (21 days) and ultrasound at 28 days post embryo transfer.

### Generation of Genetically Modified Animals Via Somatic Cell Nuclear Transfer (SCNT)

[0741] Porcine fetal fibroblasts (PFF) are established from fetuses recovered from D35 pregnant Duroc pigs. A candidate male and female PFF line is nucleofected with CMV promoter driven plasmid(s) encoding components of the present system. One day after nucleofection, the nucleofected cells are sorted singly into each well of a 96-well plate. The cells are fed with irradiated fibroblast conditioned growth medium, and allowed to form colonies. Following a week of culture, colonies begin to appear within the wells. The cells are clonally propagated, and DNA is extracted and screened for mutations using DNA sequencing. The cells that are homozygous for mutation are cloned via somatic cell nuclear transfer to generate genetically modified male and female piglets.

### Example 9

### Structural Basis of DNA Targeting by a Transposon-Encoded CRISPR-Cas System

[0742] The Vibrio cholerae Tn6677 transposon undergoes programmable transposition directed by a CRISPR RNA (crRNA), and this activity uses four transposon- and three CRISPR-associated genes in addition to a CRISPR array (FIG. 43A). Whereas TnsA, TnsB, and TnsC exhibit functions that are consistent with their homologs from a related and well-studied cut-and-paste DNA transposon, E. coli Tn7, TniQ, a homolog of E. coli TnsD, forms a co-complex with the Cascade ribonucleoprotein complex encoded by the Type I-F variant CRISPR-Cas system. This finding suggested an alternative role for TniQ, as compared to the role of EcoTnsD in identifying target sites during Tn7 transposition. RNA-guided DNA targeting by Cascade may deliver TniQ to DNA in a manner compatible with downstream transpososome formation, and that TniQ might interact with Cascade near the 3′ end of the crRNA, consistent with RNA-guided DNA insertion occurring ˜49-bp downstream from the PAM-distal edge of the target site.

[0743] To determine this unambiguously, the V. cholerae TniQ-Cascade complex loaded with a native crRNA was purified and its structure was determined by cryo-EM. The overall complex adopted a helical architecture with protuberances at both ends (FIGS. 43, 47 and 48). The global architecture is similar to previously determined structures of Cascade from I-E and I-F systems (FIG. 49), with the exception of a large mass of additional density attributable to TniQ (see below). Maximum likelihood classification methods implemented in Relion3 allowed identification of significant dynamics in the entire complex, which appears to “breathe”, widening and narrowing the distance between the two protuberances (FIG. 47D). The large subunit encoded by a natural Cas8-Cas5 fusion protein (hereafter in this Example referred to simply as Cas8) formed one protuberance and recognized the 5′ end of the crRNA via base- and backbone-specific contacts (FIGS. 50, 51A-C, 52A), akin to the canonical roles played by Cas8 and Cas5 (FIG. 49). Cas8 exhibited two primary subdomains formed mainly by α-helices, along with a third domain of approximately 100 residues (residues 277 to 385) that was predicted to form three α-helices but could not be built in the maps due to its intrinsic flexibility (FIG. 43C). However, low pass filtered maps revealed that this flexible domain connected with the TniQ protuberance at the opposite end of the crescent-shaped complex (FIG. 48E). Additionally, there appeared to be a loose coupling between the Cas8 flexible domain and overall “breathing” of the complex, as stronger density for that domain was observed in the closed state (FIG. 47D).

[0744] Six Cas7 subunits protected much of the crRNA by forming a helical filament along its length (FIGS. 43B and 43D), similar to other Type I Cascade complexes (FIG. 49). A “finger” motif in Cas7 clamped the crRNA in regular intervals, causing every sixth nucleotide (nt) of the 32-57 nt spacer to flip out while leaving the flanking nucleotides available for DNA recognition (FIGS. 50F and 52). These bases were pre-ordered in short helical segments, with a conserved phenylalanine stacking below the first base of every segment. Cas7.1, the monomer furthest away from Cas8, interacted with Cas6 (also known as Csy4), which is the ribonuclease responsible for processing of the precursor RNA transcript derived from the CRISPR locus. The Cas6-Cas7.1 interaction was mediated by a β-sheet formed by the contribution of a β-strands from Cas6 and the two β-strands that form the finger of Cas7.1 (FIG. 51(vi)). Cas6 also formed extensive interactions with the conserved stem-loop in the repeat-derived 3′ crRNA handle (FIGS. 43 and 51(iv and v)), with an arginine-rich α-helix (residues 110 to 128) docked in the major groove, positioning multiple basic residues within interaction distance of the negatively charged RNA backbone.

[0745] The interaction established between Cas6 and Cas7.1 formed a continuous surface where TniQ was docked, forming the other protuberance of the crescent. The intrinsic flexibility of the complex rendered lower local resolutions in this area of the maps, which was overcome using local alignments masking the area comprising TniQ, Cas6, Cas7.1 and the crRNA handle (FIG. 53). The enhanced maps allowed for de novo modeling and refinement of TniQ, for which no previous structure or homology model has been reported (FIG. 44). Notably, TniQ binds to Cascade as a dimer with head-to-tail configuration (FIG. 44), a surprising result given the expectation that EcoTnsD functions as a monomer during Tn7 transposition.

[0746] TniQ was composed of two domains: an N-terminal domain of approximately 100 residues formed by three short α-helices and a second, larger domain of approximately 300 residues with signature sequence for the TniQ family. A DALI search using the refined TniQ model as a probe yielded significant structural similarity of the N-terminal domain to proteins containing Helix-Turn-Helix (HTH) domains (FIG. 54). This domain is often involved in nucleic acid recognition, however there are reported examples where it has been re-purposed for protein-protein interactions. The remaining C-terminal TniQ-domain was formed by 10 α-helices of variable length and was predicted to contain two tandem zinc finger motifs, though this region was poorly defined in the maps (FIG. 44). Overall, the double domain composition of TniQ resulted in an elongated structure, bent at the junction of the HTH and the TniQ-domain (FIG. 44). The HTH domain of one monomer engages the TniQ-domain of the other monomer via interactions between α-helix 3 (H3) and α-helix 11 (H11), respectively, in a tight protein-protein interaction (FIG. 44C). This reciprocal interaction was complemented by multiple interactions established between the TniQ-domains from both monomers (up to 45 non-covalent interactions as reported by PISA).

[0747] Tethering of the TniQ dimer to Cascade was accomplished by specific interactions established with both Cas6 and Cas7.1 (FIG. 45). One monomer of TniQ interacted with Cas6 via its C-terminal TniQ-domain, while the other TniQ monomer contacted Cas7.1 through its N-terminal HTH domain (FIGS. 44B and 45). The loop connecting α-helices H6 and H7 of the TniQ-domain of the first TniQ monomer was inserted in a hydrophobic cavity formed at the interface of two α-helices of Cas6 (FIGS. 45B and 45D). The TniQ histidine residue 265 was involved in rearranging the hydrophobic loop connecting H6 and H7 (FIG. 45D), which was inserted in the hydrophobic pocket of Cas6 formed by residues L20, Y74, M78, Y83 and F84. The HTH domain of the other TniQ monomer interacted with Cas7.1 through a network of interactions established mainly by α-helix H2 and the linker connecting H2 and H3 (FIGS. 45C and 45E). Thus, both the HTH domain and the TniQ-domain appeared to exert dual roles to drive TniQ dimerization and dock onto Cascade.

[0748] In order to explore the structural determinants of DNA recognition by the TniQ-Cascade complex, the structure of the complex bound to a double-stranded DNA (dsDNA) substrate containing the 32-bp target sequence, 5′-CC-3′ PAM, and 20-bp of flanking dsDNA on both ends was determined (FIGS. 46 and 55). Density for 28 nucleotides of the target strand (TS) and 8 nucleotides for the non-target strand (NTS) could be confidently assigned in the reconstructed maps (FIG. 46C). As with previous I-F Cascade structures, Cas8 recognized the double stranded PAM within the minor groove (FIG. 56), and an arginine residue (R246) established a stacking interaction with a guanine nucleotide on the TS, which acted like a wedge to separate the double-stranded PAM from the neighboring unwound DNA where base-pairing with the crRNA begins (FIG. 46B).

[0749] Twenty-two nucleotides of the TS within the 32-bp target showed clear density, but surprisingly, the terminal nine nucleotides were not ordered. The TS base-pairs with the spacer region of the crRNA in short, discontinuous, helical segments, as observed previously for I-E and I-F DNA-bound Cascade complexes with every 6th base flipped out of the heteroduplex by the insertion of a Cas7 finger (FIG. 52B). The observed 22-bp heteroduplex was stabilized by the four Cas7 monomers proximal to the PAM (Cas7.6-7.3), but even after local masked refinements, no density was observed for any TS nucleotides that would base-pair with the 3′ end of the crRNA spacer bound by Cas7.2 and Cas7.1. These two Cas7 monomers were proximal to Cas6 and in the region previously described to exhibit dynamics due to the interaction of the Cas8 flexible domain with the inner face of the TniQ-dimer. In addition, the disordered nucleotides also corresponded to positions 25-28 of the target site where RNA-DNA mismatches are detrimental for RNA-guided DNA integration. Thus, there is a possibility that the partial R-loop structure may represent an intermediate conformation refractory to integration, and that further structural rearrangements may be critical for further stabilization of an open conformation, possibly driven by recruitment of the TnsC ATPase.

[0750] The first cryo-EM structures of a CRISPR-Cas effector complex bound to the transposition protein TniQ, with and without target DNA, revealed the unexpected presence of TniQ as a dimer that formed bipartite interactions with Cas6 and Cas7.1 within the Cascade complex, forming a likely recruitment platform for downstream-acting transposition proteins (FIG. 46D). The structures furthermore revealed a possible fidelity checkpoint, whereby formation of a complete R-loop requires conformational rearrangements that may depend on extensive RNA-DNA complementarity and/or downstream factor recruitment; this proofreading step could account for the highly specific RNA-guided DNA integration previously reported for the V. cholerae transposon.

### TniQ-Cascade Purification.

[0751] Protein components of TniQ-Cascade were expressed from a pET derivative vector containing the native V. cholerae tniQ-cas8-cas7-cas6 operon with an N-terminal His₁₀-MBP-TEVsite fusion on TniQ. The crRNA was expressed separately from a pACYC derivative vector containing a minimal repeat-spacer-repeat CRISPR array encoding a spacer from the endogenous V. cholerae CRISPR array. The TniQ-Cascade complex was overexpressed and purified as described previously and was stored in Cascade Storage Buffer (20 mM Tris-Cl, pH 7.5, 200 mM NaCl, 1 mM DTT, 5% glycerol).

### Sample Preparation for Electron Microscopy.

[0752] For negative staining, 3 μl of purified TniQ Cascade ranging from 100 nM to 2 μM was incubated with plasma treated (H2/O2 gas mix, Gatan Solarus) CF400 carbon-coated grids (EMS) for 1 minute. Excess solution was blotted and 3 μl of 0.75% uranyl formate was added for an additional minute. Excess stain was blotted away and grids were air-dried overnight. Grid screening for both negative staining and cryo conditions was performed on a Tecnai-F20 microscope (FEI) operated at 200 KeV and equipped with a Gatan K2-Summit direct detector. Microscope operation and data collection were carried out using the Leginon/Appion software. Initial negative staining grid screening allowed determination of a suitable concentration range for cryo conditions. Several grid geometries were tested in the 1-4 μM concentration range for cryo conditions using a Vitrobot Mark-II operated at 4° C., 100% humidity, blot force 3, drain time 0, waiting time 15 seconds, and blotting times ranging from 3-5 seconds. The best ice distribution and particle density was obtained with 0.6/1 UltrAuFoil grids (Quantifoil).

### Electron Microscopy.

[0753] A preliminary dataset of 300 images in cryo was collected with the Tecnai-F20 microscope using a pixel size of 1.22 Å/pixel with illumination conditions adjusted to 8 e-/pixel/second with a frame window of 200 ms. Preprocessing and image processing were integrally done in Relion3 with ctf estimation integrated via a wrapper to Gctf. An initial model computed using the SGD algorithm implemented in Relion3 was used as initial reference for a refine 3D job that generated a sub-nanometric reconstruction with approximately 10,000 selected particles. Clear secondary structure features in the 2D averages and the 3D reconstruction were identified.

[0754] For the DNA-bound TniQ-Cascade complex containing DNA, two complementary 74-nt oligonucleotides were preincubated

(NTS:
5'TTCATCAAGCCATTGGACCGCCTTACAGGACGCTTTGGCTTCATTGCT
TTTCAGCTTCGCCTTGACGGCCAAAA-3', (SEQ ID NO: 1673)
TS:
5'TTTTGGCCGTCAAGGCGAAGCTGAAAAGCAATGAAGCCAAAGCGTCCT
GTAAGGCGGTCCAATGGCTTGATGAA-3' (SEQ ID NO: 1674))

for 5 minutes at 95° C. in hybridization buffer (20 mM Tris-Cl, pH 7.5, 100 mM KCl, 5 mM MgCl₂) to form dsDNA, which was subsequently aliquoted and flash frozen. Complex formation was performed by incubating a 3× molar excess of dsDNA with TniQ-Cascade at 37° C. for 5 minutes prior to vitrification, which followed the conditions optimized for the apo complex (defined as TniQ-Cascade with crRNA but no DNA ligand).

[0755] High resolution data for the apo complex were collected in a Tecnai-Polara-F30 microscope operated at 300 KeV equipped with a K3 direct detector (Gatan). A 30 μm C2 aperture was used with a pixel size of 0.95 Å/pixel and illumination conditions in microprobe mode adjusted to a fluence of 16e-/pixel/second. Four-second images with a frame width of 100 ms (1.77 e-187/Å₂/frame) were collected in counting mode.

[0756] For the DNA-bound complex, high resolution data were collected in a Titan Krios microscope (FEI) equipped with an energy filter (20 eV slit width) and a K2 direct detector (Gatan) operated at 300 KeV. A 50 μm C2 aperture was used with a pixel size of 1.06 Å/pixel and illumination conditions adjusted in nanoprobe mode to a fluence of 8e-/pixel/second. Eight-second images with a frame width of 200 ms (1.42 e−/Å2/frame) were collected in counting mode.

### Image Processing.

[0757] Motion correction was performed for every micrograph applying the algorithm described for Motioncor2 implemented in Relion3 with 5 by 5 patches for the K2 data and 7 by 5 patches for the K3 data. Parameters of the contrast transfer function for each motion-corrected micrograph were obtained using Gctf integrated in Relion3. Initial particle picking of a subset of 200 images randomly chosen was performed with the Laplacian tool of the Auto-picking module of Relion3, using an estimated size for the complex of 200 Å. 15,000 particles were extracted in a 300 pixels box size and binned 3 times for an initial 2D classification job. Selected 2D averages from this job were used as templates for Auto-picking of the full dataset. The full dataset of binned particles was subjected to a 2D classification job to identify particles able to generate averages with clear secondary structure features. The selected subgroup of binned particles after the 2D classification selection was refined against a 3D volume obtained by SGD with the F20 data. This “consensus” volume was inspected to localize areas of heterogeneity which were clearly identified at both ends of the crescent shape characteristic of this complex. Both ends were then individually masked using soft masks of around 20 pixels that were subsequently used in classification jobs without alignments in Relion3. The T parameter used for this classification job was 6 and the total number of classes was 10. This strategy allowed us to identify two main population of particles which correspond to an “open” and “closed” state of the complex. Particles from both subgroups were separately re-extracted to obtain unbinned datasets for further refinement. New features implemented in Relion3, namely Bayesian polishing and ctf parameters refinement, allowed the extension of the resolution to 3.4, 3.5 and 2.9 Å for the two apo and the DNA-bound complexes, respectively. Post processing was performed with a soft-mask of 5 pixels being the B-factor estimated automatically in Relion3 following standard practice. A final set of local refinements was performed with the masks used for classification. The locally aligned maps exhibit very good quality for the ends of the C-shape. These maps were used for de novo modeling and initial model refinement.

### Model Building and Refinement.

[0758] For the Cas7 and Cas6 monomers, the E. coli homologs (PDB accession code 4TVX) were initially docked with Chimera and transformed to poly-alanine models. Substantial rearrangement of the finger region of Cas7 monomers, as well as other secondary structure elements of Cas6, were performed manually in COOT before amino acid substitution of the poly-alanine model. Well-defined bulky side chains of aromatic residues allowed a confident assignment of the register. The crRNA was also well defined in the maps and was traced de novo with COOT. For Cas8 and TniQ in particular, no structural similarity was found in the published structures able to explain the densities. Locally refined maps using soft masks at both ends of the crescent-shaped complex rendered well-defined maps below 3.5 Å resolution. These maps were used for manual de novo tracing of a poly-alanine model in COOT that was subsequently mutated to the V. cholerae sequences. Bulky side chains for aromatic residues showed excellent density and were used as landmarks to adjust the register of the sequence.

[0759] For refinement, an initial step of real space refinement against the cryo-EM maps was performed with the phenix.real_space refinement tool of the Phenix package, with secondary structure restraints activated. A second step of reciprocal space refinement was performed in Refmac5, with secondary restraints calculated with Prosmart₂₈ and LibG. Weight of the geometry term versus the experimental term was adjusted to avoid overfitting of the model into cryo-EM map, as previously reported. Model validation was performed in Molprobity.

### Data Availability.

[0760] Maps and models have been deposited in the EMDB (accession codes 20349, 20350 and 20351) and the PDB (accession codes 6PIF, 6PIG and 6PIJ).

Design and Testing of V. cholerae TniQ-Cascade Mutants

[0761] Based on the cryo-EM structures of the V. cholerae TniQ-Cascade co-complex, both in the apo state and DNA-bound state, a series of point mutations, mutation stretches, or deletions, were designed to perturb protein-RNA, protein-DNA, or protein-protein interactions. These mutations were tested for RNA guided DNA integration activity in vivo, in order to screen for variants that may have improved fidelity (i.e. lower off-target integration events) or improved efficiency (i.e. a greater percentage of cells that undergo integration).

[0762] In Table 3, the various mutations/deletions are categorized based on which interface or interaction the mutants are designed to modulate. All mutations were introduced into pQCascade (crRNA-4) bacterial expression plasmid that harbors a guide RNA targeting E. coli lacZ. Note that “Cas8” in Table 3 refers to the natural Cas8-Cas5 fusion.

TABLE 3
Protein Mutations

| Plasmid | Interface being | Protein | |
|---|---|---|---|
| ID | Perturbed | w/mutation | Mutation |
| pSL1188 | Flexible domain that | Cas8 | Replace N276-N384 with |
| | interacts with TniQ | | GGSGGSGGSGGSGGS |
| | | | (SEQ ID NO: 1672) |
| pSL1189 | Interaction between | Cas8 | F415-R424, L583-Y586, |
| | Cas8 and 5' crRNA | | and R503 replaced with |
| | | | polyalanine |
| pSL1190 | Interaction between | Cas6 | E142-1146 replaced with |
| | Cas6 and Cas7.1 | | polyalanine |
| pSL1191 | Interaction between | Cas6 | L11-K23, H73-F84 |
| | Cas6 and TniQ | | replaced |
| | | | with polyalanine |
| pSL1192 | Interaction between | TniQ | E260-L273 replaced with |
| | TniQ and Cas6 | | polyalanine |
| pSL1193 | Interaction between | TniQ | H31-D43 replaced with |
| | TniQ and Cas7.1 | | polyalanine |
| pSL1194 | Interaction between | TniQ | E344-D361 replaced with |
| | TniQ and Cas7.2 | | polyalanine |
| pSL0894 | TniQ Zinc finger(s) | TniQ | C128S, C131S |
| pSL0895 | TniQ Zinc finger(s) | TniQ | C150S, H153S |
| pSL0896 | TniQ Zinc finger(s) | TniQ | C128S, C131S, C150S, H153S |
| pSL1243 | TniQ Zinc finger(s) | TniQ | C161S, C163S |
| pSL1244 | TniQ Zinc finger(s) | TniQ | C178S, C181S |
| pSL1245 | Interaction between | TniQ | E264K |
| | TniQ and Cas6 | | |
| pSL1246 | Interaction between | TniQ | V267D |
| | TniQ and Cas6 | | |
| pSL1247 | Interaction between | Cas6 | K23E |
| | TniQ and Cas6 | | |
| pSL1248 | Interaction between | Cas6 | L20E |
| | TniQ and Cas6 | | |
| pSL1249 | Interaction between | TniQ | R32A |
| | TniQ and Cas7.1 | | |
| pSL1250 | Interaction between | TniQ | R32D |
| | TniQ and Cas7.1 | | |
| pSL1251 | Interaction between | TniQ | R39A |
| | TniQ and Cas7.1 | | |
| pSL1252 | Interaction between | TniQ | R39D |
| | TniQ and Cas7.1 | | |
| pSL1253 | Interaction between | TniQ | D43A |
| | TniQ and Cas7.1 | | |
| pSL1254 | Interaction between | TniQ | D43R |
| | TniQ and Cas7.1 | | |
| pSL1255 | Interaction between | Cas7 | D180A |
| | TniQ and Cas7.1 | | |
| pSL1256 | Interaction between | Cas7 | D180R |
| | TniQ and Cas7.1 | | |
| pSL1257 | Interaction between | Cas7 | R172A |
| | TniQ and Cas7.1 | | |
| pSL1258 | Interaction between | Cas7 | R172D |
| | TniQ and Cas7.1 | | |
| pSL1259 | TniQ dimerization | TniQ | Deletion of Y365-W394 |
| | Interface | | |
| pSL1260 | TniQ dimerization | TniQ | Deletion of F380-W394 |
| | Interface | | |
| pSL1261 | TniQ dimerization | TniQ | Deletion of F385-W394 |
| | Interface | | |
| pSL1262 | TniQ dimerization | TniQ | Deletion of Y390-W394 |
| | interface | | |
| pSL1263 | PAM recognition by | Cas8 | S127A |
| | Cas8 | | |
| pSL1264 | PAM recognition by | Cas8 | R243A |
| | Cas8 | | |
| pSL1265 | PAM recognition by | Cas8 | N246A |
| | Cas8 | | |
| pSL1270 | TniQ Zinc finger(s) | TniQ | C150S, H153S, C178S, C181S |
| pSL1271 | TniQ Zinc finger(s) | TniQ | C161S, C163S, C178S, C181S |
| pSL1272 | TniQ Zinc finger(s) | TniQ | C128S, C131S, C161S, C163S |
| pSL1299 | Stabilization of crRNA/ | Cas7 | F227A |
| | DNA by Cas7 | | |
| pSL1300 | Stabilization of crRNA/ | Cas7 | F227Y |
| | DNA by Cas7 | | |
| pSL1301 | Interaction between | Cas8 | R424A |
| | Cas8 and 5′ crRNA | | |
| pSL1302 | Interaction between | Cas8 | R503A |
| | Cas8 and 5′ crRNA | | |
| pSL1303 | Interaction between | Cas8 | R584A |
| | Cas8 and 5′ crRNA | | |

TABLE 4
Data collection, refinement and validation statistics

| | VC-Tn6677-effector | | VC-Tn667-effector-DNA |
|---|---|---|---|
| Data collection | | | |
| Microscope-detector | Polara-F30-K3 | | Titan Krios-K2 |
| Voltage (Ke [symbol] ) | 300 | | 300 |
| Defocus range (μm) | −3/−3 | | −0.5/−2 |
| Pixel size (Å/pixel) | 0.95 | | 1.06 |
| Total dose (e⁻/Å²) | 70.91 | | 56.95 |
| Dose/frame (e⁻/Å²) | 1.77 | | 1.42 |
| Images collected | 10.661 | | 3.679 |
| | class | | |
| | open | close | |
| Data processing | | | |
| Final particles | 52.316 | 52.987 | 88.055 |
| FSC 0.143 (Å) | 3.47 | 3.47 | 2.94 |
| Map sharpening (Å) | −71.91 | −77.07 | −34.23 |
| Model refinement | | | |
| Resolution used in | 3.5 | 3.5 | 3 |
| refinement (Å): | | | |
| Average B-factor: (Å) | 92.47 | 96.5 | 93.90 |
| R.m.s. deviations: | | | |
| Bonds (Å) | 0.014 | 0.014 | 0.016 |
| Angles (°) | 1.77 | 1.78 | 1.78 |
| Validation | | | |
| Molprobity score | 2.34 | 1.81 | 1.82 |
| Clashcore, all atoms | 6.89 | 1.82 | 3.32 |
| Favored ratamers (%) | 81.38 | 81.4 | 82.31 |
| Ramachandran plot: | | | |
| Outliers (%) | 3.91 | 3.45 | 3.47 |
| Favored (%) | 81.38 | 81.41 | 82.31 |
| Deposition | | | |
| EMDB-ID | 20349 | 20350 | 20351 |
| PDB-ID | 6PIF | 6PIG | 6PIJ |

[symbol]

indicates data missing or illegible when filed

### Example 10

### RNA-Guided DNA Integration Using Engineered TnsA-TnsB Fusions

[0763] A class of transposon that encode fusions between the TnsA endonuclease and the TnsB DDE-family integrase was identified. These TnsA-TnsB fusion genes exist in multiple distinct Tn7-like transposon families, and they were identified in Tn7-like transposons that encode Type I-F variant CRISPR-Cas systems with genes homologous to the genes in the V. cholerae Tn6677 transposon. Here, engineered versions of the machinery derived from the Tn6677 V. cholerae transposon convert the separate TnsA and TnsB polypeptides into a single fusion TnsA-TnsB fusion polypeptide, which retains in vivo function for RNA-guided DNA integration activity, thereby reducing the complexity of the system by one component.

### Expression Vector Design

[0764] Based on sequence alignments between TnsA and TnsB proteins from the V. cholerae Tn6677 transposon, and TnsA-TnsB fusion proteins from newly identified transposons in Parashewanella spongiae strain HJ039 and Aliivibrio wodanis strain 06/09/160 (FIG. 66), a new engineered V. cholerae TnsA-TnsB fusion construct was engineered by modifying the sequences in pSL0283, in order to generate pSL1738 (FIG. 67A). These plasmid sequences are represented by SEQ ID NOs: 3, 6, and 935 and the sequence of the fusion V. cholerae TnsA-TnsB protein is SEQ ID NO: 935.

### Functional Testing of Fusion TnsA-TnsB Proteins

[0765] In order to test the engineered TnsA-TnsB fusion protein for in vivo RNA-guided DNA integration activity, transposition experiments were performed in E. coli following a similar protocol as previously described here and in Klompe et al., Nature 571, 219-225 (2019), incorporated herein by reference). Briefly, chemically competent E. coli BL21 (DE3) cells that contained a plasmid-encoded mini-transposon donor DNA, pSL0527, and a plasmid expressing the TniQ-Cascade complex with crRNA-4, pSL0828 were generated. These cells were transformed with either an empty vector control (pSL0008; pCOLADuet-1), the original wild-type pTnsABC plasmid that encodes V. cholerae TnsA, TnsB, and TnsC (pSL0283), or a new plasmid encoding TnsC and the engineered TnsA-TnsB fusion construct (pSL1738). Integration was assessed by qPCR, in which primer pairs selectively amplify novel genome-mini-transposon junctions and allow quantification of the integration efficiency for both of two possible orientations, denoted tRL (target-right end-left end) and tLR (target-left end-right end). The results demonstrated that the fusion TnsA-TnsB protein has nearly wild-type activity for RNA-guided DNA integration (FIG. 67B).

[0766] These experiments demonstrated that synthetic, engineered fusions of TnsA and TnsB are fully functional for RNA-guided DNA integration, and that these engineered fusion proteins may be considered as alternative modalities for engineering experiments, particularly in cells where expression and/or delivery of the machinery may be improved or streamlined through use of a system containing reduced number of total molecular components. Previous results also showed that the TniQ-Cas8/Cas5-Cas7-Cas6 operon could be engineered to encode a TniQ-Cas6 fusion protein, and that this fusion protein also supported RNA-guided DNA integration activity in vivo, providing another example of an engineered system containing fewer parts. Additional functional fusion designs may be used to further reduce the number of components, through fusions between the pre-existing components, or fusions to additional DNA targeting or DNA cleaving/integrating components.

### Example 11

### Engineering Transposon End DNA Sequences to Increase RNA-Guided DNA Integration Efficiency and Modulate Integration Orientation

[0767] RNA-guided DNA integration by the V. cholerae CRISPR-transposon derived from Tn6677 requires conserved transposon end sequences, as described above. Specifically, mini-transposon donor DNA sequences have “Left (L)” and “Right (R)” transposon ends for proper recognition by the TnsA/TnsB heteromeric transposase, and deletion of substantial portions of either transposon end sequence leads to a partial or complete loss of RNA-guided DNA integration activity (FIGS. 11A-C). Integration generally occurs bidirectionally at a fixed distance downstream of DNA target sites complementary to the CRISPR RNA (crRNA), as described above. Specifically, across a population of cells, integration events are heterogeneous, with some occurring such that the R end of the transposon is proximal to the target site (a T-RL orientation), whereas others occur with the L end of the transposon proximal to the target site (a T-LR orientation). Whereas some sites show a roughly 50:50 ratio of T-RL and T-LR insertion products (e.g. at the site complementary to crRNA-4), in general, the T-RL orientation is strongly preferred over the T-LR orientation.

[0768] Large libraries of mutagenized transposon L and R sequences were generated to identify higher-activity variants, and variants with altered orientation biases, using a high-throughput pooled library approach.

### Verification of Transposon End Truncation Variants at Multiple Target Sites

[0769] Previous data (FIG. 11) demonstrated that sequence features present in the transposon end sequences controlled insertion and orientation. Particularly, a shift in the preferred orientation of integration was observed when the right transposon end was truncated into a palindromic sequence present just inside of the TnsB binding sites. The same donor constructs (pSL0527, pSL0708, pSL0710, pSL0711, pSL0712) were tested at different target sites (tSL0005-tSL0008). Briefly, competent BL21 (DE3) E. coli cells already carrying a vector for the expression of TnsA, TnsB, and TnsC (pSL0283) were co-transformed with a vector expressing TniQ, Cascade and a CRISPR array targeting the different target sites (pSL0829-pSL0832 for tSL0005-tSL0008, respectively), and a vector encoding the truncation variants of the mini-transposon. Truncating the right transposon end to 97 bp or shorter (FIG. 68) resulted in integration preferentially in the T-RL orientation (at about 95% of all integration events).

### Methods for High-Throughput Transposon End Sequence Engineering and Testing

[0770] Pooled libraries of engineered transposon end sequences were generated using oligoarray synthesis (FIG. 69). Briefly, oligonucleotides were designed as multiple sub-libraries within a single large pooled library, and synthesized by Agilent. Each sub-library was amplified from the pool using unique primer pairs. The PCR amplicons and their designated backbone vectors were digested with matching restriction enzymes, the purified digestion products were ligated, and these ligation products were then used to transform electrocompetent E. coli NEB Turbo cells. Transformation reactions were plated on large LB-agar bioassay dishes with the appropriate antibiotic and grown overnight at 37° C. The colonies were then scraped and resuspended in LB, from which plasmid DNA was purified. These pooled plasmid libraries were deep sequenced to assess the starting input library (see below), and used in subsequent transposition assays.

[0771] Separate transposon end libraries were designed and prepared for the Right (R) and Left (L) transposon ends. These rationally designed libraries contained the wild-type transposon end sequence as well as perturbations that included from among the following:
[0772] a) all six predicted TnsB binding sites (TBSs), as well as a palindromic sequence close to the TBSs (herein numbered from 1-7) were arranged in all possible permutations of three to constitute a new transposon right end;
[0773] b) all six predicted TnsB binding sites (TBSs), as well as a palindromic sequence close to the TBSs (herein numbered from 1-7) were arranged in all possible permutations of two to constitute a new transposon right end;
[0774] c) 2-bp mutations that were tiled throughout the entirety of the transposon right end;
[0775] d) all possible 1-bp mutations within the terminal 8-bp of the transposon right end;
[0776] e) mutations to the right transposon end to replace stop codons with regular codons and to substitute codons encoding bulky/charged amino acids with codons encoding amino acids more suitable to function as a protein linker;
[0777] f) variable spacing between the TBSs of the transposon right end; and
[0778] g) variable spacing between the TBSs of the transposon left end.

[0779] Altered transposon right (R) end sequences were cloned into the pSL0938 plasmid backbone. Briefly, individual libraries were PCR amplified using unique primers (addendum 11.1) and were digested with BamHI and HindIII. pSL0938 was similarly digested with the addition of a dephosphorylation step. The digestion products were purified (either from gel or using a PCR clean-up kit) and ligated in multiple separate reactions. The separate reactions were combined, purified, and used to transform NEBTurbo E. coli cells by electroporation. The entire transformation reaction was plated on large bioassay dishes to ensure obtaining enough colonies to represent the diversity present in the library. The next day the colonies were resuspended in LB and used for plasmid extraction. A schematic of the cloning strategy can be found in FIG. 70. Sequences of all sequence variants of the transposon right end can be found in SEQ ID NOS: 955-1521.

[0780] Altered transposon left (L) end sequences were cloned into the pSL0938 plasmid backbone, using the same cloning strategy as for the transposon right end library with the exception that digestion was done using XbaI and KpnI. A schematic of the cloning strategy can be found in FIG. 70. Sequences of all sequence variants of the transposon left end can be found in SEQ ID NOS: 1524-1611.

### Protocol for Testing RNA-Guided DNA Integration Activity of Variant Transposon Libraries

[0781] Approximately 200 ng of the individual Right or Left Flank libraries were transformed into electrocompetent BL21 (DE3) together with ˜200 ng pSL1022 (pMachinery, expresses the CRISPR array (target 4), TniQ, Cascade, and TnsABC from a single T7 promoter on a pCDFDuet-1 backbone with spectinomycin resistance). Transformed cells were plated on agar plates with carbenicillin/spectinomycin/IPTG (0.1 mM) and grown at 37° C. for 24 h. After growth, the colonies were scraped from the plate and resuspended in LB. The equivalent of 1 ml of overnight liquid culture (roughly 5.6×10⁹ cells) was used to extract genomic DNA using a Wizard® Genomic DNA Purification Kit (Promega).

[0782] Integration events at the genomic target site were amplified by 20 cycles of PCR using a transposon- and genome-specific primer that carry Illumina® adapters. The PCR reaction was diluted 1:20 into a second PCR reaction (PCR2) where 10 cycles add specific barcodes to the Illumina® adapters. Fractions of PCR2 were run on a gel, and based on the intensity of their bands the original stocks were combined. The resulting combined samples were run on gel and extracted. After library quantification by qPCR, the combined library was sequenced on an Illumina® NextSeq® using a Mid output kit with 250 nt single-end reads. The same PCR approach was used for the original plasmid libraries to sample the diversity of the library and the relative abundances of each variant.

[0783] To calculate the relative integration efficiencies of each transposon variant, the number of reads for each variant were normalized to a fraction of wildtype reads. These normalized numbers were then used to calculate the difference in abundance between the starting plasmid library and the genomically integrated transposons.

Profiling of RNA-Guided DNA Integration Activity with Variant Transposon Libraries

[0784] Library a) tested all possible combinations of TnsB binding sites in three different positions in the right transposon end (FIGS. 71A-71G). Some high efficiency variants were identified. Particularly, variants with multiple copies of the most terminal and middle TnsB binding site from the right transposon ends. Library b) tested all possible combinations of TnsB binding sites in two different positions in the right transposon end (FIG. 72). Library b) results corroborated the results from library a), since a variant with two copies of the most terminal TnsB binding site from the right transposon end greatly increased integration efficiencies.

[0785] Library c) investigated the effect of 2-bp mutations that were tiled throughout the entirety of the transposon right end and revealed (FIG. 73) very interesting patterns in which residues allowed for efficient transposition. Mutations in the most inner TnsB binding site in the right transposon end increased transposition efficiency. Mutations on the most terminal and the middle TBSs showed very similar effects and demonstrated that the 7^{th}-10^{th} and 13^{th}-14^{th} bases of the TBS control efficient integration. In contrast to information available on the E. coli Tn7 transposon, the 8-bp terminal sequence appeared to be quite flexible to mutations with the exception of the most terminal 2-bp. Library d) explored the effect of 1-bp mutations within the terminal 8-bp of the transposon right end and validated (FIG. 74) the data from the 2-bp mutation panel, revealing high plasticity to mutations for the majority of sites in the 8-bp sequence. However, three of the variants appeared to be completely incapable of transposition

[0786] Library e) investigated mutations to the right transposon end to replace stop codons with regular codons and to substitute codons encoding bulky/charged amino acids with codons encoding amino acids more suitable to function as a protein linker (FIGS. 75A-75C). Library f) and library g) examined the effect of changing the distance in between TBS (FIG. 76 and FIGS. 77A-77E, respectively). Changing nucleotide identities within these spacings appeared to be inconsequential, however, the proper distance in between the TBSs allowed efficient transposition. These data revealed surprising patterns at 10 bp intervals, suggesting the positioning of the TBSs on the three-dimensional structure of the double-stranded DNA helix may be important.

### Example 12

### Identification and Functional Testing of Additional CRISPR-Transposon Homologs Containing Type I-F Variant CRISPR-Cas Systems

[0787] A computational and bioinformatics pipeline was developed to identify additional CRISPR-transposon systems. The pipeline may include the following steps (FIG. 78):
[0788] 1. psi-BLASTp of a candidate transposon-associated gene, such as the tnsB gene, searching all sequenced and available bacterial genomes and genomic contigs, to identify other tnsB family members
[0789] 2. Optionally performing a parallel psi-BLASTp with candidate CRISPR-associated (cas) genes specific to a particular CRISPR-Cas subtype, such that only those sequenced genomes and genomic contigs that contain co-occurrence of a tnsB ortholog and candidate cas gene are analyzed. This co-occurrence may be further constrained based on the two genes being separate by less than a certain distance in primary sequence space. The cas gene may include from among the following, but is not limited to: cas12, cas9, cas8, cas7, cas6, cas5, csy1, csy3, csy2, and further subtype-specific variants of these cas gene families.
[0790] 3. Automated detection of transposon boundary sequences flanking the tnsB gene. This detection step returns candidates pairs of transposon ends (left and right, L and R), flanking the tnsB gene. This transposon end detection algorithm may encompass from amongst the following heuristics:
   [0791] a. Detection of a direct repeat, constituting a target site duplication (TSD) from prior transposition event. The TSD may be 5 base pairs in length.
   [0792] b. Detection of a highly conserved terminal inverted repeat sequence. The terminal inverted repeat sequence may be 8 base pairs in length, and the inverted repeats within the candidate left (L) and right (R) transposon ends may be identical, or be imperfectly matching between the two ends.
   [0793] c. Detection of multiple inverted repeat elements, often considered to be TnsB binding sites based on homology to the well-studied Tn7 transposon from E. coli. These binding sites may be identified de novo (i.e. without any a priori sequence information), by sequence similarity to known TnsB binding sites (e.g. from E. coli Tn7, from V. cholerae Tn6677, or additional transposon sequences), by a combination of the two approaches, or by other heuristics.
   [0794] d. Detection of transposon end sequences within intergenic regions
   [0795] e. The presence of additional gene homologs of other known or expected components of Tn7- or Tn5053-like transposons, including tnsA, tnsC, miQ, other variants of these genes, or other transposon-associated genes
[0796] 4. In the case of multiple candidate transposon ends, additional manual inspection may be employed to further prioritize or collate the candidate set of transposon end pairs.
[0797] 5. Bioinformatic analysis of the other genes found within the candidate transposon, based on HHpred analysis or other similar analytical approaches
[0798] 6. CRISPR array detection using available CRISPRfinder tools (e.g. CRISPRCasFINDER, accessible online through CRISPR-Cas++), or custom CRISPR array detection algorithms
   Bioinformatic Identification of CRISPR-Transposon Systems with Intact I-F Variant CRISPR-Cas Systems

[0799] Using the pipeline described above, all genome and genomic contig sequences from NCBI that contained the co-occurrence of the following gene families: tnsA, tnsB, tnsC, tniQ, cas8, cas7, and cas6 were extracted. These bioinformatics searches were seeded with gene orthologs derived from the V. cholerae Tn6677 transposon. A phylogenetic tree was constructed using tnsB homology, and the candidate tnsB genes/proteins were further grouped into different “phylo groups” encompassing discrete clades. After performing transposon end detection as outlined above, CRISPR-transposon systems were identified.

Bioinformatic Identification of CRISPR-Transposon Systems with Intact I-F Variant CRISPR-Cas Systems, Containing Natural tnsA-tnsB Fusions

[0800] Separately, a psi-BLASTp search was seeded with an artificial fusion of the tnsA and tnsB genes from V. cholerae Tn6677, in order to look for closely related homologs that contain natural tnsA-tnsB fusions. Such natural fusion homologs could be readily identified, as confirmed by HHpred analysis of candidate tnsA-tnsB fusion genes (FIG. 79), and these fusion genes co-occurred with type I-F variant CRISPR-Cas systems.

### Design of Expression Plasmids and Mini-Transposon Donor DNA Plasmids for New Candidate CRISPR-Transposon Systems

[0801] The molecular machinery derived from the V. cholerae Tn6677 transposon robustly catalyzed RNA-guided DNA integration in an E. coli expression host, when the CRISPR RNA (crRNA, also known as the guide RNA, or gRNA) and all 7 protein-coding genes were expressed from a single upstream T7 promoter, as discussed above. A representative single-expression effector plasmid encoding such a system is typified by pSL1022 (SEQ ID NO: 855), which targets lacZ for DNA integration using crRNA-4. The single-expression effector plasmid expressing all the protein and RNA components was combined with a pDonor plasmid encoding the mini-transposon, in which an arbitrary genetic cargo was flanked by the identified left (L) and right (R) ends of the transposon. The single-expression effector plasmid in this embodiment was cloned onto a pCDFDuet-1 derivative vector, and the mini-transposon donor DNA was cloned onto a pUC19 derivative vector.

[0802] Single-expression effector plasmids, and associated mini-transposon donor DNA plasmids, were designed and synthesized for 14 new candidate CRISPR-transposon systems, based on the validated design from the V. cholerae Tn6677 system (FIG. 80). The single-expression effector plasmids were designed to use the same exact 32-nucleotide spacer sequence as crRNA-4 from the V. cholerae system, targeting lacZ adjacent to a 5′-CC-3′ protospacer adjacent motif (PAM), and the pDonor plasmids were designed to mobilize the same chloramphenicol resistance gene (CmR) as was used in previous experiments with the V. cholerae. pDonor designs employed herein relied on a slightly new vector design previously tested with the V. cholerae system, in which the lacZ-alpha fragment and promoter-operator elements near the multiple cloning site (MCS) were removed. RNA-guided DNA integration with these new pDonor designs (e.g. encoded by pSL0921 and pSL1235; SEQ ID NOs: 1613 and 1614, respectively) showed slightly higher integration efficiencies in E. coli, as compared to an earlier pDonor design (encoded by pSL0527, SEQ ID NO: 7), when tested in parallel (FIG. 81).

[0803] A list of the 8 CRISPR-transposon systems, as well as the plasmid identifiers for the single-expression effector plasmid, and the mini-transposon donor DNA plasmid, can be found in FIG. 80B. The complete sequences of all the plasmids can be found SEQ ID NOs: 1612-1630 and 1897-1908. The sequence of genes, proteins, CRISPR repeats, and transposon ends for each homologous CRISPR-transposon system can be found in SEQ ID NOs: 1768-1896 and 1909-2000.

[0804] For Photobacterium ganghwense strain JCM 12487, the naturally occurring tnsB gene is split into two separate open reading frames (ORFs) that are annotated in NCBI as two separate protein accession IDs, WP_053061936.1 and WP_053061935.1. Upon closer inspection of this gene arrangement, a potential frameshifting sequence was identified directly at the junction of these two ORFs, and further alignments confirmed that both separate ORFs encode a protein that is present in other homologous systems as a single contiguous ORF and TnsB protein. Therefore, to avoid any requirement for frameshifting, or the potential for truncated TnsB protein expression, the coding sequence was engineered to eliminate the poly A frameshifting hotspot. and a single C was inserted, in order to generate a full-length tnsB gene containing a single contiguous ORF. This sequence can be found in the final single-expression effector plasmid sequence for the CRISPR-transposon system from Photobacterium ganghwense strain JCM 12487 (pSL1785, SEQ ID NO: 1627).

[0805] CRISPR-transposon systems selected from Aliivibrio wodanis 06/09/160 and Parashewanella spongiae strain HJ039 contain natural occurring fusions between the tnsA and tnsB genes, which was readily detectable by domain assignment by HHpred. These systems were designed and tested in engineered vectors containing the TnsA-TnsB fusion.

Experimental Testing of RNA-Guided DNA Integration with New Candidate CRISPR-Transposon Systems

[0806] 14 CRISPR-transposon systems were tested for RNA-guided DNA integration in an E. coli expression system according to the prior work with the CRISPR-transposon system from Vibrio cholerae strain HE-45, derived from Tn6677. Chemically competent BL21 (DE3) cells were first transformed with the pDonor plasmid, cells were plated on LB-agar plates containing carbenicillin, and individual colonies were picked to inoculate overnight cultures. These cultures were then made chemically competent, and then transformed with the cognate single-expression effector plasmid, also known as pCQT (where CQT denotes the order of modules on the vector: C=CRISPR array, Q=TniQ-Cas8-Cas7-Cas6 operon, and T=TnsA-TnsB-TnsC operon). In each case, the pDonor vector contained the transposon ends derived from the same CRISPR-transposon system for which the matching pCQT encoded the associated CRISPR- and transposon-associated factors. Cells were plated LB-agar plates containing both carbenicillin and spectinomycin, as well as 0.1 mM IPTG to induce expression of the protein and RNA components encoded on pCQT.

[0807] After an overnight growth on solid media, colonies were scraped from the plate and subjected to PCR analysis. PCR primers were chosen, in which one primer had a complementary binding site within the transposon donor DNA common to all pDonor plasmids (residing within the CmR antibiotic resistance gene), and the second primer had a complementary binding site within the lacZ sequence in genomic DNA. Primer pairs were chosen that would amplify either a product of integration in the target-right-left orientation (tRL (T-RL)), or a product of integration in the target-left-right orientation (LR (T-LR)); products may also be present for both orientations, because dozens to hundreds of colonies are analyzed as a pooled mixture in this experiment, and thus there are heterogeneous genomes present in the same mixture. Specifically, PCR reactions to amplify tRL products utilized primers oSL1164 (5′-CGCCGCACATCTGAACTTC-3′ SEQ ID NO: 353) and oSL0763 (5′-GTGGTATTCACTCCAGAGCG-3′ SEQ ID NO: 343). PCR reactions to amplify tLR products utilized primers oSL1179 (5′-CTGAACTTCAGCCTCCAGTAC-3′ SEQ ID NO: 1765) and oSL1656 (5′-CCATGTCGGCAGAATGCTTA-3′ SEQ ID NO: 1766).

[0808] In the presence of a bona fide integration event, the combined primers yield a PCR product of ˜700 base pairs for tRL and ˜500 base pairs for tLR. As shown in FIG. 82, robust RNA-guided DNA integration was observed for all 14 CRISPR-transposon homologs containing I-F variant CRISPR-Cas systems, as well as for the positive control containing the system derived from Vibrio cholerae strain HE-45; no products were observed for a negative control, in which pSL1022 (pCQT for V. cholerae strain HE-45) was combined with an empty vector control in place of pDonor. The tested systems showed integration in both the tLR and tRL orientations. qPCR or next-generation sequencing is used to determine the quantitative difference in integration orientation, and integration efficiency, across many distinct target sites.

[0809] To further confirm that the observed PCR products were indicative of bona fide RNA-guided transposition, i.e. RNA-guided DNA integration, select product bands were excised from the gel, purified using a QIAquick gel kit, and submitted for Sanger sequencing analysis. For the PCR products resulting from primer pairs intended to amplify the tRL products, the bands were sequenced with either the primer specific to CmR within the donor DNA (effectively sequencing outwards towards the transposon-genome junction), or with a lacZ genome-specific primer, effectively sequence inwards towards the genome-transposon junction. For the PCR products resulting from primer pairs intended to amplify the tLR products, only the bands with a primer specific to CmR within the donor DNA (effectively sequencing outwards towards the transposon-genome junction) were sequenced. Sanger sequencing conclusively verified all the expected transposition products, and in all cases, revealed an insertion site that was 47-51 bp downstream of the target site complementary to the spacer sequence for crRNA-4. As previously documented, insertion sites can be slightly variable across a population of cells, and thus, for cell populations in which there is more heterogeneity in the insertion site choice, this manifests itself in Sanger sequencing data as mixed peaks immediately as the sequencing reaction proceeds past the transposon-genome junction. This feature was readily observable for some systems in this lacZ-targeting experiment, such as the system derived from Vibrio cholerae strain 4874. These mixed peaks often result in the appearance of apparent disagreement between the sequence past the genome-transposon junction and the reference sequence, however may be attributed to this integration site heterogeneity across the population of genomes being tested in the experiment, as demonstrated previously. In contrast, other systems, such as that derived from Pseudoalteromonas sp. P1-25, the absence of extensive heterogeneity in the peaks, past the transposon-genome junction, indicated that these systems exhibited a more precise and homogeneous insertion site selection.

### Example 13

### Identification and Functional Testing of Additional CRISPR-Transposon Homologs Containing Type V CRISPR-Cas Systems

[0810] A CRISPR-associated transposon from Scytonema hofmannii strain PCC 7110 that uses a Type V CRISPR-Cas system (referred to herein as Sho-INTEGRATE or ShoINT) was characterized. Using vector designs similar to the ones used in the above work (FIG. 83), RNA-guided DNA integration was shown by PCR and qPCR (FIG. 84). A random fragmentation sequencing method was also adopted to reveal genome wide specificity (FIG. 85) of this system as well as of two previously published CRISPR-transposon systems: a type V system published by Strecker et al. (Nature Communications 10, 212 (2019), incorporated herein by reference, and referred to herein as ShCAST), and the type I system described above from V. cholerae (published in Klompe et al., Nature 571, 219-225 (2019), incorporated herein by reference, and referred to herein as Vch-INTEGRATE or VchINT).

### Protocol for Testing RNA-Guided DNA Integration Activity

[0811] Sequence information for plasmids used can be found in SEQ ID NOs: 1631-1633, 1641, and 1643-1644. The sequences of the individual genes, CRISPR repeats, proteins, and mini-transposons for using this Type V variant can be found in SEQ ID NOs: 422-425, 437-449, and 1648-1650

[0812] BL21 (DE3) E. coli cells were co-transformed with pDonor (pSL0948, SEQ ID NO: 1631) and pCCT (pSL1114 (SEQ ID NO: 1632) or derivative). Transformations were plated on agar plates containing spectinomycin/carbenicillin, and incubated at 37° C. The next morning colonies were resuspended in LB and spread on agar plates containing spectinomycin/carbenicillin/IPTG (0.1 mM) and again incubated at 37° C. After 24 h the colonies were resuspended in LB. OD measurements were made, and normalized amounts were transferred to new tubes. The aliquots were spun down and resuspended in water. Samples were then boiled at 95° C. for 10 min, after which the samples are spun down and dilutions are made for the supernatant for downstream analyses.

[0813] Integration events at the genomic target site were amplified by 30 cycles of PCR using a transposon- and genome-specific primer. PCR reactions were analyzed using agarose gel electrophoresis.

[0814] Quantification of integration events was done using qPCR with a transposon- and genome-specific primer and SsoAdvanced™ Universal SYBR® Green Supermix (BioRad).

[0815] Random fragmentation was performed on genomic DNA (isolated with the ‘Wizard® Genomic DNA Purification’ kit from Promega) for 14 min using NEBNext® dsDNA Fragmentase® (New England Biolabs). The fragmented DNA was purified and size selected using Mag-Bind® Total Pure NGS magnetic beads (Omega). All subsequent steps followed the exact protocol as described for the NEBNext® Ultra™ II DNA library Prep Kit for Illumina® (New England Biolabs). An extra step was added to selectively amplify fragments that contained the transposon sequence by using a transposon specific primer in combination with a primer against the universal adapter. After this the individual samples were barcoded by 10 PCR cycles and Illumina®'s PCR2 index primers. Libraries were pooled, quantified using the NEBNext® Library Quant Kit (New England Biolabs), and run on a mid-output Illumina® NextSeq®. Custom python scripts available on GitHub under ‘Sternberg Lab at Columbia University’ were used to analyze the data.

[0816] A CRISPR-transposon that can mobilize using a type V CRISPR-Cas system for target site selection was characterized. This system preferred to integrate with the left transposon end closest to the target site, an orientation referred to herein as tLR or T-LR. Integration efficiencies differ per guide RNA but are generally between 30-40%. The vectors were streamlined so that all the components are present on a single plasmid. Deep sequencing revealed a much higher specificity for VchINT, the type I system, than for both of the type V systems. Additionally, it showed that each system had a different pattern regarding the distance of the integration site from the target site, as ShoINT consistently integrated ˜28 bp away, ShoCAST preferred distances of ˜40 bp, and VchINT was primarily found ˜49 bp counting from the 3′ end of the target sequence.

### Example 14

### Development of CRISPR RNA-Guided Integrases for High-Efficiency, Multiplexed Bacterial Genome Engineering

[0817] Described above are Tn7-like transposases associated with CRISPR-Cas systems, which mediate highly efficient RNA-guided DNA insertion (FIGS. 86A-86D). Herein, a streamlined system was developed and optimized to be capable of making accurate insertions at >90% efficiency while being expressed from a single transformable plasmid (FIG. 86E). Multiplexed crRNA arrays were incorporated to make multiple simultaneous insertions without significant hits to efficiency and specificity (FIG. 94). Because the proposed mechanism of transposition is self-contained and requires minimal host factors, transposition did not rely on common E. coli recombination pathway factors, and application of the system was translated to other species of interest.

### Single-Plasmid RNA-Guided DNA Integration (INTEGRATE) Constructs Allow for Efficient and Precise RNA-Guided DNA Integration

[0818] The initial expression approach for the transposon cargo sequence, crRNA and seven functional proteins involved 3 separate plasmids (FIG. 86C): pQCascade expressing the crRNA as well as the four proteins forming the Q-Cascade native operon, pTnsABC expressing the TnsABC native operon, and pDonor containing the cargo.

[0819] Starting from this 3-plasmid approach, several plasmid designs combining individual RNA-guided DNA integration components (FIGS. 86D and 86E) were systematically cloned and benchmarked by qPCR. This led to an effector plasmid design pCQT, where a single lac-inducible T7 promoter drives expression of the transcript containing the crRNA array, followed by the QCascade-TnsABC fusion operon (FIG. 86G).

[0820] To further simplify, the cargo sequence was cloned onto pCQT, and this all-in-one (pAIO) plasmid construct was tested across 4 different plasmid backbones of varying copy numbers (FIG. 87). In general, higher efficiencies were observed for our lowest copy-number backbones, and AIO constructs based on the pBBR1 and pSL101 reached 90+% integration (FIG. 88A). To see whether the improvement in efficiencies would translate across multiple targets, efficiencies at five target sites previously used in the above example were assessed and it was determined that the pBBR1-based AIO led to significant efficiency increases across the board compared to the initial 3-plasmid approach (FIGS. 88B and 88C). This highly efficient, single-plasmid system maintained remarkable genome-wide specificities, and translated across three common laboratory E. coli strains, as revealed by modified TnSeq analysis (FIG. 89).

[0821] Surprisingly, qPCR analysis of the pAIO constructs also showed substantial reduction of the strong bi-directional integration at certain targets previously observed with the initial 3-plasmid expression. While investigating this effect, a lac promoter upstream of the Right transposon end on our original pDonor was identified. Removing this lac promoter led to a similar reduction in bi-directional integration at the affected target.

[0822] The role of expression strength was assessed by modifying the single promoter driving expression or the RNA-guided DNA integration components (FIG. 90). Utilizing in a panel of artificial constitutive E. coli promoters of varying strengths, stronger expression was observed that, in general, drove higher rates of integration, while not affecting genome-wide specificity (FIGS. 90A and 90B). Efficient integration was also shown with a natural broad-host promoter recently adopted for metagenomic microbiome engineering, confirming flexibility in expressing the single transcript construct.

[0823] A robust increase in integration efficiency was observed as a result of dropping the incubation temperature (FIG. 90C). This was replicated across three promoter configurations, and at no cost to specificity.

[0824] The capability of the single-plasmid construct to deliver large multi-kb genetic payloads was investigated (FIG. 92). The pCQT/pDonor expression approach was used with the large cargos without the complication of potentially unstable AIO plasmids. Initial data using pT7-driven pCQT showed a steep decrease in efficiency with larger cargos, similar to the 3-plasmid systems (FIG. 92A). Transformation efficiencies were affected by the presence of IPTG, thus the T7 promoter was replaced with a strong constitutive promoter to express the system without IPTG toxicity. This replacement resulted improved the efficiency reduction of large cargos (FIGS. 92B-92C). Remarkably, the incubation was further decreased to 30° C., over 90% integration efficiencies were observed across our panel of cargo sizes, and this effect was replicated at a different target sites.

### Orthogonal RNA-Guided DNA Integration (INTEGRATE) Systems Enable Multiple Iterative Insertions

[0825] The efficient mobilization by Vibrio cholerae INTEGRATE of any cargo flanked by the transposon ends may indicate that using the same system for multiple iterative insertions into varying loci within the same genome is potentially problematic due to the previously inserted cargo also being mobilized to a new site once a new target is introduced. To confirm this phenomenon, a cargo was inserted at the lacZ target site using an AIO construct on a temperature-sensitive plasmid backbone and a fully integrated clone was isolated and subjected to temperature-based curing. Subsequent introduction of a donor-less effector plasmid with a new crRNA targeting a second locus (glmS) resulted in integration of the genomically integrated cargo, signaling remobilization of this cargo. When a second donor was included along with the machinery, competing insertions were observed at the glmS locus. While the majority of insertion was from the new exogenously introduced donor, there was a small but detectable presence of the genomically derived donor. As such, re-mobilization capacity of genomically integrated cargo sequences and potential cross-contamination effect of different cargos during iterative rounds of integration.

[0826] Tapping into the diverse potential pool of functional CRISPR-associated, RNA-guided transposases, a phylogenetically distant yet active transposase system from Scytonema hofmannii strain PCC 7110 was discovered, which utilizes a Type-V, C2c5 (Cas12k) protein for DNA binding. This ShoC2c5 system inserted its donor in two possible orientations, and also exhibited target site immunity similar to the Vch system.

[0827] While both systems function with their respective donors, they were unable to direct guided insertions with each other's donors, as confirmed by PCR. Thus, using this Sho INTEGRATE system, a clean second DNA insertion was made into the isolated clone with a previously integrated with a Vch cargo, as confirmed by qPCR data (FIG. 97).

[0828] Vch RNA-Guided DNA Integration (INTEGRATE) as a Powerful Tool for Single-Step Multiplexed DNA Insertions

[0829] Due to the independence of the cargo sequence from its intended target, it was possible to insert the same cargo at multiple loci within the same genome in a single step, through the simultaneous expression of multiple crRNAs (FIG. 94A). Furthermore, by taking advantage of the native crRNA processing capability of Cas6, these multiple spacers were expressed within single CRISPR arrays as part of the single-promoter, single-plasmid AIO construct, providing an avenue for convenient single-step multiplexed integration.

[0830] The ability of these multi-spacer arrays to produce functional insertions was evaluated. By qPCR, the integration efficiencies were measured at the lacZ locus when the lacZ spacer was first in a one, two, or three-spacer crRNA array; adding more spacers to the array did not considerably affect activity. Within the three-spacer arrays, the lacZ spacer was moved to the second or third position and a gradual but minimal decrease in activity compared to the first position was observed (FIG. 94B).

[0831] Using the multi-spacer AIO constructs, PCR integration was observed at all sites targeted. Genome-wide Tn-Seq analysis of transformed populations confirmed that multi-spacer INTEGRATE retained high specificity while distributing insertions to multiple target sites. Furthermore, double and triple-inserted clones were isolated by PCR (FIG. 94C).

[0832] Proof-of-concept applications of the multiplexable system were explored that could also confirmed that these simultaneous insertions were indeed occurring in the same individual genomes, as opposed to orthogonally in multiple genomes within polyclonal colonies. The first application utilized the multiplexed AIO constructs to direct single step insertional knockouts of multiple genes. genes involved in amino acid auxotrophy were targeted, in particular thrC and lysA, as knocking out these genes in E. coli produces phenotypic requirements for threonine and lysine in minimal M9 growth media. Spacers for both thrC and lysA were incorporated in the 2-spacer AIO construct, and double knockouts were routinely isolated by colony screening on minimal media (FIG. 95A). Isolated double knockouts were confirmed by PCR, as well as by overnight growth assays, where the isolated clones required both lysine and threonine for growth. In addition, the stability of these double insertions was probed by continuous culturing of a clone in rich media, with all the relevant machineries still being present, for approximately 50 doubling cycles (FIG. 95B). The resulting cells remained refractory to minimal media growth unless provided the combination of amino acids, this indicating the stability of INTEGRATE insertions in producing functional phenotypes.

### Application of RNA-Guided DNA Integration (INTEGRATE) in Diverse Genetic Backgrounds

[0833] Without being bound by theory, the proposed mechanism of the canonical E. coli Tn7 system may involve staggered double-strand cuts at both ends of the donor as well as at the insertion site, followed by joining of the 3′ ends of the excised transposon to the 5′ ends at the target, and subsequent simple repair of the remaining gaps at the 5′ transposon end. As the RNA-guided DNA integration system described herein utilizes transposase proteins homologous to ones of canonical Tn7, whether DNA transposition activity was dependent on common homologous recombination factors or mismatch repair was investigated. The transposition efficiencies in a panel of Keio E. coli strains, with RecA, B, C, D, F or mutS individually knocked out were evaluated by qPCR, and active transposition was observed across all 6 knockouts (FIG. 91).

[0834] Expanding beyond the E. coli genetic background, the system was applied in other genetic backgrounds. Klebsiella oxytoca, a clinically relevant pathogen implicated in drug-resistant infections, and Pseudomonas putida, an important bacteria platform for biotechnological and industrial applications were selected for testing with the RNA-guided DNA integration system (FIG. 98A). The AIO construct on the pBBR1 plasmid backbone, driven by the strong J23119 constitutive promoter was used. activity at all 4/4 P. putida and 5/5 K. oxytoca target sites (FIG. 4) was observed by PCR and confirmed by Sanger sequencing (FIGS. 98B and 98C. Data from the Tn-Seq analysis further confirmed successful cargo integration at these sites, as well as high genome-wide specificity (FIG. 98D).

A Self-Propagating Genetic Element with Vch RNA-Guided DNA Integration (INTEGRATE)

[0835] A fully programmable, self-propagating autonomous transposon system was created that construct contains a multi-spacer, single CQT operon within the transposon flanking sequences, allowing the system to now mobilize genetic encoding of its own effector units as part of the cargo. The capacity for the genomically inserted cargo to be remobilized from the introduction of a new spacer or target was demonstrated (FIG. 93), thus an autonomous system self-propagates in a pre-programmed way by first using a spacer to insert into horizontally transferred plasmids. Once the plasmid has been transferred to a different naive cell through conjugation, the onboard system leverages a second, genome specific spacer to integrate into a predetermined locus within this naive cell, completing a cycle of propagation.

[0836] The self-contained, autonomous INTEGRATE construct (pAAIO) was evaluated in the E. coli conjugation-capable S17 strain. The test version of pAAIO contained a 2-spacer array: one allowing for insertion into both the initial E. coli genome, as well as from E. coli into a similar target site on our conjugative pBBR1 plasmid; the second spacer targeting the Klebsiella oxytoca genomic beta-lactamase gene. pAAIO was successfully integrated into E. coli at 90+% efficiency, followed by temperature curing of the vessel plasmid and selection of an integrated clone.

[0837] The ability to efficiently make precise insertions of large genetic cargos into bacterial genomes, without the need for DSBs or drug selection, is valuable for a variety of strain engineering applications. Through rational engineering steps, versions of the Vibrio cholerae RNA-guided DNA integration systems that express all the necessary components were constructed using minimal genetic parts in two-plasmid or all-in-one, single-plasmid constructs. These minimal constructs enabled customizations in few cloning steps, and produced efficient insertions after a single transformation step and subsequent incubation. Leveraging crRNA processing of the Cas6 subunit, AIO versions were easily modified to express multi-spacer CRISPR arrays and facilitated multiple simultaneous insertions in the same simple workflow, allowing for rapid engineering of bacterial genomes.

### RNA-Guided DNA Integration at Temperatures Below 37° C.

[0838] Competent E. coli cells are transformed with the appropriate plasmids required for RNA-guided DNA integration, and the transformants are recovered in LB media at 37° C. for 1-1.5 hours. Recovered cells are then plated on LB-agar with appropriate antibiotic selection, and with 0.1 mM IPTG if required for induction of T7 promoters. The plates are incubated at 20-35° C., e.g., 30° C. or 25° C., for at least 24 hours, e.g., 30 hours. Colonies are then scraped and lysed for further analysis.

Multiplexed RNA-Guided DNA Integration with Multiple gRNAs

[0839] Combinations of 2 or 3 spacers are cloned into the CRISPR array in pAIO entry vectors using either 2 or 3 pairs of oligoduplexes with compatible sticky ends. Competent E. coli cells are transformed with the resulting construct(s), and the RNA-guided DNA integration assays are carried out using previously described methods. Double or triple inserted cells are screened by colony PCR across each of the respective target sites, or by using phenotypic selection based on the targets of integration (e.g. blue-white colony screens for lacZ insertions, colony screens on M9 minimal media for insertions targeting thrC or lysA).

### Programmed Genomic Deletions Using a CRISPR-Transposon-Recombinase System

[0840] Competent E. coli cells are transformed with the pAIO-derived construct containing a pair of spacers cloned as described previously, where both gRNAs target the same genomic strand and the gRNAs flank the sequence intended for deletion. The mini-transposon donor DNA contains a recombination sequence, such as a loxP recognition sequence, adjacent to the transposon right end sequence; in other embodiments, alternative recombination sequences may be used, and the recombination sequence may be contained within other regions of the donor DNA. Transformed cells are recovered for 1-1.5 hours at 37° C. in liquid LB media, and are incubated on LB-agar with appropriate antibiotic selection at 37° C. for 24 hrs. Colonies are scraped and plated at different dilutions on LB-agar for a second overnight to obtain clonal colonies. Colonies are screened for double insertions and are then made competent using standard methods.

[0841] The scope of the present invention is not limited by what has been specifically shown and described hereinabove. Those skilled in the art will recognize that there are suitable alternatives to the depicted examples of materials, configurations, constructions and dimensions. Numerous references, including patents and various publications, are cited and discussed in the description of this invention. The citation and discussion of such references is provided merely to clarify the description of the present invention and is not an admission that any reference is prior art to the invention described herein. All references cited and discussed in this specification are incorporated herein by reference in their entirety. Variations, modifications and other implementations of what is described herein will occur to those of ordinary skill in the art without departing from the spirit and scope of the invention. While certain embodiments of the present invention have been shown and described, it will be obvious to those skilled in the art that changes and modifications may be made without departing from the spirit and scope of the invention. The matter set forth in the foregoing description is offered by way of illustration only and not as a limitation.

1-12. (canceled)

13. A system for RNA-guided DNA integration, comprising:
i) an engineered Type I-F CRISPR-Cas system, and/or one or more vectors encoding the engineered Type I-F CRISPR-Cas system, wherein the Type I-F CRISPR-Cas system comprises: (a) at least one Cas protein, and (b) a guide RNA (gRNA); and
ii) an engineered transposon system, or one or more vectors encoding the engineered transposon system,
wherein, when one or more vectors are employed, the engineered Type I-F CRISPR-Cas system and the engineered transposon system are on the same or different vector(s).

14. The system of claim 13, wherein the at least one Cas protein comprises Cas5, Cas6, Cas7, and Cas8.

15. The system of claim 13, wherein the engineered transposon system comprises TnsA, TnsB, and TnsC.

16. The system of claim 13, wherein the engineered transposon system is derived from a Tn7 transposon system.

17. The system of claim 13, wherein the engineered transposon system is derived from Vibrio cholerae.

18. The system of claim 13, wherein the engineered transposon system comprises: i) TnsA, TnsB, and TnsC, and ii) TnsD and/or TniQ.

19. The system of claim 13, further comprising a donor DNA to be integrated, wherein the donor DNA comprises a cargo nucleic acid sequence and first and second transposon end sequences, wherein the cargo nucleic acid sequence is flanked by the first and second transposon end sequences.

20. The system of claim 19, wherein the first and second transposon end sequences are Tn7 transposon end sequences.

21. The system of claim 13, wherein the system further comprises a second engineered CRISPR-Cas system, wherein the second engineered CRISPR-Ca system is a Type I or Type V engineered CRISPR-Cas system, and a second engineered transposon system.

22. A method for RNA-guided DNA integration, the method comprising introducing into a cell:
a) a system comprising:
i) an engineered Type I-F CRISPR-Cas system, and/or one or more vectors encoding the engineered Type I-F CRISPR-Cas system, wherein the Type I-F CRISPR-Cas system comprises: (a) at least one Cas protein, and (b) a guide RNA (gRNA), and
ii) an engineered transposon system, or one or more vectors encoding the engineered transposon system; and
b) a donor sequence comprising cargo nucleic acid sequence flanked by first and second transposon end sequences,
wherein the cell comprises a nucleic acid sequence with a target site.

23. The method of claim 22, wherein the at least one Cas protein comprises Cas5, Cas6, Cas7, and Cas8.

24. The method of claim 22, wherein the engineered transposon system comprises TnsA, TnsB, and TnsC.

25. The method of claim 22, wherein the engineered transposon system is derived from a Tn7 transposon system.

26. The method of claim 22, wherein the engineered transposon system is derived from Vibrio cholerae.

27. The method of claim 22, wherein the engineered transposon system comprises: i) TnsA, TnsB, and TnsC, and ii) TnsD and/or TniQ.

28. The method of claim 22, wherein the first and second transposon end sequences are Tn7 transposon end sequences.

29. The method of claim 22, wherein the engineered Type I-F CRISPR-Cas system and the engineered transposon system are on the same or different vector(s).

30. The method of claim 22, wherein the method further comprises introducing into the cell a second engineered CRISPR-Cas system, wherein the second engineered CRISPR-Ca system is a Type I or Type V engineered CRISPR-Cas system, and a second engineered transposon system.

31. The method of claim 22, wherein the CRISPR-Cas system binds to the target site.

32. The method of claim 22, wherein the donor sequence is integrated downstream of the target site.

The application's sequence listing, which the Patent Office published only in electronic form, follows.

SEQUENCE LISTING (2005 sequences)

SEQ ID NO: 1 - DNA, 9467 bp, Synthetic construct
  source 1..9467: mol_type = other DNA
cgggatctcgacgctctcccttatgcgactcctgcattaggaaattaatacgactcactataggggaattgtgagcggataacaattcccctgtagaaataattttgtttaactttaataaggagatataccatggctaaagcaaactcttcattttctgaagtgcaaattgcccgtcgtattaaagaggggcgtggccaagggcatggtaaagactatattccatggctaacagtacaagaagttccttcttcaggtcgttcccaccgtatttattctcataagacgggacgagtccatcatttgctatctgacttagagcttgctgtttttctcagtcttgagtgggagagcagcgtgctagatatacgcgagcagttccccttattacctagtgataccaggcagattgcaatagatagtggtattaagcatcctgttattcgtggtgtagatcaggttatgtctactgattttttagtggactgcaaagatggtccttttgagcagtttgctattcaagtcaaacctgcagcagccttacaagacgagcgtaccttagaaaaactagaactagagcgtcgctattggcagcaaaagcaaattccttggttcatttttactgataaagaaataaatcccgtagtaaaagaaaatattgaatggctttattcagtgaaaacagaagaagtttctgcggagcttttagcacaactatccccattggcccatatcctgcaagaaaaaggagatgaaaacattatcaatgtctgtaagcaggttgatattgcttatgatttggagttaggcaaaacattgagtgagatacgagccttaaccgcaaatggttttattaagttcaatatttataagtctttcagggcaaataagtgtgcagatctctgtattagccaagtagtgaatatggaggagttgcgctatgtggcaaattaatgaggttgtgctatttgataatgatccgtatcgcattttggctatagaggatggccaagttgtctggatgcaaataagcgctgataaaggagttccacaagctagggctgagttgttgctaatgcagtatttagatgaaggccgcttagttagaactgatgacccttatgtacatcttgatttagaagagccgtctgtagattctgtcagcttccagaagcgcgaggaggattatcgaaaaattcttcctattattaatagtaaggatcgtttcgaccctaaagtcagaagcgaactcgttgagcatgtggtccaagaacataaggttactaaggctacagtttataagttgttacgccgttactggcagcgtggtcaaacgcctaatgcattaattcctgactacaaaaacagcggtgcaccaggggaaagacgttcagcgacaggaacagcaaagattggccgagccagagaatatggtaagggtgaaggaaccaaggtaacgcccgagattgaacgcctttttaggttgaccatagaaaagcacctgttaaatcaaaaaggtacaaagaccaccgttgcctatagacgatttgtggacttgtttgctcagtattttcctcgcattccccaagaggattacccaacactacgtcagtttcgttatttttatgatcgagaataccctaaagctcagcgcttaaagtctagagttaaagcaggggtatataaaaaagacgtacgacccttaagtagtacagccacttctcaggcgttaggccctgggagtcgttatgagattgatgccacgattgctgatatttatttagtggatcatcatgatcgccaaaaaatcataggaagaccaacgctttacattgtgattgatgtgtttagtcggatgatcacgggcttttatatcggctttgaaaatccgtcttatgtggtggcgatgcaggcttttgtaaatgcttgctctgacaaaacggccatttgtgcccagcatgatattgagattagtagctcagactggccgtgtgtaggtttgccagatgtgttgctagcggaccgtggcgaattaatgagtcatcaggtcgaagccttagtttctagttttaatgtgcgagtggaaagtgctccacctagacgtggcgatgctaaaggcatagtggaaagcacttttagaacactacaagccgagtttaagtcctttgcacctggcattgtagagggcagtcggatcaaaagccatggtgaaacagactataggttagatgcatctctgtcggtatttgagttcacacaaattattttgcgtacgatcttattcagaaataaccatctggtgatggataaatacgatcgagatgctgattttcctacagatttaccgtctattcctgtccagctatggcaatggggtatgcagcatcgtacaggtagtttaagggctgtggagcaagagcagttgcgagtagcgttactgcctcgccgaaaggtctctatttcttcatttggcgttaatttgtggggtttgtattactcggggtcagagattctgcgtgagggttggttgcagcggagcactgatatagctagacctcaacatttagaagcggcttatgacccagtgctggttgatacgatttatttgtttccgcaagttggcagccgtgtattttggcgctgtaatctgacggaacgtagtcggcagtttaaaggtctctcattttgggaggtttgggatatacaagcacaagaaaaacacaataaagccaatgcgaagcaggatgagttaactaaacgcagggagcttgaggcgtttattcagcaaaccattcagaaagcgaataagttaacgcccagtactactgagcccaaatcaacacgcattaagcagattaaaactaataaaaaagaagccgtgacctcggagcgtaaaaaacgtgcggagcatttgaagccaagctcttcaggtgatgaggctaaagttattcctttcaacgcagtggaagcggatgatcaagaagattacagcctacccacatacgtgcctgaattatttcaggatccaccagaaaaggatgagtcatgagtgctacccggattcaagcagtttatcgtgatacgggggtagaggcttatcgtgataatccttttatcgaggccttaccaccattacaagagtcagtgaatagtgctgcatcactgaaatcctctttacagcttacttcctctgacttgcaaaagtcccgtgttatcagagctcataccatttgtcgtattccagatgactattttcagccattaggtacgcatttgctactaagtgagcgtatttcggtcatgattcgaggtggctacgtaggcagaaatcctaaaacaggagatttacaaaagcatttacaaaatggttatgagcgtgttcaaacgggagagttggagacatttcgctttgaggaggcacgatctacggcacaaagcttattgttaattggttgttctggtagtgggaagacgacctctcttcatcgtattctagccacgtatcctcaggtgatttaccatcgtgaactcaatgtagagcaggtggtgtatttgaaaatagactgctcgcataatggttcgctaaaagaaatctgcttgaattttttcagagcgttggatcgagccttgggctcgaactatgagcgtcgttatggcttaaaacgtcatggtatagaaaccatgttggctttgatgtcgcaaatagccaatgcacatgctttagggttgttggttattgatgaaattcagcatttaagccgctctcgttcgggtggatctcaagagatgctgaacttttttgtgacgatggtgaatattattggcgtaccagtgatgttgattggtacccctaaagcacgagagatttttgaggctgatttgcggtctgcacgtagaggggcagggtttggagctatattctgggatcctatacaacaaacgcaacgtggaaagcccaatcaagagtggatcgcttttacggataatctttggcaattacagcttttacaacgcaaagatgcgctgttatcggatgaggtccgtgatgtgtggtatgagctaagccaaggagtgatggacattgtagtaaaactttttgtactcgctcagctccgtgcgctagctttaggcaatgagcgtattaccgctggtttattgcggcaagtgtatcaagatgagttaaagcctgtgcaccccatgctagaggcattacgctcgggtatcccagaacgcattgctcgttattctgatctagtcgttcccgagattgataaacggttaatccaacttcagctagatatcgcagcgatacaagaacaaacaccagaagaaaaagcccttcaagagttagataccgaagatcagcgtcatttatatctgatgctgaaagaggattacgattcaagcctgttaattcccactattaaaaaagcgtttagccagaatccaacgatgacaagacaaaagttactgcctcttgttttgcagtggttgatggaaggcgaaacggtagtgtcagaactagaaaagccctccaagagtaaaaaggtttcggctataaaggtagtcaagcccagcgactgggatagcttgcctgatacggatttacgttatatctattcacaacgccaacctgaaaaaaccatgcatgaacggttaaaagggaaaggggtaatagtggatatggcgagcttatttaaacaagcaggttagccatgagaaactttcctgttccgtactcgaatgagctgatttatagcactattgcacgggcaggcgtttatcaagggattgttagtcctaagcagctgttggatgaggtgtatggcaaccgcaaggtggtcgctaccttaggtctgccctcgcatttaggtgtgatagcaagacatctacatcaaacaggacgttacgctgttcagcagcttatttatgagcataccttattccctttatatgctccgtttgtaggcaaggagcgccgagacgaagctattcggttaatggagtaccaagcgcaaggtgcggtgcatttaatgctaggagtcgctgcttctagagttaagagcgataaccgctttagatactgccctgattgcgttgctcttcagctaaataggtatggggaagccttttggcaacgagattggtatttgcccgctttgccatattgtccaaaacacggtgctttagtcttctttgatagagctgtagatgatcaccgacatcaattttgggctttgggtcatactgagctgctttcagactaccccaaagactccctatctcaattaacagcactagctgcttatatagcccctctgttagatgctccacgagcgcaagagctttccccaagccttgagcagtggacgctgttttatcagcgcttagcgcaggatctagggctaaccaaaagcaagcacattcgtcatgacttggtggcggagagagtgaggcagacttttagtgatgaggcactagagaaactggatttaaagttggcagagaacaaggacacgtgttggctgaaaagtatattccgtaagcatagaaaagcctttagttatttacagcatagtattgtgtggcaagccttattgccaaaactaacggttatagaagcgctacagcaggcaagtgctcttactgagcactctataacgacaagacctgttagccagtctgtgcaacctaactctgaagatttatctgttaagcataaagactggcagcaactagtgcataaataccaaggaattaaggcggcaagacagtctttagagggtggggtgctatacgcttggctttaccgacatgacagggattggctagttcactggaatcaacagcatcaacaagagcgtctggcacccgcccctagagttgattggaaccaaagagatcgaattgctgtacgacaactattaagaatcataaagcgtctagatagtagccttgatcacccaagagcgacatcgagctggctgttaaagcaaactcctaacggaacctctcttgcaaaaaatctacagaaactgcctttggtagcgctttgcttaaagcgttactcagagagtgtggaagattatcaaattagacggattagccaagcttttattaagcttaaacaggaagatgttgagcttaggcgctggcgattattaagaagtgcaacgttatctaaagagcggataactgaggaagcacaaagattcttggaaatggtttatggggaagagtgacctaggctgctgccaccgctgagcaataactagcataaccccttggggcctctaaacgggtcttgaggggttttttgctgaaacctcaggcatttgagaagcacacggtcacactgcttccggtagtcaataaaccggtaaaccagcaatagacataagcggctatttaacgaccctgccctgaaccgacgacaagctgacgaccgggtctccgcaagtggcacttttcggggaaatgtgcgcggaacccctatttgtttatttttctaaatacattcaaatatgtatccgctcatgaattaattcttagaaaaactcatcgagcatcaaatgaaactgcaatttattcatatcaggattatcaataccatatttttgaaaaagccgtttctgtaatgaaggagaaaactcaccgaggcagttccataggatggcaagatcctggtatcggtctgcgattccgactcgtccaacatcaatacaacctattaatttcccctcgtcaaaaataaggttatcaagtgagaaatcaccatgagtgacgactgaatccggtgagaatggcaaaagtttatgcatttctttccagacttgttcaacaggccagccattacgctcgtcatcaaaatcactcgcatcaaccaaaccgttattcattcgtgattgcgcctgagcgagacgaaatacgcggtcgctgttaaaaggacaattacaaacaggaatcgaatgcaaccggcgcaggaacactgccagcgcatcaacaatattttcacctgaatcaggatattcttctaatacctggaatgctgttttcccggggatcgcagtggtgagtaaccatgcatcatcaggagtacggataaaatgcttgatggtcggaagaggcataaattccgtcagccagtttagtctgaccatctcatctgtaacatcattggcaacgctacctttgccatgtttcagaaacaactctggcgcatcgggcttcccatacaatcgatagattgtcgcacctgattgcccgacattatcgcgagcccatttatacccatataaatcagcatccatgttggaatttaatcgcggcctagagcaagacgtttcccgttgaatatggctcatactcttcctttttcaatattattgaagcatttatcagggttattgtctcatgagcggatacatatttgaatgtatttagaaaaataaacaaataggcatgctagcgcagaaacgtcctagaagatgccaggaggatacttagcagagagacaataaggccggagcgaagccgtttttccataggctccgcccccctgacgaacatcacgaaatctgacgctcaaatcagtggtggcgaaacccgacaggactataaagataccaggcgtttccccctgatggctccctcttgcgctctcctgttcccgtcctgcggcgtccgtgttgtggtggaggctttacccaaatcaccacgtcccgttccgtgtagacagttcgctccaagctgggctgtgtgcaagaaccccccgttcagcccgactgctgcgccttatccggtaactatcatcttgagtccaacccggaaagacacgacaaaacgccactggcagcagccattggtaactgagaattagtggatttagatatcgagagtcttgaagtggtggcctaacagaggctacactgaaaggacagtatttggtatctgcgctccactaaagccagttaccaggttaagcagttccccaactgacttaaccttcgatcaaaccgcctccccaggcggttttttcgtttacagagcaggagattacgacgatcgtaaaaggatctcaagaagatcctttacggattcccgacaccatcactctagatttcagtgcaatttatctcttcaaatgtagcacctgaagtcagccccatacgatataagttgtaattctcatgttagtcatgccccgcgcccaccggaaggagctgactgggttgaaggctctcaagggcatcggtcgagatcccggtgcctaatgagtgagctaacttacattaattgcgttgcgctcactgcccgctttccagtcgggaaacctgtcgtgccagctgcattaatgaatcggccaacgcgcggggagaggcggtttgcgtattgggcgccagggtggtttttcttttcaccagtgagacgggcaacagctgattgcccttcaccgcctggccctgagagagttgcagcaagcggtccacgctggtttgccccagcaggcgaaaatcctgtttgatggtggttaacggcgggatataacatgagctgtcttcggtatcgtcgtatcccactaccgagatgtccgcaccaacgcgcagcccggactcggtaatggcgcgcattgcgcccagcgccatctgatcgttggcaaccagcatcgcagtgggaacgatgccctcattcagcatttgcatggtttgttgaaaaccggacatggcactccagtcgccttcccgttccgctatcggctgaatttgattgcgagtgagatatttatgccagccagccagacgcagacgcgccgagacagaacttaatgggcccgctaacagcgcgatttgctggtgacccaatgcgaccagatgctccacgcccagtcgcgtaccgtcttcatgggagaaaataatactgttgatgggtgtctggtcagagacatcaagaaataacgccggaacattagtgcaggcagcttccacagcaatggcatcctggtcatccagcggatagttaatgatcagcccactgacgcgttgcgcgagaagattgtgcaccgccgctttacaggcttcgacgccgcttcgttctaccatcgacaccaccacgctggcacccagttgatcggcgcgagatttaatcgccgcgacaatttgcgacggcgcgtgcagggccagactggaggtggcaacgccaatcagcaacgactgtttgcccgccagttgttgtgccacgcggttgggaatgtaattcagctccgccatcgccgcttccactttttcccgcgttttcgcagaaacgtggctggcctggttcaccacgcgggaaacggtctgataagagacaccggcatactctgcgacatcgtataacgttactggtttcacattcaccaccctgaattgactctcttccgggcgctatcatgccataccgcgaaaggttttgcgccattcgatggtgtc

SEQ ID NO: 2 - DNA, 4119 bp, Synthetic construct
  source 1..4119: mol_type = other DNA
tcttccgcttcctcgctcactgactcgctgcgctcggtcgttcggctgcggcgagcggtatcagctcactcaaaggcggtaatacggttatccacagaatcaggggataacgcaggaaagaacatgtgagcaaaaggccagcaaaaggccaggaaccgtaaaaaggccgcgttgctggcgtttttccataggctccgcccccctgacgagcatcacaaaaatcgacgctcaagtcagaggtggcgaaacccgacaggactataaagataccaggcgtttccccctggaagctccctcgtgcgctctcctgttccgaccctgccgcttaccggatacctgtccgcctttctcccttcgggaagcgtggcgctttctcatagctcacgctgtaggtatctcagttcggtgtaggtcgttcgctccaagctgggctgtgtgcacgaaccccccgttcagcccgaccgctgcgccttatccggtaactatcgtcttgagtccaacccggtaagacacgacttatcgccactggcagcagccactggtaacaggattagcagagcgaggtatgtaggcggtgctacagagttcttgaagtggtggcctaactacggctacactagaagaacagtatttggtatctgcgctctgctgaagccagttaccttcggaaaaagagttggtagctcttgatccggcaaacaaaccaccgctggtagcggtggtttttttgtttgcaagcagcagattacgcgcagaaaaaaaggatctcaagaagatcctttgatcttttctacggggtctgacgctcagtggaacgaaaactcacgttaagggattttggtcatgagattatcaaaaaggatcttcacctagatccttttaaattaaaaatgaagttttaaatcaatctaaagtatatatgagtaaacttggtctgacagttaccaatgcttaatcagtgaggcacctatctcagcgatctgtctatttcgttcatccatagttgcctgactccccgtcgtgtagataactacgatacgggagggcttaccatctggccccagtgctgcaatgataccgcgagacccacgctcaccggctccagatttatcagcaataaaccagccagccggaagggccgagcgcagaagtggtcctgcaactttatccgcctccatccagtctattaattgttgccgggaagctagagtaagtagttcgccagttaatagtttgcgcaacgttgttgccattgctacaggcatcgtggtgtcacgctcgtcgtttggtatggcttcattcagctccggttcccaacgatcaaggcgagttacatgatcccccatgttgtgcaaaaaagcggttagctccttcggtcctccgatcgttgtcagaagtaagttggccgcagtgttatcactcatggttatggcagcactgcataattctcttactgtcatgccatccgtaagatgcttttctgtgactggtgagtactcaaccaagtcattctgagaatagtgtatgcggcgaccgagttgctcttgcccggcgtcaatacgggataataccgcgccacatagcagaactttaaaagtgctcatcattggaaaacgttcttcggggcgaaaactctcaaggatcttaccgctgttgagatccagttcgatgtaacccactcgtgcacccaactgatcttcagcatcttttactttcaccagcgtttctgggtgagcaaaaacaggaaggcaaaatgccgcaaaaaagggaataagggcgacacggaaatgttgaatactcatactcttcctttttcaatattattgaagcatttatcagggttattgtctcatgagcggatacatatttgaatgtatttagaaaaataaacaaataggggttccgcgcacatttccccgaaaagtgccacctgacgtctaagaaaccattattatcatgacattaacctataaaaataggcgtatcacgaggccctttcgtctcgcgcgtttcggtgatgacggtgaaaacctctgacacatgcagctcccggagacggtcacagcttgtctgtaagcggatgccgggagcagacaagcccgtcagggcgcgtcagcgggtgttggcgggtgtcggggctggcttaactatgcggcatcagagcagattgtactgagagtgcaccatatgcggtgtgaaataccgcacagatgcgtaaggagaaaataccgcatcaggcgccattcgccattcaggctgcgcaactgttgggaagggcgatcggtgcgggcctcttcgctattacgccagctggcgaaagggggatgtgctgcaaggcgattaagttgggtaacgccagggttttcccagtcacgacgttgtaaaacgacggccagtgaattcgagctcggtacctgtgggcggacaaaatagttgggaactgggaggggtggaaatggagtttttaaggattatttagggaagagtgacaaaatagatgggaactgggtgtagcgtcgtaagctaatacgaaaattaaaaatgacaaaatagtttggaactagatttcacttatctggttaactaaggagatatacatatgaaatctaacaatgcgctcatcgtcatcctcggcaccgtcaccctggatgctgtaggcataggcttggttatgccggtactgccgggcctcttgcgggatatcgtccattccgacagcatcgccagtcactatggcgtgctgctagcgctatatgcgttgatgcaatttctatgcgcacccgttctcggagcactgtccgaccgctttggccgccgcccagtcctgctcgcttcgctacttggagccactatcgactacgcgatcatggcgaccacacccgtcctgtggatcctctacgccggacgcatcgtggccggcatcaccggcgccacaggtgcggttgctggcgcctatatcgccgacatcaccgatggggaagatcgggctcgccacttcgggctcatgagcgcttgtttcggcgtgggtatggtggcaggccccgtggccgggggactgttgggcgccatctccttgcatgcaccattccttgcggcggcggtgctcaacggcctcaacctactactgggctgcttcctaatgcaggagtcgcataagggagagcgtcgaccgatgcccttgagagccttcaacccagtcagctccttccggtgggcgcggggcatgactatcgtcgccgcacttatgactgtcttctttatcatgcaactcgtaggacaggtgccggcagcgctctgggtcattttcggcgaggaccgctttcgctggagcgcgacgatgatcggcctgtcgcttgcggtattcggaatcttgcacgccctcgctcaagccttcgtcactggtcccgccaccaaacgtttcggcgagaagcaggccattatcgccggcatggcggccgacgcgctgggctacgtcttgctggcgttcgcgacgcgaggctggatggccttccccattatgattcttctcgcttccggcggcatcgggatgcccgcgttgcaggccatgctgtccaggcaggtagatgacgaccatcagggacagcttcaaggatcgctcgcggctcttaccagcctaacttcgatcactggaccgctgatcgtcacggcgatttatgccgcctcggcgagcacatggaacgggttggcatggattgtaggcgccgccctataccttgtctgcctccccgcgttgcgtcgcggtgcatggagccgggccacctcgacctgattcagtttacaactattctgtctagtttaagactttattgtcatagtttagatctattttgttcagtttaagactttattgtccgcccacaaagcttggcgtaatcatggtcatagctgtttcctgtgtgaaattgttatccgctcacaattccacacaacatacgagccggaagcataaagtgtaaagcctggggtgcctaatgagtgagctaactcacattaattgcgttgcgctcactgcccgctttccagtcgggaaacctgtcgtgccagctgcattaatgaatcggccaacgcgcggggagaggcggtttgcgtattgggcgc

SEQ ID NO: 3 - DNA, 3719 bp, Synthetic construct
  source 1..3719: mol_type = other DNA
ggggaattgtgagcggataacaattcccctgtagaaataattttgtttaactttaataaggagatataccatgggcagcagccatcaccatcatcaccacagccaggatccgaattcgagctcggcgcgcctgcaggtcgacaagcttgcggccgcataatgcttaagtcgaacagaaagtaatcgtattgtacacggccgcataatcgaaattaatacgactcactataggggaattgtgagcggataacaattccccatcttagtatattagttaagtataagaaggagatatacatatggcagatctcaattggatatcggccggccacgcgatcgctgacgtcggtaccctcgagtctggtaaagaaaccgctgctgcgaaatttgaacgccagcacatggactcgtctactagcgcagcttaattaacctaggctgctgccaccgctgagcaataactagcataaccccttggggcctctaaacgggtcttgaggggttttttgctgaaacctcaggcatttgagaagcacacggtcacactgcttccggtagtcaataaaccggtaaaccagcaatagacataagcggctatttaacgaccctgccctgaaccgacgacaagctgacgaccgggtctccgcaagtggcacttttcggggaaatgtgcgcggaacccctatttgtttatttttctaaatacattcaaatatgtatccgctcatgaattaattcttagaaaaactcatcgagcatcaaatgaaactgcaatttattcatatcaggattatcaataccatatttttgaaaaagccgtttctgtaatgaaggagaaaactcaccgaggcagttccataggatggcaagatcctggtatcggtctgcgattccgactcgtccaacatcaatacaacctattaatttcccctcgtcaaaaataaggttatcaagtgagaaatcaccatgagtgacgactgaatccggtgagaatggcaaaagtttatgcatttctttccagacttgttcaacaggccagccattacgctcgtcatcaaaatcactcgcatcaaccaaaccgttattcattcgtgattgcgcctgagcgagacgaaatacgcggtcgctgttaaaaggacaattacaaacaggaatcgaatgcaaccggcgcaggaacactgccagcgcatcaacaatattttcacctgaatcaggatattcttctaatacctggaatgctgttttcccggggatcgcagtggtgagtaaccatgcatcatcaggagtacggataaaatgcttgatggtcggaagaggcataaattccgtcagccagtttagtctgaccatctcatctgtaacatcattggcaacgctacctttgccatgtttcagaaacaactctggcgcatcgggcttcccatacaatcgatagattgtcgcacctgattgcccgacattatcgcgagcccatttatacccatataaatcagcatccatgttggaatttaatcgcggcctagagcaagacgtttcccgttgaatatggctcatactcttcctttttcaatattattgaagcatttatcagggttattgtctcatgagcggatacatatttgaatgtatttagaaaaataaacaaataggcatgctagcgcagaaacgtcctagaagatgccaggaggatacttagcagagagacaataaggccggagcgaagccgtttttccataggctccgcccccctgacgaacatcacgaaatctgacgctcaaatcagtggtggcgaaacccgacaggactataaagataccaggcgtttccccctgatggctccctcttgcgctctcctgttcccgtcctgcggcgtccgtgttgtggtggaggctttacccaaatcaccacgtcccgttccgtgtagacagttcgctccaagctgggctgtgtgcaagaaccccccgttcagcccgactgctgcgccttatccggtaactatcatcttgagtccaacccggaaagacacgacaaaacgccactggcagcagccattggtaactgagaattagtggatttagatatcgagagtcttgaagtggtggcctaacagaggctacactgaaaggacagtatttggtatctgcgctccactaaagccagttaccaggttaagcagttccccaactgacttaaccttcgatcaaaccgcctccccaggcggttttttcgtttacagagcaggagattacgacgatcgtaaaaggatctcaagaagatcctttacggattcccgacaccatcactctagatttcagtgcaatttatctcttcaaatgtagcacctgaagtcagccccatacgatataagttgtaattctcatgttagtcatgccccgcgcccaccggaaggagctgactgggttgaaggctctcaagggcatcggtcgagatcccggtgcctaatgagtgagctaacttacattaattgcgttgcgctcactgcccgctttccagtcgggaaacctgtcgtgccagctgcattaatgaatcggccaacgcgcggggagaggcggtttgcgtattgggcgccagggtggtttttcttttcaccagtgagacgggcaacagctgattgcccttcaccgcctggccctgagagagttgcagcaagcggtccacgctggtttgccccagcaggcgaaaatcctgtttgatggtggttaacggcgggatataacatgagctgtcttcggtatcgtcgtatcccactaccgagatgtccgcaccaacgcgcagcccggactcggtaatggcgcgcattgcgcccagcgccatctgatcgttggcaaccagcatcgcagtgggaacgatgccctcattcagcatttgcatggtttgttgaaaaccggacatggcactccagtcgccttcccgttccgctatcggctgaatttgattgcgagtgagatatttatgccagccagccagacgcagacgcgccgagacagaacttaatgggcccgctaacagcgcgatttgctggtgacccaatgcgaccagatgctccacgcccagtcgcgtaccgtcttcatgggagaaaataatactgttgatgggtgtctggtcagagacatcaagaaataacgccggaacattagtgcaggcagcttccacagcaatggcatcctggtcatccagcggatagttaatgatcagcccactgacgcgttgcgcgagaagattgtgcaccgccgctttacaggcttcgacgccgcttcgttctaccatcgacaccaccacgctggcacccagttgatcggcgcgagatttaatcgccgcgacaatttgcgacggcgcgtgcagggccagactggaggtggcaacgccaatcagcaacgactgtttgcccgccagttgttgtgccacgcggttgggaatgtaattcagctccgccatcgccgcttccactttttcccgcgttttcgcagaaacgtggctggcctggttcaccacgcgggaaacggtctgataagagacaccggcatactctgcgacatcgtataacgttactggtttcacattcaccaccctgaattgactctcttccgggcgctatcatgccataccgcgaaaggttttgcgccattcgatggtgtccgggatctcgacgctctcccttatgcgactcctgcattaggaaattaatacgactcactata

SEQ ID NO: 4 - DNA, 3781 bp, Synthetic construct
  source 1..3781: mol_type = other DNA
aacgtggctggcctggttcaccacgcgggaaacggtctgataagagacaccggcatactctgcgacatcgtataacgttactggtttcacattcaccaccctgaattgactctcttccgggcgctatcatgccataccgcgaaaggttttgcgccattcgatggtgtccgggatctcgacgctctcccttatgcgactcctgcattaggaaattaatacgactcactataggggaattgtgagcggataacaattcccctgtagaaataattttgtttaactttaataaggagatataccatgggcagcagccatcaccatcatcaccacagccaggatccgaattcgagctcggcgcgcctgcaggtcgacaagcttgcggccgcataatgcttaagtcgaacagaaagtaatcgtattgtacacggccgcataatcgaaattaatacgactcactataggggaattgtgagcggataacaattccccatcttagtatattagttaagtataagaaggagatatacatatggcagatctcaattggatatcggccggccacgcgatcgctgacgtcggtaccctcgagtctggtaaagaaaccgctgctgcgaaatttgaacgccagcacatggactcgtctactagcgcagcttaattaacctaggctgctgccaccgctgagcaataactagcataaccccttggggcctctaaacgggtcttgaggggttttttgctgaaacctcaggcatttgagaagcacacggtcacactgcttccggtagtcaataaaccggtaaaccagcaatagacataagcggctatttaacgaccctgccctgaaccgacgaccgggtcatcgtggccggatcttgcggcccctcggcttgaacgaattgttagacattatttgccgactaccttggtgatctcgcctttcacgtagtggacaaattcttccaactgatctgcgcgcgaggccaagcgatcttcttcttgtccaagataagcctgtctagcttcaagtatgacgggctgatactgggccggcaggcgctccattgcccagtcggcagcgacatccttcggcgcgattttgccggttactgcgctgtaccaaatgcgggacaacgtaagcactacatttcgctcatcgccagcccagtcgggcggcgagttccatagcgttaaggtttcatttagcgcctcaaatagatcctgttcaggaaccggatcaaagagttcctccgccgctggacctaccaaggcaacgctatgttctcttgcttttgtcagcaagatagccagatcaatgtcgatcgtggctggctcgaagatacctgcaagaatgtcattgcgctgccattctccaaattgcagttcgcgcttagctggataacgccacggaatgatgtcgtcgtgcacaacaatggtgacttctacagcgcggagaatctcgctctctccaggggaagccgaagtttccaaaaggtcgttgatcaaagctcgccgcgttgtttcatcaagccttacggtcaccgtaaccagcaaatcaatatcactgtgtggcttcaggccgccatccactgcggagccgtacaaatgtacggccagcaacgtcggttcgagatggcgctcgatgacgccaactacctctgatagttgagtcgatacttcggcgatcaccgcttccctcatactcttcctttttcaatattattgaagcatttatcagggttattgtctcatgagcggatacatatttgaatgtatttagaaaaataaacaaatagctagctcactcggtcgctacgctccgggcgtgagactgcggcgggcgctgcggacacatacaaagttacccacagattccgtggataagcaggggactaacatgtgaggcaaaacagcagggccgcgccggtggcgtttttccataggctccgccctcctgccagagttcacataaacagacgcttttccggtgcatctgtgggagccgtgaggctcaaccatgaatctgacagtacgggcgaaacccgacaggacttaaagatccccaccgtttccggcgggtcgctccctcttgcgctctcctgttccgaccctgccgtttaccggatacctgttccgcctttctcccttacgggaagtgtggcgctttctcatagctcacacactggtatctcggctcggtgtaggtcgttcgctccaagctgggctgtaagcaagaactccccgttcagcccgactgctgcgccttatccggtaactgttcacttgagtccaacccggaaaagcacggtaaaacgccactggcagcagccattggtaactgggagttcgcagaggatttgtttagctaaacacgcggttgctcttgaagtgtgcgccaaagtccggctacactggaaggacagatttggttgctgtgctctgcgaaagccagttaccacggttaagcagttccccaactgacttaaccttcgatcaaaccacctccccaggtggttttttcgtttacagggcaaaagattacgcgcagaaaaaaaggatctcaagaagatcctttgatcttttctactgaaccgctctagatttcagtgcaatttatctcttcaaatgtagcacctgaagtcagccccatacgatataagttgtaattctcatgttagtcatgccccgcgcccaccggaaggagctgactgggttgaaggctctcaagggcatcggtcgagatcccggtgcctaatgagtgagctaacttacattaattgcgttgcgctcactgcccgctttccagtcgggaaacctgtcgtgccagctgcattaatgaatcggccaacgcgcggggagaggcggtttgcgtattgggcgccagggtggtttttcttttcaccagtgagacgggcaacagctgattgcccttcaccgcctggccctgagagagttgcagcaagcggtccacgctggtttgccccagcaggcgaaaatcctgtttgatggtggttaacggcgggatataacatgagctgtcttcggtatcgtcgtatcccactaccgagatgtccgcaccaacgcgcagcccggactcggtaatggcgcgcattgcgcccagcgccatctgatcgttggcaaccagcatcgcagtgggaacgatgccctcattcagcatttgcatggtttgttgaaaaccggacatggcactccagtcgccttcccgttccgctatcggctgaatttgattgcgagtgagatatttatgccagccagccagacgcagacgcgccgagacagaacttaatgggcccgctaacagcgcgatttgctggtgacccaatgcgaccagatgctccacgcccagtcgcgtaccgtcttcatgggagaaaataatactgttgatgggtgtctggtcagagacatcaagaaataacgccggaacattagtgcaggcagcttccacagcaatggcatcctggtcatccagcggatagttaatgatcagcccactgacgcgttgcgcgagaagattgtgcaccgccgctttacaggcttcgacgccgcttcgttctaccatcgacaccaccacgctggcacccagttgatcggcgcgagatttaatcgccgcgacaatttgcgacggcgcgtgcagggccagactggaggtggcaacgccaatcagcaacgactgtttgcccgccagttgttgtgccacgcggttgggaatgtaattcagctccgccatcgccgcttccactttttcccgcgttttcgcaga

SEQ ID NO: 5 - DNA, 2686 bp, Synthetic construct
  source 1..2686: mol_type = other DNA
tcgcgcgtttcggtgatgacggtgaaaacctctgacacatgcagctcccggagacggtcacagcttgtctgtaagcggatgccgggagcagacaagcccgtcagggcgcgtcagcgggtgttggcgggtgtcggggctggcttaactatgcggcatcagagcagattgtactgagagtgcaccatatgcggtgtgaaataccgcacagatgcgtaaggagaaaataccgcatcaggcgccattcgccattcaggctgcgcaactgttgggaagggcgatcggtgcgggcctcttcgctattacgccagctggcgaaagggggatgtgctgcaaggcgattaagttgggtaacgccagggttttcccagtcacgacgttgtaaaacgacggccagtgaattcgagctcggtacccggggatcctctagagtcgacctgcaggcatgcaagcttggcgtaatcatggtcatagctgtttcctgtgtgaaattgttatccgctcacaattccacacaacatacgagccggaagcataaagtgtaaagcctggggtgcctaatgagtgagctaactcacattaattgcgttgcgctcactgcccgctttccagtcgggaaacctgtcgtgccagctgcattaatgaatcggccaacgcgcggggagaggcggtttgcgtattgggcgctcttccgcttcctcgctcactgactcgctgcgctcggtcgttcggctgcggcgagcggtatcagctcactcaaaggcggtaatacggttatccacagaatcaggggataacgcaggaaagaacatgtgagcaaaaggccagcaaaaggccaggaaccgtaaaaaggccgcgttgctggcgtttttccataggctccgcccccctgacgagcatcacaaaaatcgacgctcaagtcagaggtggcgaaacccgacaggactataaagataccaggcgtttccccctggaagctccctcgtgcgctctcctgttccgaccctgccgcttaccggatacctgtccgcctttctcccttcgggaagcgtggcgctttctcatagctcacgctgtaggtatctcagttcggtgtaggtcgttcgctccaagctgggctgtgtgcacgaaccccccgttcagcccgaccgctgcgccttatccggtaactatcgtcttgagtccaacccggtaagacacgacttatcgccactggcagcagccactggtaacaggattagcagagcgaggtatgtaggcggtgctacagagttcttgaagtggtggcctaactacggctacactagaagaacagtatttggtatctgcgctctgctgaagccagttaccttcggaaaaagagttggtagctcttgatccggcaaacaaaccaccgctggtagcggtggtttttttgtttgcaagcagcagattacgcgcagaaaaaaaggatctcaagaagatcctttgatcttttctacggggtctgacgctcagtggaacgaaaactcacgttaagggattttggtcatgagattatcaaaaaggatcttcacctagatccttttaaattaaaaatgaagttttaaatcaatctaaagtatatatgagtaaacttggtctgacagttaccaatgcttaatcagtgaggcacctatctcagcgatctgtctatttcgttcatccatagttgcctgactccccgtcgtgtagataactacgatacgggagggcttaccatctggccccagtgctgcaatgataccgcgagacccacgctcaccggctccagatttatcagcaataaaccagccagccggaagggccgagcgcagaagtggtcctgcaactttatccgcctccatccagtctattaattgttgccgggaagctagagtaagtagttcgccagttaatagtttgcgcaacgttgttgccattgctacaggcatcgtggtgtcacgctcgtcgtttggtatggcttcattcagctccggttcccaacgatcaaggcgagttacatgatcccccatgttgtgcaaaaaagcggttagctccttcggtcctccgatcgttgtcagaagtaagttggccgcagtgttatcactcatggttatggcagcactgcataattctcttactgtcatgccatccgtaagatgcttttctgtgactggtgagtactcaaccaagtcattctgagaatagtgtatgcggcgaccgagttgctcttgcccggcgtcaatacgggataataccgcgccacatagcagaactttaaaagtgctcatcattggaaaacgttcttcggggcgaaaactctcaaggatcttaccgctgttgagatccagttcgatgtaacccactcgtgcacccaactgatcttcagcatcttttactttcaccagcgtttctgggtgagcaaaaacaggaaggcaaaatgccgcaaaaaagggaataagggcgacacggaaatgttgaatactcatactcttcctttttcaatattattgaagcatttatcagggttattgtctcatgagcggatacatatttgaatgtatttagaaaaataaacaaataggggttccgcgcacatttccccgaaaagtgccacctgacgtctaagaaaccattattatcatgacattaacctataaaaataggcgtatcacgaggccctttcgtc

SEQ ID NO: 6 - DNA, 6858 bp, Synthetic construct
  source 1..6858: mol_type = other DNA
ttcagtgcaatttatctcttcaaatgtagcacctgaagtcagccccatacgatataagttgtaattctcatgttagtcatgccccgcgcccaccggaaggagctgactgggttgaaggctctcaagggcatcggtcgagatcccggtgcctaatgagtgagctaacttacattaattgcgttgcgctcactgcccgctttccagtcgggaaacctgtcgtgccagctgcattaatgaatcggccaacgcgcggggagaggcggtttgcgtattgggcgccagggtggtttttcttttcaccagtgagacgggcaacagctgattgcccttcaccgcctggccctgagagagttgcagcaagcggtccacgctggtttgccccagcaggcgaaaatcctgtttgatggtggttaacggcgggatataacatgagctgtcttcggtatcgtcgtatcccactaccgagatgtccgcaccaacgcgcagcccggactcggtaatggcgcgcattgcgcccagcgccatctgatcgttggcaaccagcatcgcagtgggaacgatgccctcattcagcatttgcatggtttgttgaaaaccggacatggcactccagtcgccttcccgttccgctatcggctgaatttgattgcgagtgagatatttatgccagccagccagacgcagacgcgccgagacagaacttaatgggcccgctaacagcgcgatttgctggtgacccaatgcgaccagatgctccacgcccagtcgcgtaccgtcttcatgggagaaaataatactgttgatgggtgtctggtcagagacatcaagaaataacgccggaacattagtgcaggcagcttccacagcaatggcatcctggtcatccagcggatagttaatgatcagcccactgacgcgttgcgcgagaagattgtgcaccgccgctttacaggcttcgacgccgcttcgttctaccatcgacaccaccacgctggcacccagttgatcggcgcgagatttaatcgccgcgacaatttgcgacggcgcgtgcagggccagactggaggtggcaacgccaatcagcaacgactgtttgcccgccagttgttgtgccacgcggttgggaatgtaattcagctccgccatcgccgcttccactttttcccgcgttttcgcagaaacgtggctggcctggttcaccacgcgggaaacggtctgataagagacaccggcatactctgcgacatcgtataacgttactggtttcacattcaccaccctgaattgactctcttccgggcgctatcatgccataccgcgaaaggttttgcgccattcgatggtgtccgggatctcgacgctctcccttatgcgactcctgcattaggaaattaatacgactcactataggggaattgtgagcggataacaattcccctgtagaaataattttgtttaactttaataaggagatataccatggcgacaagtttacctacgccctcagcaattacgacttcggcgttagagtatgcattccatactcccgctcgcaatctaacgaaatctcgcggaaaaaacattcatcgttatgtcagtgtaaagatgagtaagaggattacggtagaatctactctagagtgtgatgcctgctatcactttgattttgagccaagtattgttcgcttttgcgctcaaccgattcgatttttatattatctcaatggtcagtctcactcctatgttcctgactttctagttcaatttgataccaacgagtttgttctatatgaagtaaagtcagcttatgctaagaacaaacctgattttgatgttgaatgggaggcgaaagtaaaagcagcaactgaactagggctagaattggagcttgttgaagagagtgatattagggatacggttgtattaaataatcttaagcgcatgcatcgttatgcttcgaaagatgagctgaataacgtacataactctctcttaaaaataataaagtacaatggcgcccaatctgcaagatgcttgggagaacagttgggtttaaaaggccgaactgttttaccaattttgtgcgatttgctgtcaaggtgtttactcgatacacgtttggataagcctctatctcttgaatctcgatttgagttggccagttatggctaagaaagggttctcaagtttccatagaaaagcagtctcttcccaagatacgcttgaatcgatagagcttgtctctagcgctaattgtctagaaagtgttacgtatcaagatatatcagcatttcccgaaacaattgcggtagagattaatttccgattaagcattcttcgctttttagcgcgaaagtgcgaaaccattgtggccaaatcaattgaaccacatcgtgtagagctacagcaaaactatagtagaaaaatacccagtgcaataacgatatatcgatggtggcttgcttttcgaaaatcagactacaaccccattagcttagcacctaatatcaaggatagaggtaatagagagacaaaagtgtcaacagttgttgattctattatggaacaggcagttgaaagagttatatctggacgaaaagtcaatgttagctctgcatataaacgtgttcgacgaaaagttcgtcaatacaatctaactcatggaacgaaatacacgtatcctaagtacgaatctgtaagaaagcgagtaaaaaagaaaaccccatttgagttattagccgcagggaaaggggagagagtagctaagagagagtttcgccgaatgggaaaaaagatcctcacgtctagcgtgctagagagggttgaaatagatcacactgtcgttgacctttttgcagtacacgaagagtatcgaatcccattgggccgaccttggcttactcaattggttgattgttacagtaaagctgtaatcggtttttatttaggtttcgagcctcctagctatgtgtcggtttcccttgcacttaagaatgcaatacaacgcaaagatgacttaatctcctcgtatgaatcgatcgagaatgaatggctatgttatggcatcccagacctactcgtaactgataatggtaaagagtttttgtcgaaagcatttgatcaagcatgtgaatcactattgatcaatgtgcatcaaaataaagttgagacgcccgacaacaaacctcatgttgaacgtaactacgggactattaatacttctctgttagacgatttacctgggaaatccttcagccagtaccttcaaagagaagggtacgactctgtgggagaagctacccttacactcaatgagattagagaaatttacttaatttggttggtggatatttatcataaaaaacccaatcagagaggcactaattgtcctaatgttgcgtggaaaaagggttgtcaagaatgggaaccagaggagttctctggttctaaagacgaattagactttaaatttgctattgttgattacaaacaacttactaaagtagggataactgtctacaaagaactgagttatagcaatgaccgtttagctgaatatagagggaagaaaggaaaccataaagttcagttcaagtataaccctgagtgtatggcagttatttgggtgttggatgaggatatgaatgagtactttacagttaatgcgattgactacgaatatgcaagtagagtatcactttggcaacataaatataacatgaaatatcaagcagaactaaattcagcagaatatgatgaggacaaggaaattgatgcagaaataaaaattgaagaaatcgcagatcgttcaattgttaagactaacaaaatcagagctcggaggcgtggcgctaggcatcaagagaatagcgcaagggctaagtcaatcagtaatgcgaacccggcctcgatacaaaaacatgaagatgaaatcgttagtgcagataatgacgattgggatattgattatgtctgagaaatcgtcaaatgagtgaaacgcgtgaggctcgtatatcaagagctaaaagggcatttgtatccacaccgagcgttaggaaaatcttgagttacatggatagatgtagagatctatcagacctagagtctgagcctacatgcatgatggtctatggtgcttcgggtgtaggtaaaacgaccgtcatcaagaaatacttaaatcaaaacagaagagagtccgaagccgggggcgatataataccggttttgcatattgagttgccagacaatgcgaagccagtagatgcagcaagggaattgctggttgaaatgggtgacccgctagcactttatgaaactgacttagctagattgacgaaaagactgactgaattaatccctgcggtcggcgtgaagctgattattatcgatgagttccaacatttggtggaagaaaggtcaaatcgggttcttacccaagtaggtaattggctaaaaatgatacttaacaaaacgaaatgtccaattgttatatttggtatgccatactcaaaagttgtactgcaagcaaactcgcaacttcacgggcgattttccattcaggttgaactgcgcccctttagctaccagggaggtagaggtgtatttaaaacttttttggaataccttgataaagccctaccttttgaaaaacaggctggcttagccaacgaaagtttgcagaaaaaattgtatgcattctctcagggaaacatgcgttcgttgagaaaccttatttatcaagcatctatcgaagcaattgataatcagcatgagacgataaccgaagaagatttcgtttttgcatcgaagttgacatcgggcgataaacccaactcatggaaaaatccttttgaggagggtgttgaggtaacagaagatatgttacgaccgccaccaaaagatattggttgggaggactatttgagacattcaaccccgagagtgagtaaaccaggtagaaataaaaactttttcgaataacctaggctgctgccaccgctgagcaataactagcataaccccttggggcctctaaacgggtcttgaggggttttttgctgaaacctcaggcatttgagaagcacacggtcacactgcttccggtagtcaataaaccggtaaaccagcaatagacataagcggctatttaacgaccctgccctgaaccgacgacaagctgacgaccgggtctccgcaagtggcacttttcggggaaatgtgcgcggaacccctatttgtttatttttctaaatacattcaaatatgtatccgctcatgaattaattcttagaaaaactcatcgagcatcaaatgaaactgcaatttattcatatcaggattatcaataccatatttttgaaaaagccgtttctgtaatgaaggagaaaactcaccgaggcagttccataggatggcaagatcctggtatcggtctgcgattccgactcgtccaacatcaatacaacctattaatttcccctcgtcaaaaataaggttatcaagtgagaaatcaccatgagtgacgactgaatccggtgagaatggcaaaagtttatgcatttctttccagacttgttcaacaggccagccattacgctcgtcatcaaaatcactcgcatcaaccaaaccgttattcattcgtgattgcgcctgagcgagacgaaatacgcggtcgctgttaaaaggacaattacaaacaggaatcgaatgcaaccggcgcaggaacactgccagcgcatcaacaatattttcacctgaatcaggatattcttctaatacctggaatgctgttttcccggggatcgcagtggtgagtaaccatgcatcatcaggagtacggataaaatgcttgatggtcggaagaggcataaattccgtcagccagtttagtctgaccatctcatctgtaacatcattggcaacgctacctttgccatgtttcagaaacaactctggcgcatcgggcttcccatacaatcgatagattgtcgcacctgattgcccgacattatcgcgagcccatttatacccatataaatcagcatccatgttggaatttaatcgcggcctagagcaagacgtttcccgttgaatatggctcatactcttcctttttcaatattattgaagcatttatcagggttattgtctcatgagcggatacatatttgaatgtatttagaaaaataaacaaataggcatgctagcgcagaaacgtcctagaagatgccaggaggatacttagcagagagacaataaggccggagcgaagccgtttttccataggctccgcccccctgacgaacatcacgaaatctgacgctcaaatcagtggtggcgaaacccgacaggactataaagataccaggcgtttccccctgatggctccctcttgcgctctcctgttcccgtcctgcggcgtccgtgttgtggtggaggctttacccaaatcaccacgtcccgttccgtgtagacagttcgctccaagctgggctgtgtgcaagaaccccccgttcagcccgactgctgcgccttatccggtaactatcatcttgagtccaacccggaaagacacgacaaaacgccactggcagcagccattggtaactgagaattagtggatttagatatcgagagtcttgaagtggtggcctaacagaggctacactgaaaggacagtatttggtatctgcgctccactaaagccagttaccaggttaagcagttccccaactgacttaaccttcgatcaaaccgcctccccaggcggttttttcgtttacagagcaggagattacgacgatcgtaaaaggatctcaagaagatcctttacggattcccgacaccatcactctagat

SEQ ID NO: 7 - DNA, 3630 bp, Synthetic construct
  source 1..3630: mol_type = other DNA
catcgctctggagtgaataccacgacgatttccggcagtttctacacatatattcgcaagatgtggcgtgttacggtgaaaacctggcctatttccctaaagggtttattgagaatatgtttttcgtctcagccaatccctgggtgagtttcaccagttttgatttaaacgtggccaatatggacaacttcttcgcccccgttttcactatgggcaaatattatacgcaaggcgacaaggtgctgatgccgctggcgattcaggttcatcatgccgtttgtgatggcttccatgtcggcagaatgcttaatgaattacaacagtactgcgatgagtggcagggcggggcgtaatttttttaaggcagttattggtgcccttctagagtccttactgcagtagttttgctgaaatactcgattcacaaaaatatcaacttatggttgttttgtgagatatcaatatatggttgttttgtggttaagttgctgattataaataattattaaatatcactttatggttgcatcaacaggtaccgagctcgaattcactggccgtcgttttacaacgtcgtgactgggaaaaccctggcgttacccaacttaatcgccttgcagcacatccccctttcgccagctggcgtaatagcgaagaggcccgcaccgatcgcccttcccaacagttgcgcagcctgaatggcgaatggcgcctgatgcggtattttctccttacgcatctgtgcggtatttcacaccgcatatggtgcactctcagtacaatctgctctgatgccgcatagttaagccagccccgacacccgccaacacccgctgacgcgccctgacgggcttgtctgctcccggcatccgcttacagacaagctgtgaccgtctccgggagctgcatgtgtcagaggttttcaccgtcatcaccgaaacgcgcgagacgaaagggcctcgtgatacgcctatttttataggttaatgtcatgataataatggtttcttagacgtcaggtggcacttttcggggaaatgtgcgcggaacccctatttgtttatttttctaaatacattcaaatatgtatccgctcatgagacaataaccctgataaatgcttcaataatattgaaaaaggaagagtatgagtattcaacatttccgtgtcgcccttattcccttttttgcggcattttgccttcctgtttttgctcacccagaaacgctggtgaaagtaaaagatgctgaagatcagttgggtgcacgagtgggttacatcgaactggatctcaacagcggtaagatccttgagagttttcgccccgaagaacgttttccaatgatgagcacttttaaagttctgctatgtggcgcggtattatcccgtattgacgccgggcaagagcaactcggtcgccgcatacactattctcagaatgacttggttgagtactcaccagtcacagaaaagcatcttacggatggcatgacagtaagagaattatgcagtgctgccataaccatgagtgataacactgcggccaacttacttctgacaacgatcggaggaccgaaggagctaaccgcttttttgcacaacatgggggatcatgtaactcgccttgatcgttgggaaccggagctgaatgaagccataccaaacgacgagcgtgacaccacgatgcctgtagcaatggcaacaacgttgcgcaaactattaactggcgaactacttactctagcttcccggcaacaattaatagactggatggaggcggataaagttgcaggaccacttctgcgctcggcccttccggctggctggtttattgctgataaatctggagccggtgagcgtgggtctcgcggtatcattgcagcactggggccagatggtaagccctcccgtatcgtagttatctacacgacggggagtcaggcaactatggatgaacgaaatagacagatcgctgagataggtgcctcactgattaagcattggtaactgtcagaccaagtttactcatatatactttagattgatttaaaacttcatttttaatttaaaaggatctaggtgaagatcctttttgataatctcatgaccaaaatcccttaacgtgagttttcgttccactgagcgtcagaccccgtagaaaagatcaaaggatcttcttgagatcctttttttctgcgcgtaatctgctgcttgcaaacaaaaaaaccaccgctaccagcggtggtttgtttgccggatcaagagctaccaactctttttccgaaggtaactggcttcagcagagcgcagataccaaatactgttcttctagtgtagccgtagttaggccaccacttcaagaactctgtagcaccgcctacatacctcgctctgctaatcctgttaccagtggctgctgccagtggcgataagtcgtgtcttaccgggttggactcaagacgatagttaccggataaggcgcagcggtcgggctgaacggggggttcgtgcacacagcccagcttggagcgaacgacctacaccgaactgagatacctacagcgtgagctatgagaaagcgccacgcttcccgaagggagaaaggcggacaggtatccggtaagcggcagggtcggaacaggagagcgcacgagggagcttccagggggaaacgcctggtatctttatagtcctgtcgggtttcgccacctctgacttgagcgtcgatttttgtgatgctcgtcaggggggcggagcctatggaaaaacgccagcaacgcggcctttttacggttcctggccttttgctggccttttgctcacatgttctttcctgcgttatcccctgattctgtggataaccgtattaccgcctttgagtgagctgataccgctcgccgcagccgaacgaccgagcgcagcgagtcagtgagcgaggaagcggaagagcgcccaatacgcaaaccgcctctccccgcgcgttggccgattcattaatgcagctggcacgacaggtttcccgactggaaagcgggcagtgagcgcaacgcaattaatgtgagttagctcactcattaggcaccccaggctttacactttatgcttccggctcgtatgttgtgtggaattgtgagcggataacaatttcacacaggaaacagctatgaccatgattacgccaagctttgttgatacaaccataaaatgataattacacccataaattgataattatcacacccataaattgatattgcctcttcatggtctaaacttcagtaagtttacgacattttcatgaagaggtcatttccggggatccatggagaaaaaaatcactggatataccaccgttgatatatcccaatggcatcgtaaagaacattttgaggcatttcagtcagttgctcaatgtacctataaccagaccgttcagctggatattacggcctttttaaagaccgtaaagaaaaataagcacaagttttatccggcctttattcacattcttgcccgcctgatgaatgctcatccggagttccgtatggcaatgaaagacggtgagctggtgatatgggatagtgttcacccttgttacaccgttttccatgagcaaactgaaacgtttt

SEQ ID NO: 8 - DNA, 8388 bp, Synthetic construct
  source 1..8388: mol_type = other DNA
cgggatctcgacgctctcccttatgcgactcctgcattaggaaattaatacgactcactataggggaattgtgagcggataacaattcccctgtagaaataattttgtttaactttaataaggagatataccatgggcagcagccatcaccatcatcaccacagccaggatccgaattcgagctcggcgcgcctgcaggtcgacaagcttgcggccgcataatgcttaagtcgaacagaaagtaatcgtattgtacacggccgcataatcgaaattaatacgactcactataggggaattgtgagcggataacaattccccatcttagtatattagttaagtataagaaggagatatacatatgtttttgcaaagacctaaaccttacagcgatgaaagtttagaaagtttctttatccgagtggctaacaaaaatggctacggtgatgtccatcgcttcctagaagccactaaacgattccttcaagacattgaccataatggctatcaaacctttccgactgatataactcggataaacccatactcagctaaaaacagttccagcgcacgaactgcgtcattcctgaaacttgcacaattgacatttaatgaaccgccagagctacttgggttggcaattaacagaacaaacatgaaatactcgccgtcaactagcgcggttgttagaggtgcagaagtctttcctcgcagtttactacggacgcactccatcccctgctgtcctttgtgtctgcgagaaaatggctacgcctcctacctttggcactttcaggggtacgaatactgccacagccataacgtacctttaattaccacttgtagctgtggtaaggagtttgactaccgagtatctgggttaaagggcatttgctgcaaatgcaaggagcctatcaccttaaccagcagggagaacggtcatgaggcagcgtgtactgtttcaaactggcttgctggccatgaatctaaacctctgccaaatcttcctaaaagctaccgatggggtttagttcattggtggatgggtattaaagatagcgagttcgatcacttttcgttcgttcaatttttctcaaactggccaaggtcattccactcgataatcgaagatgaagtagagttcaaccttgagcatgctgttgtcagcacgtctgaattacgactaaaagatcttcttggtcgattgtttttcggttcaattcggttacctgagcggaatcttcaacacaatatcatccttggtgagcttctctgctatttagaaaatcgtttatggcaagacaagggattaatcgccaacctcaaaatgaacgcgttagaggcgactgtaatgttaaattgtagcctcgatcagattgcatcaatggttgaacaacgcatcttgaagccaaatcgaaaaagcaagcccaacagccctcttgatgttaccgattatctatttcatttcggcgatattttctgtctttggttagctgagttccaaagcgatgagtttaaccgttcgttttatgtgtcgaggtggtaaatgcaaactctgaaagaactaatcgcatccaatcctgacgacttaacaactgaacttaagagagcatttcgtccactcacaccgcatattgcaattgatggtaatgaacttgacgcactgacgatattagtcaatttaaccgataagactgatgatcagaaagacctgctcgatcgagccaaatgcaagcaaaaacttcgagatgaaaaatggtgggctagctgcataaattgcgttaattacagacaaagccataacccaaaattcccggatatacgttctgaaggcgtgattcgaacccaagccctgggtgaattaccgagtttcctactctcgtcctcaaaaatcccaccataccattggtcatatagccatgattcaaaatacgtcaacaaaagcgcattcctcaccaatgagttttgttgggatggtgagatctcatgtttgggtgagcttcttaaagatgcagatcacccactttggaatactttgaaaaagttaggttgttctcaaaaaacttgcaaagcaatggcaaaacaactagctgatattactctcacgactatcaatgtcacactcgcaccaaattacctgactcaaatatctctccccgatagtgatacatcctacatttcactctctcctgttgcatcgctatcgatgcaaagccactttcatcagaggctccaagatgaaaatcggcatagcgcgataacgcggtttagccgaactaccaacatgggggtcactgcgatgacatgtggcggcgcatttagaatgttaaagtctggcgctaagttttccagcccccctcatcaccgattaaacagtaaacgaagttggttgacgtcagagcatgttcagtcattaaaacagtaccagcgcctcaacaaaagcctcatacctgaaaactctcggattgcactccgtagaaaatacaaaatcgagcttcaaaatatggtcagatcttggtttgcaatgcaagaccatacccttgattcgaacatacttatccaacatttgaatcatgacctatcttacttaggagccacaaaacgttttgcatacgatccagcgatgaccaagctctttactgagcttttgaaacgagagttatcaaattcaatcaataatggtgagcaacacactaatggatcgtttttagtcctaccgaatatcagggtttgtggcgcaacagctttaagctccccggtaacggtggggattccatcacttacagctttctttggcttcgttcacgcatttgaacggaatataaatcgcaccacctcatcgtttcgtgttgaatcctttgcgatatgcgtccatcaactacatgtcgagaagcgaggtttgacagcagagtttgtggaaaaaggcgacgggactatatccgctcccgcgacccgggatgactggcagtgtgatgtcgtatttagccttattttgaacaccaactttgctcaacatattgaccaagatacgttagttacatcactaccaaagcgattggctcggggttcagcaaaaattgcgattgatgactttaaacatatcaactcattctcgacattagaaacagcgatcgaatctctgccaatagaagctggtaggtggttatcactttacgcacagtcaaacaataatctaagtgatctattagcagccatgacagaggaccatcagctcatggcaagctgcgtcggttaccacttgttagaagagcccaaagataaaccaaactccctcagaggttacaaacacgctatcgccgagtgcatcattggactcattaactcaatcacctttagctcagagactgatcccaacacaatcttttggtcgctaaagaactatcaaaactacctagtggtacagccaaggagtatcaacgatgaaactaccgacaaatctagcctatgagcgctctatcgacccatcagatgtctgtttttttgtcgtctggcccgatgatagaaaaacacctttaacctacaattctcgtactctgctcgggcaaatggaagcggcatcattagcctatgatgtctcaggtcaaccaataaaaagtgccaccgctgaggcgttagctcaagggaaccctcatcaagttgatttctgccacgttccatacggtgcgagtcatattgaatgcagtttctccgtctcgttttcttctgaactacgtcaaccatataagtgtaactcaagcaaagttaaacaaacgctagtgcaattagtcgagctctacgaaacgaaaatcggctggactgagctagcaacccgatatttgatgaacatttgcaacggtaaatggctgtggaaaaatacccgtaaagcctattgctggaacattgtacttacaccttggccttggaacggggaaaaggttggatttgaagatattcgtactaactacacctcacggcaagactttaaaaataataaaaattggtctgctatagttgaaatgatcaaaaccgcattttctagtactgatgggctggcgatatttgaagtcagggccaccttgcacttgccaacgaatgctatggtgcggccaagccaagttttcacagaaaaagaaagtggcagtaaaagtaaatctaaaactcaaaacagtcgagtttttcagagtacaactattgatggtgaacgatcgccaatactaggggcctttaaaacgggagcagctattgcaaccattgacgactggtatcctgaagccactgagccactaagggtcggacggtttggggttcatcgcgaagatgtcacttgctaccgtcatccgtctaccggaaaagattttttctcgatattacaacaagcagagcactatattgaagtgttgagcgccaacaaaactcccgctcaagaaactatcaacgacatgcactttttaatggctaacctgattaagggtgggatgttccagcataaaggagactgactgtgaaatggtattataagacaatcacctttctgccagagttgtgcaacaacgagtcactggctgcaaagtgtctccgcgttctgcatggatttaactatcagtatgagacacgaaatatcggcgtttcatttccgctttggtgtgatgcaacggttggaaaaaagatttcatttgtcagcaagaacaagatagaactcgacttactacttaaacaacactatttcgtccaaatggaacaacttcaatactttcatatatccaacactgttctcgtcccagaagattgtacatacgtttcctttagacgctgtcaatctatagataagctcacagcagcagggctggcaaggaaaatcagacgcctggagaaacgtgctctatctagaggcgagcaatttgacccatcatcttttgctcaaaaagagcatactgcaatagcgcactaccactcacttggggagtccagcaaacagacgaaccgcaactttcgactcaatatcaggatgctctcggagcaaccccgtgaggggaactcgatttttagtagctatggcttatcaaattcagaaaactcgtttcagcctgtacccttaatctgacctaggctgctgccaccgctgagcaataactagcataaccccttggggcctctaaacgggtcttgaggggttttttgctgaaacctcaggcatttgagaagcacacggtcacactgcttccggtagtcaataaaccggtaaaccagcaatagacataagcggctatttaacgaccctgccctgaaccgacgaccgggtcatcgtggccggatcttgcggcccctcggcttgaacgaattgttagacattatttgccgactaccttggtgatctcgcctttcacgtagtggacaaattcttccaactgatctgcgcgcgaggccaagcgatcttcttcttgtccaagataagcctgtctagcttcaagtatgacgggctgatactgggccggcaggcgctccattgcccagtcggcagcgacatccttcggcgcgattttgccggttactgcgctgtaccaaatgcgggacaacgtaagcactacatttcgctcatcgccagcccagtcgggcggcgagttccatagcgttaaggtttcatttagcgcctcaaatagatcctgttcaggaaccggatcaaagagttcctccgccgctggacctaccaaggcaacgctatgttctcttgcttttgtcagcaagatagccagatcaatgtcgatcgtggctggctcgaagatacctgcaagaatgtcattgcgctgccattctccaaattgcagttcgcgcttagctggataacgccacggaatgatgtcgtcgtgcacaacaatggtgacttctacagcgcggagaatctcgctctctccaggggaagccgaagtttccaaaaggtcgttgatcaaagctcgccgcgttgtttcatcaagccttacggtcaccgtaaccagcaaatcaatatcactgtgtggcttcaggccgccatccactgcggagccgtacaaatgtacggccagcaacgtcggttcgagatggcgctcgatgacgccaactacctctgatagttgagtcgatacttcggcgatcaccgcttccctcatactcttcctttttcaatattattgaagcatttatcagggttattgtctcatgagcggatacatatttgaatgtatttagaaaaataaacaaatagctagctcactcggtcgctacgctccgggcgtgagactgcggcgggcgctgcggacacatacaaagttacccacagattccgtggataagcaggggactaacatgtgaggcaaaacagcagggccgcgccggtggcgtttttccataggctccgccctcctgccagagttcacataaacagacgcttttccggtgcatctgtgggagccgtgaggctcaaccatgaatctgacagtacgggcgaaacccgacaggacttaaagatccccaccgtttccggcgggtcgctccctcttgcgctctcctgttccgaccctgccgtttaccggatacctgttccgcctttctcccttacgggaagtgtggcgctttctcatagctcacacactggtatctcggctcggtgtaggtcgttcgctccaagctgggctgtaagcaagaactccccgttcagcccgactgctgcgccttatccggtaactgttcacttgagtccaacccggaaaagcacggtaaaacgccactggcagcagccattggtaactgggagttcgcagaggatttgtttagctaaacacgcggttgctcttgaagtgtgcgccaaagtccggctacactggaaggacagatttggttgctgtgctctgcgaaagccagttaccacggttaagcagttccccaactgacttaaccttcgatcaaaccacctccccaggtggttttttcgtttacagggcaaaagattacgcgcagaaaaaaaggatctcaagaagatcctttgatcttttctactgaaccgctctagatttcagtgcaatttatctcttcaaatgtagcacctgaagtcagccccatacgatataagttgtaattctcatgttagtcatgccccgcgcccaccggaaggagctgactgggttgaaggctctcaagggcatcggtcgagatcccggtgcctaatgagtgagctaacttacattaattgcgttgcgctcactgcccgctttccagtcgggaaacctgtcgtgccagctgcattaatgaatcggccaacgcgcggggagaggcggtttgcgtattgggcgccagggtggtttttcttttcaccagtgagacgggcaacagctgattgcccttcaccgcctggccctgagagagttgcagcaagcggtccacgctggtttgccccagcaggcgaaaatcctgtttgatggtggttaacggcgggatataacatgagctgtcttcggtatcgtcgtatcccactaccgagatgtccgcaccaacgcgcagcccggactcggtaatggcgcgcattgcgcccagcgccatctgatcgttggcaaccagcatcgcagtgggaacgatgccctcattcagcatttgcatggtttgttgaaaaccggacatggcactccagtcgccttcccgttccgctatcggctgaatttgattgcgagtgagatatttatgccagccagccagacgcagacgcgccgagacagaacttaatgggcccgctaacagcgcgatttgctggtgacccaatgcgaccagatgctccacgcccagtcgcgtaccgtcttcatgggagaaaataatactgttgatgggtgtctggtcagagacatcaagaaataacgccggaacattagtgcaggcagcttccacagcaatggcatcctggtcatccagcggatagttaatgatcagcccactgacgcgttgcgcgagaagattgtgcaccgccgctttacaggcttcgacgccgcttcgttctaccatcgacaccaccacgctggcacccagttgatcggcgcgagatttaatcgccgcgacaatttgcgacggcgcgtgcagggccagactggaggtggcaacgccaatcagcaacgactgtttgcccgccagttgttgtgccacgcggttgggaatgtaattcagctccgccatcgccgcttccactttttcccgcgttttcgcagaaacgtggctggcctggttcaccacgcgggaaacggtctgataagagacaccggcatactctgcgacatcgtataacgttactggtttcacattcaccaccctgaattgactctcttccgggcgctatcatgccataccgcgaaaggttttgcgccattcgatggtgtc

SEQ ID NO: 9 - DNA, 8428 bp, Synthetic construct
  source 1..8428: mol_type = other DNA
attcaccaccctgaattgactctcttccgggcgctatcatgccataccgcgaaaggttttgcgccattcgatggtgtccgggatctcgacgctctcccttatgcgactcctgcattaggaaattaatacgactcactataggggaattgtgagcggataacaattcccctgtagaaataattttgtttaactttaataaggagatataccatgggtgaactgccgagtaggtagctgataacgagacctctggtctcgtgaactgccgagtaggtagctgataacggatccgaattcgagctcggcgcgcctgcaggtcgacaagcttgcggccgcataatgcttaagtcgaacagaaagtaatcgtattgtacacggccgcataatcgaaattaatacgactcactataggggaattgtgagcggataacaattccccatcttagtatattagttaagtataagaaggagatatacatatgtttttgcaaagacctaaaccttacagcgatgaaagtttagaaagtttctttatccgagtggctaacaaaaatggctacggtgatgtccatcgcttcctagaagccactaaacgattccttcaagacattgaccataatggctatcaaacctttccgactgatataactcggataaacccatactcagctaaaaacagttccagcgcacgaactgcgtcattcctgaaacttgcacaattgacatttaatgaaccgccagagctacttgggttggcaattaacagaacaaacatgaaatactcgccgtcaactagcgcggttgttagaggtgcagaagtctttcctcgcagtttactacggacgcactccatcccctgctgtcctttgtgtctgcgagaaaatggctacgcctcctacctttggcactttcaggggtacgaatactgccacagccataacgtacctttaattaccacttgtagctgtggtaaggagtttgactaccgagtatctgggttaaagggcatttgctgcaaatgcaaggagcctatcaccttaaccagcagggagaacggtcatgaggcagcgtgtactgtttcaaactggcttgctggccatgaatctaaacctctgccaaatcttcctaaaagctaccgatggggtttagttcattggtggatgggtattaaagatagcgagttcgatcacttttcgttcgttcaatttttctcaaactggccaaggtcattccactcgataatcgaagatgaagtagagttcaaccttgagcatgctgttgtcagcacgtctgaattacgactaaaagatcttcttggtcgattgtttttcggttcaattcggttacctgagcggaatcttcaacacaatatcatccttggtgagcttctctgctatttagaaaatcgtttatggcaagacaagggattaatcgccaacctcaaaatgaacgcgttagaggcgactgtaatgttaaattgtagcctcgatcagattgcatcaatggttgaacaacgcatcttgaagccaaatcgaaaaagcaagcccaacagccctcttgatgttaccgattatctatttcatttcggcgatattttctgtctttggttagctgagttccaaagcgatgagtttaaccgttcgttttatgtgtcgaggtggtaaatgcaaactctgaaagaactaatcgcatccaatcctgacgacttaacaactgaacttaagagagcatttcgtccactcacaccgcatattgcaattgatggtaatgaacttgacgcactgacgatattagtcaatttaaccgataagactgatgatcagaaagacctgctcgatcgagccaaatgcaagcaaaaacttcgagatgaaaaatggtgggctagctgcataaattgcgttaattacagacaaagccataacccaaaattcccggatatacgttctgaaggcgtgattcgaacccaagccctgggtgaattaccgagtttcctactctcgtcctcaaaaatcccaccataccattggtcatatagccatgattcaaaatacgtcaacaaaagcgcattcctcaccaatgagttttgttgggatggtgagatctcatgtttgggtgagcttcttaaagatgcagatcacccactttggaatactttgaaaaagttaggttgttctcaaaaaacttgcaaagcaatggcaaaacaactagctgatattactctcacgactatcaatgtcacactcgcaccaaattacctgactcaaatatctctccccgatagtgatacatcctacatttcactctctcctgttgcatcgctatcgatgcaaagccactttcatcagaggctccaagatgaaaatcggcatagcgcgataacgcggtttagccgaactaccaacatgggggtcactgcgatgacatgtggcggcgcatttagaatgttaaagtctggcgctaagttttccagcccccctcatcaccgattaaacagtaaacgaagttggttgacgtcagagcatgttcagtcattaaaacagtaccagcgcctcaacaaaagcctcatacctgaaaactctcggattgcactccgtagaaaatacaaaatcgagcttcaaaatatggtcagatcttggtttgcaatgcaagaccatacccttgattcgaacatacttatccaacatttgaatcatgacctatcttacttaggagccacaaaacgttttgcatacgatccagcgatgaccaagctctttactgagcttttgaaacgagagttatcaaattcaatcaataatggtgagcaacacactaatggatcgtttttagtcctaccgaatatcagggtttgtggcgcaacagctttaagctccccggtaacggtggggattccatcacttacagctttctttggcttcgttcacgcatttgaacggaatataaatcgcaccacctcatcgtttcgtgttgaatcctttgcgatatgcgtccatcaactacatgtcgagaagcgaggtttgacagcagagtttgtggaaaaaggcgacgggactatatccgctcccgcgacccgggatgactggcagtgtgatgtcgtatttagccttattttgaacaccaactttgctcaacatattgaccaagatacgttagttacatcactaccaaagcgattggctcggggttcagcaaaaattgcgattgatgactttaaacatatcaactcattctcgacattagaaacagcgatcgaatctctgccaatagaagctggtaggtggttatcactttacgcacagtcaaacaataatctaagtgatctattagcagccatgacagaggaccatcagctcatggcaagctgcgtcggttaccacttgttagaagagcccaaagataaaccaaactccctcagaggttacaaacacgctatcgccgagtgcatcattggactcattaactcaatcacctttagctcagagactgatcccaacacaatcttttggtcgctaaagaactatcaaaactacctagtggtacagccaaggagtatcaacgatgaaactaccgacaaatctagcctatgagcgctctatcgacccatcagatgtctgtttttttgtcgtctggcccgatgatagaaaaacacctttaacctacaattctcgtactctgctcgggcaaatggaagcggcatcattagcctatgatgtctcaggtcaaccaataaaaagtgccaccgctgaggcgttagctcaagggaaccctcatcaagttgatttctgccacgttccatacggtgcgagtcatattgaatgcagtttctccgtctcgttttcttctgaactacgtcaaccatataagtgtaactcaagcaaagttaaacaaacgctagtgcaattagtcgagctctacgaaacgaaaatcggctggactgagctagcaacccgatatttgatgaacatttgcaacggtaaatggctgtggaaaaatacccgtaaagcctattgctggaacattgtacttacaccttggccttggaacggggaaaaggttggatttgaagatattcgtactaactacacctcacggcaagactttaaaaataataaaaattggtctgctatagttgaaatgatcaaaaccgcattttctagtactgatgggctggcgatatttgaagtcagggccaccttgcacttgccaacgaatgctatggtgcggccaagccaagttttcacagaaaaagaaagtggcagtaaaagtaaatctaaaactcaaaacagtcgagtttttcagagtacaactattgatggtgaacgatcgccaatactaggggcctttaaaacgggagcagctattgcaaccattgacgactggtatcctgaagccactgagccactaagggtcggacggtttggggttcatcgcgaagatgtcacttgctaccgtcatccgtctaccggaaaagattttttctcgatattacaacaagcagagcactatattgaagtgttgagcgccaacaaaactcccgctcaagaaactatcaacgacatgcactttttaatggctaacctgattaagggtgggatgttccagcataaaggagactgactgtgaaatggtattataagacaatcacctttctgccagagttgtgcaacaacgagtcactggctgcaaagtgtctccgcgttctgcatggatttaactatcagtatgagacacgaaatatcggcgtttcatttccgctttggtgtgatgcaacggttggaaaaaagatttcatttgtcagcaagaacaagatagaactcgacttactacttaaacaacactatttcgtccaaatggaacaacttcaatactttcatatatccaacactgttctcgtcccagaagattgtacatacgtttcctttagacgctgtcaatctatagataagctcacagcagcagggctggcaaggaaaatcagacgcctggagaaacgtgctctatctagaggcgagcaatttgacccatcatcttttgctcaaaaagagcatactgcaatagcgcactaccactcacttggggagtccagcaaacagacgaaccgcaactttcgactcaatatcaggatgctctcggagcaaccccgtgaggggaactcgatttttagtagctatggcttatcaaattcagaaaactcgtttcagcctgtacccttaatctgacctaggctgctgccaccgctgagcaataactagcataaccccttggggcctctaaacgggtcttgaggggttttttgctgaaacctcaggcatttgagaagcacacggtcacactgcttccggtagtcaataaaccggtaaaccagcaatagacataagcggctatttaacgaccctgccctgaaccgacgaccgggtcatcgtggccggatcttgcggcccctcggcttgaacgaattgttagacattatttgccgactaccttggtgatctcgcctttcacgtagtggacaaattcttccaactgatctgcgcgcgaggccaagcgatcttcttcttgtccaagataagcctgtctagcttcaagtatgacgggctgatactgggccggcaggcgctccattgcccagtcggcagcgacatccttcggcgcgattttgccggttactgcgctgtaccaaatgcgggacaacgtaagcactacatttcgctcatcgccagcccagtcgggcggcgagttccatagcgttaaggtttcatttagcgcctcaaatagatcctgttcaggaaccggatcaaagagttcctccgccgctggacctaccaaggcaacgctatgttctcttgcttttgtcagcaagatagccagatcaatgtcgatcgtggctggctcgaagatacctgcaagaatgtcattgcgctgccattctccaaattgcagttcgcgcttagctggataacgccacggaatgatgtcgtcgtgcacaacaatggtgacttctacagcgcggagaatctcgctctctccaggggaagccgaagtttccaaaaggtcgttgatcaaagctcgccgcgttgtttcatcaagccttacggtcaccgtaaccagcaaatcaatatcactgtgtggcttcaggccgccatccactgcggagccgtacaaatgtacggccagcaacgtcggttcgagatggcgctcgatgacgccaactacctctgatagttgagtcgatacttcggcgatcaccgcttccctcatactcttcctttttcaatattattgaagcatttatcagggttattgtctcatgagcggatacatatttgaatgtatttagaaaaataaacaaatagctagctcactcggtcgctacgctccgggcgtgagactgcggcgggcgctgcggacacatacaaagttacccacagattccgtggataagcaggggactaacatgtgaggcaaaacagcagggccgcgccggtggcgtttttccataggctccgccctcctgccagagttcacataaacagacgcttttccggtgcatctgtgggagccgtgaggctcaaccatgaatctgacagtacgggcgaaacccgacaggacttaaagatccccaccgtttccggcgggtcgctccctcttgcgctctcctgttccgaccctgccgtttaccggatacctgttccgcctttctcccttacgggaagtgtggcgctttctcatagctcacacactggtatctcggctcggtgtaggtcgttcgctccaagctgggctgtaagcaagaactccccgttcagcccgactgctgcgccttatccggtaactgttcacttgagtccaacccggaaaagcacggtaaaacgccactggcagcagccattggtaactgggagttcgcagaggatttgtttagctaaacacgcggttgctcttgaagtgtgcgccaaagtccggctacactggaaggacagatttggttgctgtgctctgcgaaagccagttaccacggttaagcagttccccaactgacttaaccttcgatcaaaccacctccccaggtggttttttcgtttacagggcaaaagattacgcgcagaaaaaaaggatctcaagaagatcctttgatcttttctactgaaccgctctagatttcagtgcaatttatctcttcaaatgtagcacctgaagtcagccccatacgatataagttgtaattctcatgttagtcatgccccgcgcccaccggaaggagctgactgggttgaaggctctcaagggcatcggtcgagatcccggtgcctaatgagtgagctaacttacattaattgcgttgcgctcactgcccgctttccagtcgggaaacctgtcgtgccagctgcattaatgaatcggccaacgcgcggggagaggcggtttgcgtattgggcgccagggtggtttttcttttcaccagtgagacgggcaacagctgattgcccttcaccgcctggccctgagagagttgcagcaagcggtccacgctggtttgccccagcaggcgaaaatcctgtttgatggtggttaacggcgggatataacatgagctgtcttcggtatcgtcgtatcccactaccgagatgtccgcaccaacgcgcagcccggactcggtaatggcgcgcattgcgcccagcgccatctgatcgttggcaaccagcatcgcagtgggaacgatgccctcattcagcatttgcatggtttgttgaaaaccggacatggcactccagtcgccttcccgttccgctatcggctgaatttgattgcgagtgagatatttatgccagccagccagacgcagacgcgccgagacagaacttaatgggcccgctaacagcgcgatttgctggtgacccaatgcgaccagatgctccacgcccagtcgcgtaccgtcttcatgggagaaaataatactgttgatgggtgtctggtcagagacatcaagaaataacgccggaacattagtgcaggcagcttccacagcaatggcatcctggtcatccagcggatagttaatgatcagcccactgacgcgttgcgcgagaagattgtgcaccgccgctttacaggcttcgacgccgcttcgttctaccatcgacaccaccacgctggcacccagttgatcggcgcgagatttaatcgccgcgacaatttgcgacggcgcgtgcagggccagactggaggtggcaacgccaatcagcaacgactgtttgcccgccagttgttgtgccacgcggttgggaatgtaattcagctccgccatcgccgcttccactttttcccgcgttttcgcagaaacgtggctggcctggttcaccacgcgggaaacggtctgataagagacaccggcatactctgcgacatcgtataacgttactggtttcac

SEQ ID NO: 10 - DNA, 8445 bp, Synthetic construct
  source 1..8445: mol_type = other DNA
attcaccaccctgaattgactctcttccgggcgctatcatgccataccgcgaaaggttttgcgccattcgatggtgtccgggatctcgacgctctcccttatgcgactcctgcattaggaaattaatacgactcactataggggaattgtgagcggataacaattcccctgtagaaataattttgtttaactttaataaggagatataccatgggtgaactgccgagtaggtagctgataacgttgtctgacacttgtcacaaaccgctaggaggtgaactgccgagtaggtagctgataacggatccgaattcgagctcggcgcgcctgcaggtcgacaagcttgcggccgcataatgcttaagtcgaacagaaagtaatcgtattgtacacggccgcataatcgaaattaatacgactcactataggggaattgtgagcggataacaattccccatcttagtatattagttaagtataagaaggagatatacatatgtttttgcaaagacctaaaccttacagcgatgaaagtttagaaagtttctttatccgagtggctaacaaaaatggctacggtgatgtccatcgcttcctagaagccactaaacgattccttcaagacattgaccataatggctatcaaacctttccgactgatataactcggataaacccatactcagctaaaaacagttccagcgcacgaactgcgtcattcctgaaacttgcacaattgacatttaatgaaccgccagagctacttgggttggcaattaacagaacaaacatgaaatactcgccgtcaactagcgcggttgttagaggtgcagaagtctttcctcgcagtttactacggacgcactccatcccctgctgtcctttgtgtctgcgagaaaatggctacgcctcctacctttggcactttcaggggtacgaatactgccacagccataacgtacctttaattaccacttgtagctgtggtaaggagtttgactaccgagtatctgggttaaagggcatttgctgcaaatgcaaggagcctatcaccttaaccagcagggagaacggtcatgaggcagcgtgtactgtttcaaactggcttgctggccatgaatctaaacctctgccaaatcttcctaaaagctaccgatggggtttagttcattggtggatgggtattaaagatagcgagttcgatcacttttcgttcgttcaatttttctcaaactggccaaggtcattccactcgataatcgaagatgaagtagagttcaaccttgagcatgctgttgtcagcacgtctgaattacgactaaaagatcttcttggtcgattgtttttcggttcaattcggttacctgagcggaatcttcaacacaatatcatccttggtgagcttctctgctatttagaaaatcgtttatggcaagacaagggattaatcgccaacctcaaaatgaacgcgttagaggcgactgtaatgttaaattgtagcctcgatcagattgcatcaatggttgaacaacgcatcttgaagccaaatcgaaaaagcaagcccaacagccctcttgatgttaccgattatctatttcatttcggcgatattttctgtctttggttagctgagttccaaagcgatgagtttaaccgttcgttttatgtgtcgaggtggtaaatgcaaactctgaaagaactaatcgcatccaatcctgacgacttaacaactgaacttaagagagcatttcgtccactcacaccgcatattgcaattgatggtaatgaacttgacgcactgacgatattagtcaatttaaccgataagactgatgatcagaaagacctgctcgatcgagccaaatgcaagcaaaaacttcgagatgaaaaatggtgggctagctgcataaattgcgttaattacagacaaagccataacccaaaattcccggatatacgttctgaaggcgtgattcgaacccaagccctgggtgaattaccgagtttcctactctcgtcctcaaaaatcccaccataccattggtcatatagccatgattcaaaatacgtcaacaaaagcgcattcctcaccaatgagttttgttgggatggtgagatctcatgtttgggtgagcttcttaaagatgcagatcacccactttggaatactttgaaaaagttaggttgttctcaaaaaacttgcaaagcaatggcaaaacaactagctgatattactctcacgactatcaatgtcacactcgcaccaaattacctgactcaaatatctctccccgatagtgatacatcctacatttcactctctcctgttgcatcgctatcgatgcaaagccactttcatcagaggctccaagatgaaaatcggcatagcgcgataacgcggtttagccgaactaccaacatgggggtcactgcgatgacatgtggcggcgcatttagaatgttaaagtctggcgctaagttttccagcccccctcatcaccgattaaacagtaaacgaagttggttgacgtcagagcatgttcagtcattaaaacagtaccagcgcctcaacaaaagcctcatacctgaaaactctcggattgcactccgtagaaaatacaaaatcgagcttcaaaatatggtcagatcttggtttgcaatgcaagaccatacccttgattcgaacatacttatccaacatttgaatcatgacctatcttacttaggagccacaaaacgttttgcatacgatccagcgatgaccaagctctttactgagcttttgaaacgagagttatcaaattcaatcaataatggtgagcaacacactaatggatcgtttttagtcctaccgaatatcagggtttgtggcgcaacagctttaagctccccggtaacggtggggattccatcacttacagctttctttggcttcgttcacgcatttgaacggaatataaatcgcaccacctcatcgtttcgtgttgaatcctttgcgatatgcgtccatcaactacatgtcgagaagcgaggtttgacagcagagtttgtggaaaaaggcgacgggactatatccgctcccgcgacccgggatgactggcagtgtgatgtcgtatttagccttattttgaacaccaactttgctcaacatattgaccaagatacgttagttacatcactaccaaagcgattggctcggggttcagcaaaaattgcgattgatgactttaaacatatcaactcattctcgacattagaaacagcgatcgaatctctgccaatagaagctggtaggtggttatcactttacgcacagtcaaacaataatctaagtgatctattagcagccatgacagaggaccatcagctcatggcaagctgcgtcggttaccacttgttagaagagcccaaagataaaccaaactccctcagaggttacaaacacgctatcgccgagtgcatcattggactcattaactcaatcacctttagctcagagactgatcccaacacaatcttttggtcgctaaagaactatcaaaactacctagtggtacagccaaggagtatcaacgatgaaactaccgacaaatctagcctatgagcgctctatcgacccatcagatgtctgtttttttgtcgtctggcccgatgatagaaaaacacctttaacctacaattctcgtactctgctcgggcaaatggaagcggcatcattagcctatgatgtctcaggtcaaccaataaaaagtgccaccgctgaggcgttagctcaagggaaccctcatcaagttgatttctgccacgttccatacggtgcgagtcatattgaatgcagtttctccgtctcgttttcttctgaactacgtcaaccatataagtgtaactcaagcaaagttaaacaaacgctagtgcaattagtcgagctctacgaaacgaaaatcggctggactgagctagcaacccgatatttgatgaacatttgcaacggtaaatggctgtggaaaaatacccgtaaagcctattgctggaacattgtacttacaccttggccttggaacggggaaaaggttggatttgaagatattcgtactaactacacctcacggcaagactttaaaaataataaaaattggtctgctatagttgaaatgatcaaaaccgcattttctagtactgatgggctggcgatatttgaagtcagggccaccttgcacttgccaacgaatgctatggtgcggccaagccaagttttcacagaaaaagaaagtggcagtaaaagtaaatctaaaactcaaaacagtcgagtttttcagagtacaactattgatggtgaacgatcgccaatactaggggcctttaaaacgggagcagctattgcaaccattgacgactggtatcctgaagccactgagccactaagggtcggacggtttggggttcatcgcgaagatgtcacttgctaccgtcatccgtctaccggaaaagattttttctcgatattacaacaagcagagcactatattgaagtgttgagcgccaacaaaactcccgctcaagaaactatcaacgacatgcactttttaatggctaacctgattaagggtgggatgttccagcataaaggagactgactgtgaaatggtattataagacaatcacctttctgccagagttgtgcaacaacgagtcactggctgcaaagtgtctccgcgttctgcatggatttaactatcagtatgagacacgaaatatcggcgtttcatttccgctttggtgtgatgcaacggttggaaaaaagatttcatttgtcagcaagaacaagatagaactcgacttactacttaaacaacactatttcgtccaaatggaacaacttcaatactttcatatatccaacactgttctcgtcccagaagattgtacatacgtttcctttagacgctgtcaatctatagataagctcacagcagcagggctggcaaggaaaatcagacgcctggagaaacgtgctctatctagaggcgagcaatttgacccatcatcttttgctcaaaaagagcatactgcaatagcgcactaccactcacttggggagtccagcaaacagacgaaccgcaactttcgactcaatatcaggatgctctcggagcaaccccgtgaggggaactcgatttttagtagctatggcttatcaaattcagaaaactcgtttcagcctgtacccttaatctgacctaggctgctgccaccgctgagcaataactagcataaccccttggggcctctaaacgggtcttgaggggttttttgctgaaacctcaggcatttgagaagcacacggtcacactgcttccggtagtcaataaaccggtaaaccagcaatagacataagcggctatttaacgaccctgccctgaaccgacgaccgggtcatcgtggccggatcttgcggcccctcggcttgaacgaattgttagacattatttgccgactaccttggtgatctcgcctttcacgtagtggacaaattcttccaactgatctgcgcgcgaggccaagcgatcttcttcttgtccaagataagcctgtctagcttcaagtatgacgggctgatactgggccggcaggcgctccattgcccagtcggcagcgacatccttcggcgcgattttgccggttactgcgctgtaccaaatgcgggacaacgtaagcactacatttcgctcatcgccagcccagtcgggcggcgagttccatagcgttaaggtttcatttagcgcctcaaatagatcctgttcaggaaccggatcaaagagttcctccgccgctggacctaccaaggcaacgctatgttctcttgcttttgtcagcaagatagccagatcaatgtcgatcgtggctggctcgaagatacctgcaagaatgtcattgcgctgccattctccaaattgcagttcgcgcttagctggataacgccacggaatgatgtcgtcgtgcacaacaatggtgacttctacagcgcggagaatctcgctctctccaggggaagccgaagtttccaaaaggtcgttgatcaaagctcgccgcgttgtttcatcaagccttacggtcaccgtaaccagcaaatcaatatcactgtgtggcttcaggccgccatccactgcggagccgtacaaatgtacggccagcaacgtcggttcgagatggcgctcgatgacgccaactacctctgatagttgagtcgatacttcggcgatcaccgcttccctcatactcttcctttttcaatattattgaagcatttatcagggttattgtctcatgagcggatacatatttgaatgtatttagaaaaataaacaaatagctagctcactcggtcgctacgctccgggcgtgagactgcggcgggcgctgcggacacatacaaagttacccacagattccgtggataagcaggggactaacatgtgaggcaaaacagcagggccgcgccggtggcgtttttccataggctccgccctcctgccagagttcacataaacagacgcttttccggtgcatctgtgggagccgtgaggctcaaccatgaatctgacagtacgggcgaaacccgacaggacttaaagatccccaccgtttccggcgggtcgctccctcttgcgctctcctgttccgaccctgccgtttaccggatacctgttccgcctttctcccttacgggaagtgtggcgctttctcatagctcacacactggtatctcggctcggtgtaggtcgttcgctccaagctgggctgtaagcaagaactccccgttcagcccgactgctgcgccttatccggtaactgttcacttgagtccaacccggaaaagcacggtaaaacgccactggcagcagccattggtaactgggagttcgcagaggatttgtttagctaaacacgcggttgctcttgaagtgtgcgccaaagtccggctacactggaaggacagatttggttgctgtgctctgcgaaagccagttaccacggttaagcagttccccaactgacttaaccttcgatcaaaccacctccccaggtggttttttcgtttacagggcaaaagattacgcgcagaaaaaaaggatctcaagaagatcctttgatcttttctactgaaccgctctagatttcagtgcaatttatctcttcaaatgtagcacctgaagtcagccccatacgatataagttgtaattctcatgttagtcatgccccgcgcccaccggaaggagctgactgggttgaaggctctcaagggcatcggtcgagatcccggtgcctaatgagtgagctaacttacattaattgcgttgcgctcactgcccgctttccagtcgggaaacctgtcgtgccagctgcattaatgaatcggccaacgcgcggggagaggcggtttgcgtattgggcgccagggtggtttttcttttcaccagtgagacgggcaacagctgattgcccttcaccgcctggccctgagagagttgcagcaagcggtccacgctggtttgccccagcaggcgaaaatcctgtttgatggtggttaacggcgggatataacatgagctgtcttcggtatcgtcgtatcccactaccgagatgtccgcaccaacgcgcagcccggactcggtaatggcgcgcattgcgcccagcgccatctgatcgttggcaaccagcatcgcagtgggaacgatgccctcattcagcatttgcatggtttgttgaaaaccggacatggcactccagtcgccttcccgttccgctatcggctgaatttgattgcgagtgagatatttatgccagccagccagacgcagacgcgccgagacagaacttaatgggcccgctaacagcgcgatttgctggtgacccaatgcgaccagatgctccacgcccagtcgcgtaccgtcttcatgggagaaaataatactgttgatgggtgtctggtcagagacatcaagaaataacgccggaacattagtgcaggcagcttccacagcaatggcatcctggtcatccagcggatagttaatgatcagcccactgacgcgttgcgcgagaagattgtgcaccgccgctttacaggcttcgacgccgcttcgttctaccatcgacaccaccacgctggcacccagttgatcggcgcgagatttaatcgccgcgacaatttgcgacggcgcgtgcagggccagactggaggtggcaacgccaatcagcaacgactgtttgcccgccagttgttgtgccacgcggttgggaatgtaattcagctccgccatcgccgcttccactttttcccgcgttttcgcagaaacgtggctggcctggttcaccacgcgggaaacggtctgataagagacaccggcatactctgcgacatcgtataacgttactggtttcac

SEQ ID NO: 11 - DNA, 8445 bp, Synthetic construct
  source 1..8445: mol_type = other DNA
attcaccaccctgaattgactctcttccgggcgctatcatgccataccgcgaaaggttttgcgccattcgatggtgtccgggatctcgacgctctcccttatgcgactcctgcattaggaaattaatacgactcactataggggaattgtgagcggataacaattcccctgtagaaataattttgtttaactttaataaggagatataccatgggtgaactgccgagtaggtagctgataactgggaggattcataaagcattgtttgttggctgtgaactgccgagtaggtagctgataacggatccgaattcgagctcggcgcgcctgcaggtcgacaagcttgcggccgcataatgcttaagtcgaacagaaagtaatcgtattgtacacggccgcataatcgaaattaatacgactcactataggggaattgtgagcggataacaattccccatcttagtatattagttaagtataagaaggagatatacatatgtttttgcaaagacctaaaccttacagcgatgaaagtttagaaagtttctttatccgagtggctaacaaaaatggctacggtgatgtccatcgcttcctagaagccactaaacgattccttcaagacattgaccataatggctatcaaacctttccgactgatataactcggataaacccatactcagctaaaaacagttccagcgcacgaactgcgtcattcctgaaacttgcacaattgacatttaatgaaccgccagagctacttgggttggcaattaacagaacaaacatgaaatactcgccgtcaactagcgcggttgttagaggtgcagaagtctttcctcgcagtttactacggacgcactccatcccctgctgtcctttgtgtctgcgagaaaatggctacgcctcctacctttggcactttcaggggtacgaatactgccacagccataacgtacctttaattaccacttgtagctgtggtaaggagtttgactaccgagtatctgggttaaagggcatttgctgcaaatgcaaggagcctatcaccttaaccagcagggagaacggtcatgaggcagcgtgtactgtttcaaactggcttgctggccatgaatctaaacctctgccaaatcttcctaaaagctaccgatggggtttagttcattggtggatgggtattaaagatagcgagttcgatcacttttcgttcgttcaatttttctcaaactggccaaggtcattccactcgataatcgaagatgaagtagagttcaaccttgagcatgctgttgtcagcacgtctgaattacgactaaaagatcttcttggtcgattgtttttcggttcaattcggttacctgagcggaatcttcaacacaatatcatccttggtgagcttctctgctatttagaaaatcgtttatggcaagacaagggattaatcgccaacctcaaaatgaacgcgttagaggcgactgtaatgttaaattgtagcctcgatcagattgcatcaatggttgaacaacgcatcttgaagccaaatcgaaaaagcaagcccaacagccctcttgatgttaccgattatctatttcatttcggcgatattttctgtctttggttagctgagttccaaagcgatgagtttaaccgttcgttttatgtgtcgaggtggtaaatgcaaactctgaaagaactaatcgcatccaatcctgacgacttaacaactgaacttaagagagcatttcgtccactcacaccgcatattgcaattgatggtaatgaacttgacgcactgacgatattagtcaatttaaccgataagactgatgatcagaaagacctgctcgatcgagccaaatgcaagcaaaaacttcgagatgaaaaatggtgggctagctgcataaattgcgttaattacagacaaagccataacccaaaattcccggatatacgttctgaaggcgtgattcgaacccaagccctgggtgaattaccgagtttcctactctcgtcctcaaaaatcccaccataccattggtcatatagccatgattcaaaatacgtcaacaaaagcgcattcctcaccaatgagttttgttgggatggtgagatctcatgtttgggtgagcttcttaaagatgcagatcacccactttggaatactttgaaaaagttaggttgttctcaaaaaacttgcaaagcaatggcaaaacaactagctgatattactctcacgactatcaatgtcacactcgcaccaaattacctgactcaaatatctctccccgatagtgatacatcctacatttcactctctcctgttgcatcgctatcgatgcaaagccactttcatcagaggctccaagatgaaaatcggcatagcgcgataacgcggtttagccgaactaccaacatgggggtcactgcgatgacatgtggcggcgcatttagaatgttaaagtctggcgctaagttttccagcccccctcatcaccgattaaacagtaaacgaagttggttgacgtcagagcatgttcagtcattaaaacagtaccagcgcctcaacaaaagcctcatacctgaaaactctcggattgcactccgtagaaaatacaaaatcgagcttcaaaatatggtcagatcttggtttgcaatgcaagaccatacccttgattcgaacatacttatccaacatttgaatcatgacctatcttacttaggagccacaaaacgttttgcatacgatccagcgatgaccaagctctttactgagcttttgaaacgagagttatcaaattcaatcaataatggtgagcaacacactaatggatcgtttttagtcctaccgaatatcagggtttgtggcgcaacagctttaagctccccggtaacggtggggattccatcacttacagctttctttggcttcgttcacgcatttgaacggaatataaatcgcaccacctcatcgtttcgtgttgaatcctttgcgatatgcgtccatcaactacatgtcgagaagcgaggtttgacagcagagtttgtggaaaaaggcgacgggactatatccgctcccgcgacccgggatgactggcagtgtgatgtcgtatttagccttattttgaacaccaactttgctcaacatattgaccaagatacgttagttacatcactaccaaagcgattggctcggggttcagcaaaaattgcgattgatgactttaaacatatcaactcattctcgacattagaaacagcgatcgaatctctgccaatagaagctggtaggtggttatcactttacgcacagtcaaacaataatctaagtgatctattagcagccatgacagaggaccatcagctcatggcaagctgcgtcggttaccacttgttagaagagcccaaagataaaccaaactccctcagaggttacaaacacgctatcgccgagtgcatcattggactcattaactcaatcacctttagctcagagactgatcccaacacaatcttttggtcgctaaagaactatcaaaactacctagtggtacagccaaggagtatcaacgatgaaactaccgacaaatctagcctatgagcgctctatcgacccatcagatgtctgtttttttgtcgtctggcccgatgatagaaaaacacctttaacctacaattctcgtactctgctcgggcaaatggaagcggcatcattagcctatgatgtctcaggtcaaccaataaaaagtgccaccgctgaggcgttagctcaagggaaccctcatcaagttgatttctgccacgttccatacggtgcgagtcatattgaatgcagtttctccgtctcgttttcttctgaactacgtcaaccatataagtgtaactcaagcaaagttaaacaaacgctagtgcaattagtcgagctctacgaaacgaaaatcggctggactgagctagcaacccgatatttgatgaacatttgcaacggtaaatggctgtggaaaaatacccgtaaagcctattgctggaacattgtacttacaccttggccttggaacggggaaaaggttggatttgaagatattcgtactaactacacctcacggcaagactttaaaaataataaaaattggtctgctatagttgaaatgatcaaaaccgcattttctagtactgatgggctggcgatatttgaagtcagggccaccttgcacttgccaacgaatgctatggtgcggccaagccaagttttcacagaaaaagaaagtggcagtaaaagtaaatctaaaactcaaaacagtcgagtttttcagagtacaactattgatggtgaacgatcgccaatactaggggcctttaaaacgggagcagctattgcaaccattgacgactggtatcctgaagccactgagccactaagggtcggacggtttggggttcatcgcgaagatgtcacttgctaccgtcatccgtctaccggaaaagattttttctcgatattacaacaagcagagcactatattgaagtgttgagcgccaacaaaactcccgctcaagaaactatcaacgacatgcactttttaatggctaacctgattaagggtgggatgttccagcataaaggagactgactgtgaaatggtattataagacaatcacctttctgccagagttgtgcaacaacgagtcactggctgcaaagtgtctccgcgttctgcatggatttaactatcagtatgagacacgaaatatcggcgtttcatttccgctttggtgtgatgcaacggttggaaaaaagatttcatttgtcagcaagaacaagatagaactcgacttactacttaaacaacactatttcgtccaaatggaacaacttcaatactttcatatatccaacactgttctcgtcccagaagattgtacatacgtttcctttagacgctgtcaatctatagataagctcacagcagcagggctggcaaggaaaatcagacgcctggagaaacgtgctctatctagaggcgagcaatttgacccatcatcttttgctcaaaaagagcatactgcaatagcgcactaccactcacttggggagtccagcaaacagacgaaccgcaactttcgactcaatatcaggatgctctcggagcaaccccgtgaggggaactcgatttttagtagctatggcttatcaaattcagaaaactcgtttcagcctgtacccttaatctgacctaggctgctgccaccgctgagcaataactagcataaccccttggggcctctaaacgggtcttgaggggttttttgctgaaacctcaggcatttgagaagcacacggtcacactgcttccggtagtcaataaaccggtaaaccagcaatagacataagcggctatttaacgaccctgccctgaaccgacgaccgggtcatcgtggccggatcttgcggcccctcggcttgaacgaattgttagacattatttgccgactaccttggtgatctcgcctttcacgtagtggacaaattcttccaactgatctgcgcgcgaggccaagcgatcttcttcttgtccaagataagcctgtctagcttcaagtatgacgggctgatactgggccggcaggcgctccattgcccagtcggcagcgacatccttcggcgcgattttgccggttactgcgctgtaccaaatgcgggacaacgtaagcactacatttcgctcatcgccagcccagtcgggcggcgagttccatagcgttaaggtttcatttagcgcctcaaatagatcctgttcaggaaccggatcaaagagttcctccgccgctggacctaccaaggcaacgctatgttctcttgcttttgtcagcaagatagccagatcaatgtcgatcgtggctggctcgaagatacctgcaagaatgtcattgcgctgccattctccaaattgcagttcgcgcttagctggataacgccacggaatgatgtcgtcgtgcacaacaatggtgacttctacagcgcggagaatctcgctctctccaggggaagccgaagtttccaaaaggtcgttgatcaaagctcgccgcgttgtttcatcaagccttacggtcaccgtaaccagcaaatcaatatcactgtgtggcttcaggccgccatccactgcggagccgtacaaatgtacggccagcaacgtcggttcgagatggcgctcgatgacgccaactacctctgatagttgagtcgatacttcggcgatcaccgcttccctcatactcttcctttttcaatattattgaagcatttatcagggttattgtctcatgagcggatacatatttgaatgtatttagaaaaataaacaaatagctagctcactcggtcgctacgctccgggcgtgagactgcggcgggcgctgcggacacatacaaagttacccacagattccgtggataagcaggggactaacatgtgaggcaaaacagcagggccgcgccggtggcgtttttccataggctccgccctcctgccagagttcacataaacagacgcttttccggtgcatctgtgggagccgtgaggctcaaccatgaatctgacagtacgggcgaaacccgacaggacttaaagatccccaccgtttccggcgggtcgctccctcttgcgctctcctgttccgaccctgccgtttaccggatacctgttccgcctttctcccttacgggaagtgtggcgctttctcatagctcacacactggtatctcggctcggtgtaggtcgttcgctccaagctgggctgtaagcaagaactccccgttcagcccgactgctgcgccttatccggtaactgttcacttgagtccaacccggaaaagcacggtaaaacgccactggcagcagccattggtaactgggagttcgcagaggatttgtttagctaaacacgcggttgctcttgaagtgtgcgccaaagtccggctacactggaaggacagatttggttgctgtgctctgcgaaagccagttaccacggttaagcagttccccaactgacttaaccttcgatcaaaccacctccccaggtggttttttcgtttacagggcaaaagattacgcgcagaaaaaaaggatctcaagaagatcctttgatcttttctactgaaccgctctagatttcagtgcaatttatctcttcaaatgtagcacctgaagtcagccccatacgatataagttgtaattctcatgttagtcatgccccgcgcccaccggaaggagctgactgggttgaaggctctcaagggcatcggtcgagatcccggtgcctaatgagtgagctaacttacattaattgcgttgcgctcactgcccgctttccagtcgggaaacctgtcgtgccagctgcattaatgaatcggccaacgcgcggggagaggcggtttgcgtattgggcgccagggtggtttttcttttcaccagtgagacgggcaacagctgattgcccttcaccgcctggccctgagagagttgcagcaagcggtccacgctggtttgccccagcaggcgaaaatcctgtttgatggtggttaacggcgggatataacatgagctgtcttcggtatcgtcgtatcccactaccgagatgtccgcaccaacgcgcagcccggactcggtaatggcgcgcattgcgcccagcgccatctgatcgttggcaaccagcatcgcagtgggaacgatgccctcattcagcatttgcatggtttgttgaaaaccggacatggcactccagtcgccttcccgttccgctatcggctgaatttgattgcgagtgagatatttatgccagccagccagacgcagacgcgccgagacagaacttaatgggcccgctaacagcgcgatttgctggtgacccaatgcgaccagatgctccacgcccagtcgcgtaccgtcttcatgggagaaaataatactgttgatgggtgtctggtcagagacatcaagaaataacgccggaacattagtgcaggcagcttccacagcaatggcatcctggtcatccagcggatagttaatgatcagcccactgacgcgttgcgcgagaagattgtgcaccgccgctttacaggcttcgacgccgcttcgttctaccatcgacaccaccacgctggcacccagttgatcggcgcgagatttaatcgccgcgacaatttgcgacggcgcgtgcagggccagactggaggtggcaacgccaatcagcaacgactgtttgcccgccagttgttgtgccacgcggttgggaatgtaattcagctccgccatcgccgcttccactttttcccgcgttttcgcagaaacgtggctggcctggttcaccacgcgggaaacggtctgataagagacaccggcatactctgcgacatcgtataacgttactggtttcac

SEQ ID NO: 12 - DNA, 8445 bp, Synthetic construct
  source 1..8445: mol_type = other DNA
attcaccaccctgaattgactctcttccgggcgctatcatgccataccgcgaaaggttttgcgccattcgatggtgtccgggatctcgacgctctcccttatgcgactcctgcattaggaaattaatacgactcactataggggaattgtgagcggataacaattcccctgtagaaataattttgtttaactttaataaggagatataccatgggtgaactgccgagtaggtagctgataacgtcatcttcggctactttttctctgtcacagagtgaactgccgagtaggtagctgataacggatccgaattcgagctcggcgcgcctgcaggtcgacaagcttgcggccgcataatgcttaagtcgaacagaaagtaatcgtattgtacacggccgcataatcgaaattaatacgactcactataggggaattgtgagcggataacaattccccatcttagtatattagttaagtataagaaggagatatacatatgtttttgcaaagacctaaaccttacagcgatgaaagtttagaaagtttctttatccgagtggctaacaaaaatggctacggtgatgtccatcgcttcctagaagccactaaacgattccttcaagacattgaccataatggctatcaaacctttccgactgatataactcggataaacccatactcagctaaaaacagttccagcgcacgaactgcgtcattcctgaaacttgcacaattgacatttaatgaaccgccagagctacttgggttggcaattaacagaacaaacatgaaatactcgccgtcaactagcgcggttgttagaggtgcagaagtctttcctcgcagtttactacggacgcactccatcccctgctgtcctttgtgtctgcgagaaaatggctacgcctcctacctttggcactttcaggggtacgaatactgccacagccataacgtacctttaattaccacttgtagctgtggtaaggagtttgactaccgagtatctgggttaaagggcatttgctgcaaatgcaaggagcctatcaccttaaccagcagggagaacggtcatgaggcagcgtgtactgtttcaaactggcttgctggccatgaatctaaacctctgccaaatcttcctaaaagctaccgatggggtttagttcattggtggatgggtattaaagatagcgagttcgatcacttttcgttcgttcaatttttctcaaactggccaaggtcattccactcgataatcgaagatgaagtagagttcaaccttgagcatgctgttgtcagcacgtctgaattacgactaaaagatcttcttggtcgattgtttttcggttcaattcggttacctgagcggaatcttcaacacaatatcatccttggtgagcttctctgctatttagaaaatcgtttatggcaagacaagggattaatcgccaacctcaaaatgaacgcgttagaggcgactgtaatgttaaattgtagcctcgatcagattgcatcaatggttgaacaacgcatcttgaagccaaatcgaaaaagcaagcccaacagccctcttgatgttaccgattatctatttcatttcggcgatattttctgtctttggttagctgagttccaaagcgatgagtttaaccgttcgttttatgtgtcgaggtggtaaatgcaaactctgaaagaactaatcgcatccaatcctgacgacttaacaactgaacttaagagagcatttcgtccactcacaccgcatattgcaattgatggtaatgaacttgacgcactgacgatattagtcaatttaaccgataagactgatgatcagaaagacctgctcgatcgagccaaatgcaagcaaaaacttcgagatgaaaaatggtgggctagctgcataaattgcgttaattacagacaaagccataacccaaaattcccggatatacgttctgaaggcgtgattcgaacccaagccctgggtgaattaccgagtttcctactctcgtcctcaaaaatcccaccataccattggtcatatagccatgattcaaaatacgtcaacaaaagcgcattcctcaccaatgagttttgttgggatggtgagatctcatgtttgggtgagcttcttaaagatgcagatcacccactttggaatactttgaaaaagttaggttgttctcaaaaaacttgcaaagcaatggcaaaacaactagctgatattactctcacgactatcaatgtcacactcgcaccaaattacctgactcaaatatctctccccgatagtgatacatcctacatttcactctctcctgttgcatcgctatcgatgcaaagccactttcatcagaggctccaagatgaaaatcggcatagcgcgataacgcggtttagccgaactaccaacatgggggtcactgcgatgacatgtggcggcgcatttagaatgttaaagtctggcgctaagttttccagcccccctcatcaccgattaaacagtaaacgaagttggttgacgtcagagcatgttcagtcattaaaacagtaccagcgcctcaacaaaagcctcatacctgaaaactctcggattgcactccgtagaaaatacaaaatcgagcttcaaaatatggtcagatcttggtttgcaatgcaagaccatacccttgattcgaacatacttatccaacatttgaatcatgacctatcttacttaggagccacaaaacgttttgcatacgatccagcgatgaccaagctctttactgagcttttgaaacgagagttatcaaattcaatcaataatggtgagcaacacactaatggatcgtttttagtcctaccgaatatcagggtttgtggcgcaacagctttaagctccccggtaacggtggggattccatcacttacagctttctttggcttcgttcacgcatttgaacggaatataaatcgcaccacctcatcgtttcgtgttgaatcctttgcgatatgcgtccatcaactacatgtcgagaagcgaggtttgacagcagagtttgtggaaaaaggcgacgggactatatccgctcccgcgacccgggatgactggcagtgtgatgtcgtatttagccttattttgaacaccaactttgctcaacatattgaccaagatacgttagttacatcactaccaaagcgattggctcggggttcagcaaaaattgcgattgatgactttaaacatatcaactcattctcgacattagaaacagcgatcgaatctctgccaatagaagctggtaggtggttatcactttacgcacagtcaaacaataatctaagtgatctattagcagccatgacagaggaccatcagctcatggcaagctgcgtcggttaccacttgttagaagagcccaaagataaaccaaactccctcagaggttacaaacacgctatcgccgagtgcatcattggactcattaactcaatcacctttagctcagagactgatcccaacacaatcttttggtcgctaaagaactatcaaaactacctagtggtacagccaaggagtatcaacgatgaaactaccgacaaatctagcctatgagcgctctatcgacccatcagatgtctgtttttttgtcgtctggcccgatgatagaaaaacacctttaacctacaattctcgtactctgctcgggcaaatggaagcggcatcattagcctatgatgtctcaggtcaaccaataaaaagtgccaccgctgaggcgttagctcaagggaaccctcatcaagttgatttctgccacgttccatacggtgcgagtcatattgaatgcagtttctccgtctcgttttcttctgaactacgtcaaccatataagtgtaactcaagcaaagttaaacaaacgctagtgcaattagtcgagctctacgaaacgaaaatcggctggactgagctagcaacccgatatttgatgaacatttgcaacggtaaatggctgtggaaaaatacccgtaaagcctattgctggaacattgtacttacaccttggccttggaacggggaaaaggttggatttgaagatattcgtactaactacacctcacggcaagactttaaaaataataaaaattggtctgctatagttgaaatgatcaaaaccgcattttctagtactgatgggctggcgatatttgaagtcagggccaccttgcacttgccaacgaatgctatggtgcggccaagccaagttttcacagaaaaagaaagtggcagtaaaagtaaatctaaaactcaaaacagtcgagtttttcagagtacaactattgatggtgaacgatcgccaatactaggggcctttaaaacgggagcagctattgcaaccattgacgactggtatcctgaagccactgagccactaagggtcggacggtttggggttcatcgcgaagatgtcacttgctaccgtcatccgtctaccggaaaagattttttctcgatattacaacaagcagagcactatattgaagtgttgagcgccaacaaaactcccgctcaagaaactatcaacgacatgcactttttaatggctaacctgattaagggtgggatgttccagcataaaggagactgactgtgaaatggtattataagacaatcacctttctgccagagttgtgcaacaacgagtcactggctgcaaagtgtctccgcgttctgcatggatttaactatcagtatgagacacgaaatatcggcgtttcatttccgctttggtgtgatgcaacggttggaaaaaagatttcatttgtcagcaagaacaagatagaactcgacttactacttaaacaacactatttcgtccaaatggaacaacttcaatactttcatatatccaacactgttctcgtcccagaagattgtacatacgtttcctttagacgctgtcaatctatagataagctcacagcagcagggctggcaaggaaaatcagacgcctggagaaacgtgctctatctagaggcgagcaatttgacccatcatcttttgctcaaaaagagcatactgcaatagcgcactaccactcacttggggagtccagcaaacagacgaaccgcaactttcgactcaatatcaggatgctctcggagcaaccccgtgaggggaactcgatttttagtagctatggcttatcaaattcagaaaactcgtttcagcctgtacccttaatctgacctaggctgctgccaccgctgagcaataactagcataaccccttggggcctctaaacgggtcttgaggggttttttgctgaaacctcaggcatttgagaagcacacggtcacactgcttccggtagtcaataaaccggtaaaccagcaatagacataagcggctatttaacgaccctgccctgaaccgacgaccgggtcatcgtggccggatcttgcggcccctcggcttgaacgaattgttagacattatttgccgactaccttggtgatctcgcctttcacgtagtggacaaattcttccaactgatctgcgcgcgaggccaagcgatcttcttcttgtccaagataagcctgtctagcttcaagtatgacgggctgatactgggccggcaggcgctccattgcccagtcggcagcgacatccttcggcgcgattttgccggttactgcgctgtaccaaatgcgggacaacgtaagcactacatttcgctcatcgccagcccagtcgggcggcgagttccatagcgttaaggtttcatttagcgcctcaaatagatcctgttcaggaaccggatcaaagagttcctccgccgctggacctaccaaggcaacgctatgttctcttgcttttgtcagcaagatagccagatcaatgtcgatcgtggctggctcgaagatacctgcaagaatgtcattgcgctgccattctccaaattgcagttcgcgcttagctggataacgccacggaatgatgtcgtcgtgcacaacaatggtgacttctacagcgcggagaatctcgctctctccaggggaagccgaagtttccaaaaggtcgttgatcaaagctcgccgcgttgtttcatcaagccttacggtcaccgtaaccagcaaatcaatatcactgtgtggcttcaggccgccatccactgcggagccgtacaaatgtacggccagcaacgtcggttcgagatggcgctcgatgacgccaactacctctgatagttgagtcgatacttcggcgatcaccgcttccctcatactcttcctttttcaatattattgaagcatttatcagggttattgtctcatgagcggatacatatttgaatgtatttagaaaaataaacaaatagctagctcactcggtcgctacgctccgggcgtgagactgcggcgggcgctgcggacacatacaaagttacccacagattccgtggataagcaggggactaacatgtgaggcaaaacagcagggccgcgccggtggcgtttttccataggctccgccctcctgccagagttcacataaacagacgcttttccggtgcatctgtgggagccgtgaggctcaaccatgaatctgacagtacgggcgaaacccgacaggacttaaagatccccaccgtttccggcgggtcgctccctcttgcgctctcctgttccgaccctgccgtttaccggatacctgttccgcctttctcccttacgggaagtgtggcgctttctcatagctcacacactggtatctcggctcggtgtaggtcgttcgctccaagctgggctgtaagcaagaactccccgttcagcccgactgctgcgccttatccggtaactgttcacttgagtccaacccggaaaagcacggtaaaacgccactggcagcagccattggtaactgggagttcgcagaggatttgtttagctaaacacgcggttgctcttgaagtgtgcgccaaagtccggctacactggaaggacagatttggttgctgtgctctgcgaaagccagttaccacggttaagcagttccccaactgacttaaccttcgatcaaaccacctccccaggtggttttttcgtttacagggcaaaagattacgcgcagaaaaaaaggatctcaagaagatcctttgatcttttctactgaaccgctctagatttcagtgcaatttatctcttcaaatgtagcacctgaagtcagccccatacgatataagttgtaattctcatgttagtcatgccccgcgcccaccggaaggagctgactgggttgaaggctctcaagggcatcggtcgagatcccggtgcctaatgagtgagctaacttacattaattgcgttgcgctcactgcccgctttccagtcgggaaacctgtcgtgccagctgcattaatgaatcggccaacgcgcggggagaggcggtttgcgtattgggcgccagggtggtttttcttttcaccagtgagacgggcaacagctgattgcccttcaccgcctggccctgagagagttgcagcaagcggtccacgctggtttgccccagcaggcgaaaatcctgtttgatggtggttaacggcgggatataacatgagctgtcttcggtatcgtcgtatcccactaccgagatgtccgcaccaacgcgcagcccggactcggtaatggcgcgcattgcgcccagcgccatctgatcgttggcaaccagcatcgcagtgggaacgatgccctcattcagcatttgcatggtttgttgaaaaccggacatggcactccagtcgccttcccgttccgctatcggctgaatttgattgcgagtgagatatttatgccagccagccagacgcagacgcgccgagacagaacttaatgggcccgctaacagcgcgatttgctggtgacccaatgcgaccagatgctccacgcccagtcgcgtaccgtcttcatgggagaaaataatactgttgatgggtgtctggtcagagacatcaagaaataacgccggaacattagtgcaggcagcttccacagcaatggcatcctggtcatccagcggatagttaatgatcagcccactgacgcgttgcgcgagaagattgtgcaccgccgctttacaggcttcgacgccgcttcgttctaccatcgacaccaccacgctggcacccagttgatcggcgcgagatttaatcgccgcgacaatttgcgacggcgcgtgcagggccagactggaggtggcaacgccaatcagcaacgactgtttgcccgccagttgttgtgccacgcggttgggaatgtaattcagctccgccatcgccgcttccactttttcccgcgttttcgcagaaacgtggctggcctggttcaccacgcgggaaacggtctgataagagacaccggcatactctgcgacatcgtataacgttactggtttcac

SEQ ID NO: 13 - DNA, 8445 bp, Synthetic construct
  source 1..8445: mol_type = other DNA
attcaccaccctgaattgactctcttccgggcgctatcatgccataccgcgaaaggttttgcgccattcgatggtgtccgggatctcgacgctctcccttatgcgactcctgcattaggaaattaatacgactcactataggggaattgtgagcggataacaattcccctgtagaaataattttgtttaactttaataaggagatataccatgggtgaactgccgagtaggtagctgataactatcccattacggtcaatccgccgtttgttccgtgaactgccgagtaggtagctgataacggatccgaattcgagctcggcgcgcctgcaggtcgacaagcttgcggccgcataatgcttaagtcgaacagaaagtaatcgtattgtacacggccgcataatcgaaattaatacgactcactataggggaattgtgagcggataacaattccccatcttagtatattagttaagtataagaaggagatatacatatgtttttgcaaagacctaaaccttacagcgatgaaagtttagaaagtttctttatccgagtggctaacaaaaatggctacggtgatgtccatcgcttcctagaagccactaaacgattccttcaagacattgaccataatggctatcaaacctttccgactgatataactcggataaacccatactcagctaaaaacagttccagcgcacgaactgcgtcattcctgaaacttgcacaattgacatttaatgaaccgccagagctacttgggttggcaattaacagaacaaacatgaaatactcgccgtcaactagcgcggttgttagaggtgcagaagtctttcctcgcagtttactacggacgcactccatcccctgctgtcctttgtgtctgcgagaaaatggctacgcctcctacctttggcactttcaggggtacgaatactgccacagccataacgtacctttaattaccacttgtagctgtggtaaggagtttgactaccgagtatctgggttaaagggcatttgctgcaaatgcaaggagcctatcaccttaaccagcagggagaacggtcatgaggcagcgtgtactgtttcaaactggcttgctggccatgaatctaaacctctgccaaatcttcctaaaagctaccgatggggtttagttcattggtggatgggtattaaagatagcgagttcgatcacttttcgttcgttcaatttttctcaaactggccaaggtcattccactcgataatcgaagatgaagtagagttcaaccttgagcatgctgttgtcagcacgtctgaattacgactaaaagatcttcttggtcgattgtttttcggttcaattcggttacctgagcggaatcttcaacacaatatcatccttggtgagcttctctgctatttagaaaatcgtttatggcaagacaagggattaatcgccaacctcaaaatgaacgcgttagaggcgactgtaatgttaaattgtagcctcgatcagattgcatcaatggttgaacaacgcatcttgaagccaaatcgaaaaagcaagcccaacagccctcttgatgttaccgattatctatttcatttcggcgatattttctgtctttggttagctgagttccaaagcgatgagtttaaccgttcgttttatgtgtcgaggtggtaaatgcaaactctgaaagaactaatcgcatccaatcctgacgacttaacaactgaacttaagagagcatttcgtccactcacaccgcatattgcaattgatggtaatgaacttgacgcactgacgatattagtcaatttaaccgataagactgatgatcagaaagacctgctcgatcgagccaaatgcaagcaaaaacttcgagatgaaaaatggtgggctagctgcataaattgcgttaattacagacaaagccataacccaaaattcccggatatacgttctgaaggcgtgattcgaacccaagccctgggtgaattaccgagtttcctactctcgtcctcaaaaatcccaccataccattggtcatatagccatgattcaaaatacgtcaacaaaagcgcattcctcaccaatgagttttgttgggatggtgagatctcatgtttgggtgagcttcttaaagatgcagatcacccactttggaatactttgaaaaagttaggttgttctcaaaaaacttgcaaagcaatggcaaaacaactagctgatattactctcacgactatcaatgtcacactcgcaccaaattacctgactcaaatatctctccccgatagtgatacatcctacatttcactctctcctgttgcatcgctatcgatgcaaagccactttcatcagaggctccaagatgaaaatcggcatagcgcgataacgcggtttagccgaactaccaacatgggggtcactgcgatgacatgtggcggcgcatttagaatgttaaagtctggcgctaagttttccagcccccctcatcaccgattaaacagtaaacgaagttggttgacgtcagagcatgttcagtcattaaaacagtaccagcgcctcaacaaaagcctcatacctgaaaactctcggattgcactccgtagaaaatacaaaatcgagcttcaaaatatggtcagatcttggtttgcaatgcaagaccatacccttgattcgaacatacttatccaacatttgaatcatgacctatcttacttaggagccacaaaacgttttgcatacgatccagcgatgaccaagctctttactgagcttttgaaacgagagttatcaaattcaatcaataatggtgagcaacacactaatggatcgtttttagtcctaccgaatatcagggtttgtggcgcaacagctttaagctccccggtaacggtggggattccatcacttacagctttctttggcttcgttcacgcatttgaacggaatataaatcgcaccacctcatcgtttcgtgttgaatcctttgcgatatgcgtccatcaactacatgtcgagaagcgaggtttgacagcagagtttgtggaaaaaggcgacgggactatatccgctcccgcgacccgggatgactggcagtgtgatgtcgtatttagccttattttgaacaccaactttgctcaacatattgaccaagatacgttagttacatcactaccaaagcgattggctcggggttcagcaaaaattgcgattgatgactttaaacatatcaactcattctcgacattagaaacagcgatcgaatctctgccaatagaagctggtaggtggttatcactttacgcacagtcaaacaataatctaagtgatctattagcagccatgacagaggaccatcagctcatggcaagctgcgtcggttaccacttgttagaagagcccaaagataaaccaaactccctcagaggttacaaacacgctatcgccgagtgcatcattggactcattaactcaatcacctttagctcagagactgatcccaacacaatcttttggtcgctaaagaactatcaaaactacctagtggtacagccaaggagtatcaacgatgaaactaccgacaaatctagcctatgagcgctctatcgacccatcagatgtctgtttttttgtcgtctggcccgatgatagaaaaacacctttaacctacaattctcgtactctgctcgggcaaatggaagcggcatcattagcctatgatgtctcaggtcaaccaataaaaagtgccaccgctgaggcgttagctcaagggaaccctcatcaagttgatttctgccacgttccatacggtgcgagtcatattgaatgcagtttctccgtctcgttttcttctgaactacgtcaaccatataagtgtaactcaagcaaagttaaacaaacgctagtgcaattagtcgagctctacgaaacgaaaatcggctggactgagctagcaacccgatatttgatgaacatttgcaacggtaaatggctgtggaaaaatacccgtaaagcctattgctggaacattgtacttacaccttggccttggaacggggaaaaggttggatttgaagatattcgtactaactacacctcacggcaagactttaaaaataataaaaattggtctgctatagttgaaatgatcaaaaccgcattttctagtactgatgggctggcgatatttgaagtcagggccaccttgcacttgccaacgaatgctatggtgcggccaagccaagttttcacagaaaaagaaagtggcagtaaaagtaaatctaaaactcaaaacagtcgagtttttcagagtacaactattgatggtgaacgatcgccaatactaggggcctttaaaacgggagcagctattgcaaccattgacgactggtatcctgaagccactgagccactaagggtcggacggtttggggttcatcgcgaagatgtcacttgctaccgtcatccgtctaccggaaaagattttttctcgatattacaacaagcagagcactatattgaagtgttgagcgccaacaaaactcccgctcaagaaactatcaacgacatgcactttttaatggctaacctgattaagggtgggatgttccagcataaaggagactgactgtgaaatggtattataagacaatcacctttctgccagagttgtgcaacaacgagtcactggctgcaaagtgtctccgcgttctgcatggatttaactatcagtatgagacacgaaatatcggcgtttcatttccgctttggtgtgatgcaacggttggaaaaaagatttcatttgtcagcaagaacaagatagaactcgacttactacttaaacaacactatttcgtccaaatggaacaacttcaatactttcatatatccaacactgttctcgtcccagaagattgtacatacgtttcctttagacgctgtcaatctatagataagctcacagcagcagggctggcaaggaaaatcagacgcctggagaaacgtgctctatctagaggcgagcaatttgacccatcatcttttgctcaaaaagagcatactgcaatagcgcactaccactcacttggggagtccagcaaacagacgaaccgcaactttcgactcaatatcaggatgctctcggagcaaccccgtgaggggaactcgatttttagtagctatggcttatcaaattcagaaaactcgtttcagcctgtacccttaatctgacctaggctgctgccaccgctgagcaataactagcataaccccttggggcctctaaacgggtcttgaggggttttttgctgaaacctcaggcatttgagaagcacacggtcacactgcttccggtagtcaataaaccggtaaaccagcaatagacataagcggctatttaacgaccctgccctgaaccgacgaccgggtcatcgtggccggatcttgcggcccctcggcttgaacgaattgttagacattatttgccgactaccttggtgatctcgcctttcacgtagtggacaaattcttccaactgatctgcgcgcgaggccaagcgatcttcttcttgtccaagataagcctgtctagcttcaagtatgacgggctgatactgggccggcaggcgctccattgcccagtcggcagcgacatccttcggcgcgattttgccggttactgcgctgtaccaaatgcgggacaacgtaagcactacatttcgctcatcgccagcccagtcgggcggcgagttccatagcgttaaggtttcatttagcgcctcaaatagatcctgttcaggaaccggatcaaagagttcctccgccgctggacctaccaaggcaacgctatgttctcttgcttttgtcagcaagatagccagatcaatgtcgatcgtggctggctcgaagatacctgcaagaatgtcattgcgctgccattctccaaattgcagttcgcgcttagctggataacgccacggaatgatgtcgtcgtgcacaacaatggtgacttctacagcgcggagaatctcgctctctccaggggaagccgaagtttccaaaaggtcgttgatcaaagctcgccgcgttgtttcatcaagccttacggtcaccgtaaccagcaaatcaatatcactgtgtggcttcaggccgccatccactgcggagccgtacaaatgtacggccagcaacgtcggttcgagatggcgctcgatgacgccaactacctctgatagttgagtcgatacttcggcgatcaccgcttccctcatactcttcctttttcaatattattgaagcatttatcagggttattgtctcatgagcggatacatatttgaatgtatttagaaaaataaacaaatagctagctcactcggtcgctacgctccgggcgtgagactgcggcgggcgctgcggacacatacaaagttacccacagattccgtggataagcaggggactaacatgtgaggcaaaacagcagggccgcgccggtggcgtttttccataggctccgccctcctgccagagttcacataaacagacgcttttccggtgcatctgtgggagccgtgaggctcaaccatgaatctgacagtacgggcgaaacccgacaggacttaaagatccccaccgtttccggcgggtcgctccctcttgcgctctcctgttccgaccctgccgtttaccggatacctgttccgcctttctcccttacgggaagtgtggcgctttctcatagctcacacactggtatctcggctcggtgtaggtcgttcgctccaagctgggctgtaagcaagaactccccgttcagcccgactgctgcgccttatccggtaactgttcacttgagtccaacccggaaaagcacggtaaaacgccactggcagcagccattggtaactgggagttcgcagaggatttgtttagctaaacacgcggttgctcttgaagtgtgcgccaaagtccggctacactggaaggacagatttggttgctgtgctctgcgaaagccagttaccacggttaagcagttccccaactgacttaaccttcgatcaaaccacctccccaggtggttttttcgtttacagggcaaaagattacgcgcagaaaaaaaggatctcaagaagatcctttgatcttttctactgaaccgctctagatttcagtgcaatttatctcttcaaatgtagcacctgaagtcagccccatacgatataagttgtaattctcatgttagtcatgccccgcgcccaccggaaggagctgactgggttgaaggctctcaagggcatcggtcgagatcccggtgcctaatgagtgagctaacttacattaattgcgttgcgctcactgcccgctttccagtcgggaaacctgtcgtgccagctgcattaatgaatcggccaacgcgcggggagaggcggtttgcgtattgggcgccagggtggtttttcttttcaccagtgagacgggcaacagctgattgcccttcaccgcctggccctgagagagttgcagcaagcggtccacgctggtttgccccagcaggcgaaaatcctgtttgatggtggttaacggcgggatataacatgagctgtcttcggtatcgtcgtatcccactaccgagatgtccgcaccaacgcgcagcccggactcggtaatggcgcgcattgcgcccagcgccatctgatcgttggcaaccagcatcgcagtgggaacgatgccctcattcagcatttgcatggtttgttgaaaaccggacatggcactccagtcgccttcccgttccgctatcggctgaatttgattgcgagtgagatatttatgccagccagccagacgcagacgcgccgagacagaacttaatgggcccgctaacagcgcgatttgctggtgacccaatgcgaccagatgctccacgcccagtcgcgtaccgtcttcatgggagaaaataatactgttgatgggtgtctggtcagagacatcaagaaataacgccggaacattagtgcaggcagcttccacagcaatggcatcctggtcatccagcggatagttaatgatcagcccactgacgcgttgcgcgagaagattgtgcaccgccgctttacaggcttcgacgccgcttcgttctaccatcgacaccaccacgctggcacccagttgatcggcgcgagatttaatcgccgcgacaatttgcgacggcgcgtgcagggccagactggaggtggcaacgccaatcagcaacgactgtttgcccgccagttgttgtgccacgcggttgggaatgtaattcagctccgccatcgccgcttccactttttcccgcgttttcgcagaaacgtggctggcctggttcaccacgcgggaaacggtctgataagagacaccggcatactctgcgacatcgtataacgttactggtttcac

SEQ ID NO: 14 - DNA, 8445 bp, Synthetic construct
  source 1..8445: mol_type = other DNA
attcaccaccctgaattgactctcttccgggcgctatcatgccataccgcgaaaggttttgcgccattcgatggtgtccgggatctcgacgctctcccttatgcgactcctgcattaggaaattaatacgactcactataggggaattgtgagcggataacaattcccctgtagaaataattttgtttaactttaataaggagatataccatgggtgaactgccgagtaggtagctgataacagtacagcgcggctgaaatcatcattaaagcggtgaactgccgagtaggtagctgataacggatccgaattcgagctcggcgcgcctgcaggtcgacaagcttgcggccgcataatgcttaagtcgaacagaaagtaatcgtattgtacacggccgcataatcgaaattaatacgactcactataggggaattgtgagcggataacaattccccatcttagtatattagttaagtataagaaggagatatacatatgtttttgcaaagacctaaaccttacagcgatgaaagtttagaaagtttctttatccgagtggctaacaaaaatggctacggtgatgtccatcgcttcctagaagccactaaacgattccttcaagacattgaccataatggctatcaaacctttccgactgatataactcggataaacccatactcagctaaaaacagttccagcgcacgaactgcgtcattcctgaaacttgcacaattgacatttaatgaaccgccagagctacttgggttggcaattaacagaacaaacatgaaatactcgccgtcaactagcgcggttgttagaggtgcagaagtctttcctcgcagtttactacggacgcactccatcccctgctgtcctttgtgtctgcgagaaaatggctacgcctcctacctttggcactttcaggggtacgaatactgccacagccataacgtacctttaattaccacttgtagctgtggtaaggagtttgactaccgagtatctgggttaaagggcatttgctgcaaatgcaaggagcctatcaccttaaccagcagggagaacggtcatgaggcagcgtgtactgtttcaaactggcttgctggccatgaatctaaacctctgccaaatcttcctaaaagctaccgatggggtttagttcattggtggatgggtattaaagatagcgagttcgatcacttttcgttcgttcaatttttctcaaactggccaaggtcattccactcgataatcgaagatgaagtagagttcaaccttgagcatgctgttgtcagcacgtctgaattacgactaaaagatcttcttggtcgattgtttttcggttcaattcggttacctgagcggaatcttcaacacaatatcatccttggtgagcttctctgctatttagaaaatcgtttatggcaagacaagggattaatcgccaacctcaaaatgaacgcgttagaggcgactgtaatgttaaattgtagcctcgatcagattgcatcaatggttgaacaacgcatcttgaagccaaatcgaaaaagcaagcccaacagccctcttgatgttaccgattatctatttcatttcggcgatattttctgtctttggttagctgagttccaaagcgatgagtttaaccgttcgttttatgtgtcgaggtggtaaatgcaaactctgaaagaactaatcgcatccaatcctgacgacttaacaactgaacttaagagagcatttcgtccactcacaccgcatattgcaattgatggtaatgaacttgacgcactgacgatattagtcaatttaaccgataagactgatgatcagaaagacctgctcgatcgagccaaatgcaagcaaaaacttcgagatgaaaaatggtgggctagctgcataaattgcgttaattacagacaaagccataacccaaaattcccggatatacgttctgaaggcgtgattcgaacccaagccctgggtgaattaccgagtttcctactctcgtcctcaaaaatcccaccataccattggtcatatagccatgattcaaaatacgtcaacaaaagcgcattcctcaccaatgagttttgttgggatggtgagatctcatgtttgggtgagcttcttaaagatgcagatcacccactttggaatactttgaaaaagttaggttgttctcaaaaaacttgcaaagcaatggcaaaacaactagctgatattactctcacgactatcaatgtcacactcgcaccaaattacctgactcaaatatctctccccgatagtgatacatcctacatttcactctctcctgttgcatcgctatcgatgcaaagccactttcatcagaggctccaagatgaaaatcggcatagcgcgataacgcggtttagccgaactaccaacatgggggtcactgcgatgacatgtggcggcgcatttagaatgttaaagtctggcgctaagttttccagcccccctcatcaccgattaaacagtaaacgaagttggttgacgtcagagcatgttcagtcattaaaacagtaccagcgcctcaacaaaagcctcatacctgaaaactctcggattgcactccgtagaaaatacaaaatcgagcttcaaaatatggtcagatcttggtttgcaatgcaagaccatacccttgattcgaacatacttatccaacatttgaatcatgacctatcttacttaggagccacaaaacgttttgcatacgatccagcgatgaccaagctctttactgagcttttgaaacgagagttatcaaattcaatcaataatggtgagcaacacactaatggatcgtttttagtcctaccgaatatcagggtttgtggcgcaacagctttaagctccccggtaacggtggggattccatcacttacagctttctttggcttcgttcacgcatttgaacggaatataaatcgcaccacctcatcgtttcgtgttgaatcctttgcgatatgcgtccatcaactacatgtcgagaagcgaggtttgacagcagagtttgtggaaaaaggcgacgggactatatccgctcccgcgacccgggatgactggcagtgtgatgtcgtatttagccttattttgaacaccaactttgctcaacatattgaccaagatacgttagttacatcactaccaaagcgattggctcggggttcagcaaaaattgcgattgatgactttaaacatatcaactcattctcgacattagaaacagcgatcgaatctctgccaatagaagctggtaggtggttatcactttacgcacagtcaaacaataatctaagtgatctattagcagccatgacagaggaccatcagctcatggcaagctgcgtcggttaccacttgttagaagagcccaaagataaaccaaactccctcagaggttacaaacacgctatcgccgagtgcatcattggactcattaactcaatcacctttagctcagagactgatcccaacacaatcttttggtcgctaaagaactatcaaaactacctagtggtacagccaaggagtatcaacgatgaaactaccgacaaatctagcctatgagcgctctatcgacccatcagatgtctgtttttttgtcgtctggcccgatgatagaaaaacacctttaacctacaattctcgtactctgctcgggcaaatggaagcggcatcattagcctatgatgtctcaggtcaaccaataaaaagtgccaccgctgaggcgttagctcaagggaaccctcatcaagttgatttctgccacgttccatacggtgcgagtcatattgaatgcagtttctccgtctcgttttcttctgaactacgtcaaccatataagtgtaactcaagcaaagttaaacaaacgctagtgcaattagtcgagctctacgaaacgaaaatcggctggactgagctagcaacccgatatttgatgaacatttgcaacggtaaatggctgtggaaaaatacccgtaaagcctattgctggaacattgtacttacaccttggccttggaacggggaaaaggttggatttgaagatattcgtactaactacacctcacggcaagactttaaaaataataaaaattggtctgctatagttgaaatgatcaaaaccgcattttctagtactgatgggctggcgatatttgaagtcagggccaccttgcacttgccaacgaatgctatggtgcggccaagccaagttttcacagaaaaagaaagtggcagtaaaagtaaatctaaaactcaaaacagtcgagtttttcagagtacaactattgatggtgaacgatcgccaatactaggggcctttaaaacgggagcagctattgcaaccattgacgactggtatcctgaagccactgagccactaagggtcggacggtttggggttcatcgcgaagatgtcacttgctaccgtcatccgtctaccggaaaagattttttctcgatattacaacaagcagagcactatattgaagtgttgagcgccaacaaaactcccgctcaagaaactatcaacgacatgcactttttaatggctaacctgattaagggtgggatgttccagcataaaggagactgactgtgaaatggtattataagacaatcacctttctgccagagttgtgcaacaacgagtcactggctgcaaagtgtctccgcgttctgcatggatttaactatcagtatgagacacgaaatatcggcgtttcatttccgctttggtgtgatgcaacggttggaaaaaagatttcatttgtcagcaagaacaagatagaactcgacttactacttaaacaacactatttcgtccaaatggaacaacttcaatactttcatatatccaacactgttctcgtcccagaagattgtacatacgtttcctttagacgctgtcaatctatagataagctcacagcagcagggctggcaaggaaaatcagacgcctggagaaacgtgctctatctagaggcgagcaatttgacccatcatcttttgctcaaaaagagcatactgcaatagcgcactaccactcacttggggagtccagcaaacagacgaaccgcaactttcgactcaatatcaggatgctctcggagcaaccccgtgaggggaactcgatttttagtagctatggcttatcaaattcagaaaactcgtttcagcctgtacccttaatctgacctaggctgctgccaccgctgagcaataactagcataaccccttggggcctctaaacgggtcttgaggggttttttgctgaaacctcaggcatttgagaagcacacggtcacactgcttccggtagtcaataaaccggtaaaccagcaatagacataagcggctatttaacgaccctgccctgaaccgacgaccgggtcatcgtggccggatcttgcggcccctcggcttgaacgaattgttagacattatttgccgactaccttggtgatctcgcctttcacgtagtggacaaattcttccaactgatctgcgcgcgaggccaagcgatcttcttcttgtccaagataagcctgtctagcttcaagtatgacgggctgatactgggccggcaggcgctccattgcccagtcggcagcgacatccttcggcgcgattttgccggttactgcgctgtaccaaatgcgggacaacgtaagcactacatttcgctcatcgccagcccagtcgggcggcgagttccatagcgttaaggtttcatttagcgcctcaaatagatcctgttcaggaaccggatcaaagagttcctccgccgctggacctaccaaggcaacgctatgttctcttgcttttgtcagcaagatagccagatcaatgtcgatcgtggctggctcgaagatacctgcaagaatgtcattgcgctgccattctccaaattgcagttcgcgcttagctggataacgccacggaatgatgtcgtcgtgcacaacaatggtgacttctacagcgcggagaatctcgctctctccaggggaagccgaagtttccaaaaggtcgttgatcaaagctcgccgcgttgtttcatcaagccttacggtcaccgtaaccagcaaatcaatatcactgtgtggcttcaggccgccatccactgcggagccgtacaaatgtacggccagcaacgtcggttcgagatggcgctcgatgacgccaactacctctgatagttgagtcgatacttcggcgatcaccgcttccctcatactcttcctttttcaatattattgaagcatttatcagggttattgtctcatgagcggatacatatttgaatgtatttagaaaaataaacaaatagctagctcactcggtcgctacgctccgggcgtgagactgcggcgggcgctgcggacacatacaaagttacccacagattccgtggataagcaggggactaacatgtgaggcaaaacagcagggccgcgccggtggcgtttttccataggctccgccctcctgccagagttcacataaacagacgcttttccggtgcatctgtgggagccgtgaggctcaaccatgaatctgacagtacgggcgaaacccgacaggacttaaagatccccaccgtttccggcgggtcgctccctcttgcgctctcctgttccgaccctgccgtttaccggatacctgttccgcctttctcccttacgggaagtgtggcgctttctcatagctcacacactggtatctcggctcggtgtaggtcgttcgctccaagctgggctgtaagcaagaactccccgttcagcccgactgctgcgccttatccggtaactgttcacttgagtccaacccggaaaagcacggtaaaacgccactggcagcagccattggtaactgggagttcgcagaggatttgtttagctaaacacgcggttgctcttgaagtgtgcgccaaagtccggctacactggaaggacagatttggttgctgtgctctgcgaaagccagttaccacggttaagcagttccccaactgacttaaccttcgatcaaaccacctccccaggtggttttttcgtttacagggcaaaagattacgcgcagaaaaaaaggatctcaagaagatcctttgatcttttctactgaaccgctctagatttcagtgcaatttatctcttcaaatgtagcacctgaagtcagccccatacgatataagttgtaattctcatgttagtcatgccccgcgcccaccggaaggagctgactgggttgaaggctctcaagggcatcggtcgagatcccggtgcctaatgagtgagctaacttacattaattgcgttgcgctcactgcccgctttccagtcgggaaacctgtcgtgccagctgcattaatgaatcggccaacgcgcggggagaggcggtttgcgtattgggcgccagggtggtttttcttttcaccagtgagacgggcaacagctgattgcccttcaccgcctggccctgagagagttgcagcaagcggtccacgctggtttgccccagcaggcgaaaatcctgtttgatggtggttaacggcgggatataacatgagctgtcttcggtatcgtcgtatcccactaccgagatgtccgcaccaacgcgcagcccggactcggtaatggcgcgcattgcgcccagcgccatctgatcgttggcaaccagcatcgcagtgggaacgatgccctcattcagcatttgcatggtttgttgaaaaccggacatggcactccagtcgccttcccgttccgctatcggctgaatttgattgcgagtgagatatttatgccagccagccagacgcagacgcgccgagacagaacttaatgggcccgctaacagcgcgatttgctggtgacccaatgcgaccagatgctccacgcccagtcgcgtaccgtcttcatgggagaaaataatactgttgatgggtgtctggtcagagacatcaagaaataacgccggaacattagtgcaggcagcttccacagcaatggcatcctggtcatccagcggatagttaatgatcagcccactgacgcgttgcgcgagaagattgtgcaccgccgctttacaggcttcgacgccgcttcgttctaccatcgacaccaccacgctggcacccagttgatcggcgcgagatttaatcgccgcgacaatttgcgacggcgcgtgcagggccagactggaggtggcaacgccaatcagcaacgactgtttgcccgccagttgttgtgccacgcggttgggaatgtaattcagctccgccatcgccgcttccactttttcccgcgttttcgcagaaacgtggctggcctggttcaccacgcgggaaacggtctgataagagacaccggcatactctgcgacatcgtataacgttactggtttcac

SEQ ID NO: 15 - DNA, 6173 bp, Synthetic construct
  source 1..6173: mol_type = other DNA
gatttgctggtgacccaatgcgaccagatgctccacgcccagtcgcgtaccgtcttcatgggagaaaataatactgttgatgggtgtctggtcagagacatcaagaaataacgccggaacattagtgcaggcagcttccacagcaatggcatcctggtcatccagcggatagttaatgatcagcccactgacgcgttgcgcgagaagattgtgcaccgccgctttacaggcttcgacgccgcttcgttctaccatcgacaccaccacgctggcacccagttgatcggcgcgagatttaatcgccgcgacaatttgcgacggcgcgtgcagggccagactggaggtggcaacgccaatcagcaacgactgtttgcccgccagttgttgtgccacgcggttgggaatgtaattcagctccgccatcgccgcttccactttttcccgcgttttcgcagaaacgtggctggcctggttcaccacgcgggaaacggtctgataagagacaccggcatactctgcgacatcgtataacgttactggtttcacattcaccaccctgaattgactctcttccgggcgctatcatgccataccgcgaaaggttttgcgccattcgatggtgtccgggatctcgacgctctcccttatgcgactcctgcattaggaaattaatacgactcactataggggaattgtgagcggataacaattcccctgtagaaataattttgtttaactttaataaggagatataccatggctaagaaagggttctcaagtttccatagaaaagcagtctcttcccaagatacgcttgaatcgatagagcttgtctctagcgctaattgtctagaaagtgttacgtatcaagatatatcagcatttcccgaaacaattgcggtagagattaatttccgattaagcattcttcgctttttagcgcgaaagtgcgaaaccattgtggccaaatcaattgaaccacatcgtgtagagctacagcaaaactatagtagaaaaatacccagtgcaataacgatatatcgatggtggcttgcttttcgaaaatcagactacaaccccattagcttagcacctaatatcaaggatagaggtaatagagagacaaaagtgtcaacagttgttgattctattatggaacaggcagttgaaagagttatatctggacgaaaagtcaatgttagctctgcatataaacgtgttcgacgaaaagttcgtcaatacaatctaactcatggaacgaaatacacgtatcctaagtacgaatctgtaagaaagcgagtaaaaaagaaaaccccatttgagttattagccgcagggaaaggggagagagtagctaagagagagtttcgccgaatgggaaaaaagatcctcacgtctagcgtgctagagagggttgaaatagatcacactgtcgttgacctttttgcagtacacgaagagtatcgaatcccattgggccgaccttggcttactcaattggttgattgttacagtaaagctgtaatcggtttttatttaggtttcgagcctcctagctatgtgtcggtttcccttgcacttaagaatgcaatacaacgcaaagatgacttaatctcctcgtatgaatcgatcgagaatgaatggctatgttatggcatcccagacctactcgtaactgataatggtaaagagtttttgtcgaaagcatttgatcaagcatgtgaatcactattgatcaatgtgcatcaaaataaagttgagacgcccgacaacaaacctcatgttgaacgtaactacgggactattaatacttctctgttagacgatttacctgggaaatccttcagccagtaccttcaaagagaagggtacgactctgtgggagaagctacccttacactcaatgagattagagaaatttacttaatttggttggtggatatttatcataaaaaacccaatcagagaggcactaattgtcctaatgttgcgtggaaaaagggttgtcaagaatgggaaccagaggagttctctggttctaaagacgaattagactttaaatttgctattgttgattacaaacaacttactaaagtagggataactgtctacaaagaactgagttatagcaatgaccgtttagctgaatatagagggaagaaaggaaaccataaagttcagttcaagtataaccctgagtgtatggcagttatttgggtgttggatgaggatatgaatgagtactttacagttaatgcgattgactacgaatatgcaagtagagtatcactttggcaacataaatataacatgaaatatcaagcagaactaaattcagcagaatatgatgaggacaaggaaattgatgcagaaataaaaattgaagaaatcgcagatcgttcaattgttaagactaacaaaatcagagctcggaggcgtggcgctaggcatcaagagaatagcgcaagggctaagtcaatcagtaatgcgaacccggcctcgatacaaaaacatgaagatgaaatcgttagtgcagataatgacgattgggatattgattatgtctgagaaatcgtcaaatgagtgaaacgcgtgaggctcgtatatcaagagctaaaagggcatttgtatccacaccgagcgttaggaaaatcttgagttacatggatagatgtagagatctatcagacctagagtctgagcctacatgcatgatggtctatggtgcttcgggtgtaggtaaaacgaccgtcatcaagaaatacttaaatcaaaacagaagagagtccgaagccgggggcgatataataccggttttgcatattgagttgccagacaatgcgaagccagtagatgcagcaagggaattgctggttgaaatgggtgacccgctagcactttatgaaactgacttagctagattgacgaaaagactgactgaattaatccctgcggtcggcgtgaagctgattattatcgatgagttccaacatttggtggaagaaaggtcaaatcgggttcttacccaagtaggtaattggctaaaaatgatacttaacaaaacgaaatgtccaattgttatatttggtatgccatactcaaaagttgtactgcaagcaaactcgcaacttcacgggcgattttccattcaggttgaactgcgcccctttagctaccagggaggtagaggtgtatttaaaacttttttggaataccttgataaagccctaccttttgaaaaacaggctggcttagccaacgaaagtttgcagaaaaaattgtatgcattctctcagggaaacatgcgttcgttgagaaaccttatttatcaagcatctatcgaagcaattgataatcagcatgagacgataaccgaagaagatttcgtttttgcatcgaagttgacatcgggcgataaacccaactcatggaaaaatccttttgaggagggtgttgaggtaacagaagatatgttacgaccgccaccaaaagatattggttgggaggactatttgagacattcaaccccgagagtgagtaaaccaggtagaaataaaaactttttcgaataacctaggctgctgccaccgctgagcaataactagcataaccccttggggcctctaaacgggtcttgaggggttttttgctgaaacctcaggcatttgagaagcacacggtcacactgcttccggtagtcaataaaccggtaaaccagcaatagacataagcggctatttaacgaccctgccctgaaccgacgacaagctgacgaccgggtctccgcaagtggcacttttcggggaaatgtgcgcggaacccctatttgtttatttttctaaatacattcaaatatgtatccgctcatgaattaattcttagaaaaactcatcgagcatcaaatgaaactgcaatttattcatatcaggattatcaataccatatttttgaaaaagccgtttctgtaatgaaggagaaaactcaccgaggcagttccataggatggcaagatcctggtatcggtctgcgattccgactcgtccaacatcaatacaacctattaatttcccctcgtcaaaaataaggttatcaagtgagaaatcaccatgagtgacgactgaatccggtgagaatggcaaaagtttatgcatttctttccagacttgttcaacaggccagccattacgctcgtcatcaaaatcactcgcatcaaccaaaccgttattcattcgtgattgcgcctgagcgagacgaaatacgcggtcgctgttaaaaggacaattacaaacaggaatcgaatgcaaccggcgcaggaacactgccagcgcatcaacaatattttcacctgaatcaggatattcttctaatacctggaatgctgttttcccggggatcgcagtggtgagtaaccatgcatcatcaggagtacggataaaatgcttgatggtcggaagaggcataaattccgtcagccagtttagtctgaccatctcatctgtaacatcattggcaacgctacctttgccatgtttcagaaacaactctggcgcatcgggcttcccatacaatcgatagattgtcgcacctgattgcccgacattatcgcgagcccatttatacccatataaatcagcatccatgttggaatttaatcgcggcctagagcaagacgtttcccgttgaatatggctcatactcttcctttttcaatattattgaagcatttatcagggttattgtctcatgagcggatacatatttgaatgtatttagaaaaataaacaaataggcatgctagcgcagaaacgtcctagaagatgccaggaggatacttagcagagagacaataaggccggagcgaagccgtttttccataggctccgcccccctgacgaacatcacgaaatctgacgctcaaatcagtggtggcgaaacccgacaggactataaagataccaggcgtttccccctgatggctccctcttgcgctctcctgttcccgtcctgcggcgtccgtgttgtggtggaggctttacccaaatcaccacgtcccgttccgtgtagacagttcgctccaagctgggctgtgtgcaagaaccccccgttcagcccgactgctgcgccttatccggtaactatcatcttgagtccaacccggaaagacacgacaaaacgccactggcagcagccattggtaactgagaattagtggatttagatatcgagagtcttgaagtggtggcctaacagaggctacactgaaaggacagtatttggtatctgcgctccactaaagccagttaccaggttaagcagttccccaactgacttaaccttcgatcaaaccgcctccccaggcggttttttcgtttacagagcaggagattacgacgatcgtaaaaggatctcaagaagatcctttacggattcccgacaccatcactctagatttcagtgcaatttatctcttcaaatgtagcacctgaagtcagccccatacgatataagttgtaattctcatgttagtcatgccccgcgcccaccggaaggagctgactgggttgaaggctctcaagggcatcggtcgagatcccggtgcctaatgagtgagctaacttacattaattgcgttgcgctcactgcccgctttccagtcgggaaacctgtcgtgccagctgcattaatgaatcggccaacgcgcggggagaggcggtttgcgtattgggcgccagggtggtttttcttttcaccagtgagacgggcaacagctgattgcccttcaccgcctggccctgagagagttgcagcaagcggtccacgctggtttgccccagcaggcgaaaatcctgtttgatggtggttaacggcgggatataacatgagctgtcttcggtatcgtcgtatcccactaccgagatgtccgcaccaacgcgcagcccggactcggtaatggcgcgcattgcgcccagcgccatctgatcgttggcaaccagcatcgcagtgggaacgatgccctcattcagcatttgcatggtttgttgaaaaccggacatggcactccagtcgccttcccgttccgctatcggctgaatttgattgcgagtgagatatttatgccagccagccagacgcagacgcgccgagacagaacttaatgggcccgctaacagcgc

SEQ ID NO: 16 - DNA, 5054 bp, Synthetic construct
  source 1..5054: mol_type = other DNA
cggataacaattcccctgtagaaataattttgtttaactttaataaggagatataccatggcgacaagtttacctacgccctcagcaattacgacttcggcgttagagtatgcattccatactcccgctcgcaatctaacgaaatctcgcggaaaaaacattcatcgttatgtcagtgtaaagatgagtaagaggattacggtagaatctactctagagtgtgatgcctgctatcactttgattttgagccaagtattgttcgcttttgcgctcaaccgattcgatttttatattatctcaatggtcagtctcactcctatgttcctgactttctagttcaatttgataccaacgagtttgttctatatgaagtaaagtcagcttatgctaagaacaaacctgattttgatgttgaatgggaggcgaaagtaaaagcagcaactgaactagggctagaattggagcttgttgaagagagtgatattagggatacggttgtattaaataatcttaagcgcatgcatcgttatgcttcgaaagatgagctgaataacgtacataactctctcttaaaaataataaagtacaatggcgcccaatctgcaagatgcttgggagaacagttgggtttaaaaggccgaactgttttaccaattttgtgcgatttgctgtcaaggtgtttactcgatacacgtttggataagcctctatctcttgaatctcgatttgagttggccagttatggctaagaaatcgtcaaatgagtgaaacgcgtgaggctcgtatatcaagagctaaaagggcatttgtatccacaccgagcgttaggaaaatcttgagttacatggatagatgtagagatctatcagacctagagtctgagcctacatgcatgatggtctatggtgcttcgggtgtaggtaaaacgaccgtcatcaagaaatacttaaatcaaaacagaagagagtccgaagccgggggcgatataataccggttttgcatattgagttgccagacaatgcgaagccagtagatgcagcaagggaattgctggttgaaatgggtgacccgctagcactttatgaaactgacttagctagattgacgaaaagactgactgaattaatccctgcggtcggcgtgaagctgattattatcgatgagttccaacatttggtggaagaaaggtcaaatcgggttcttacccaagtaggtaattggctaaaaatgatacttaacaaaacgaaatgtccaattgttatatttggtatgccatactcaaaagttgtactgcaagcaaactcgcaacttcacgggcgattttccattcaggttgaactgcgcccctttagctaccagggaggtagaggtgtatttaaaacttttttggaataccttgataaagccctaccttttgaaaaacaggctggcttagccaacgaaagtttgcagaaaaaattgtatgcattctctcagggaaacatgcgttcgttgagaaaccttatttatcaagcatctatcgaagcaattgataatcagcatgagacgataaccgaagaagatttcgtttttgcatcgaagttgacatcgggcgataaacccaactcatggaaaaatccttttgaggagggtgttgaggtaacagaagatatgttacgaccgccaccaaaagatattggttgggaggactatttgagacattcaaccccgagagtgagtaaaccaggtagaaataaaaactttttcgaataacctaggctgctgccaccgctgagcaataactagcataaccccttggggcctctaaacgggtcttgaggggttttttgctgaaacctcaggcatttgagaagcacacggtcacactgcttccggtagtcaataaaccggtaaaccagcaatagacataagcggctatttaacgaccctgccctgaaccgacgacaagctgacgaccgggtctccgcaagtggcacttttcggggaaatgtgcgcggaacccctatttgtttatttttctaaatacattcaaatatgtatccgctcatgaattaattcttagaaaaactcatcgagcatcaaatgaaactgcaatttattcatatcaggattatcaataccatatttttgaaaaagccgtttctgtaatgaaggagaaaactcaccgaggcagttccataggatggcaagatcctggtatcggtctgcgattccgactcgtccaacatcaatacaacctattaatttcccctcgtcaaaaataaggttatcaagtgagaaatcaccatgagtgacgactgaatccggtgagaatggcaaaagtttatgcatttctttccagacttgttcaacaggccagccattacgctcgtcatcaaaatcactcgcatcaaccaaaccgttattcattcgtgattgcgcctgagcgagacgaaatacgcggtcgctgttaaaaggacaattacaaacaggaatcgaatgcaaccggcgcaggaacactgccagcgcatcaacaatattttcacctgaatcaggatattcttctaatacctggaatgctgttttcccggggatcgcagtggtgagtaaccatgcatcatcaggagtacggataaaatgcttgatggtcggaagaggcataaattccgtcagccagtttagtctgaccatctcatctgtaacatcattggcaacgctacctttgccatgtttcagaaacaactctggcgcatcgggcttcccatacaatcgatagattgtcgcacctgattgcccgacattatcgcgagcccatttatacccatataaatcagcatccatgttggaatttaatcgcggcctagagcaagacgtttcccgttgaatatggctcatactcttcctttttcaatattattgaagcatttatcagggttattgtctcatgagcggatacatatttgaatgtatttagaaaaataaacaaataggcatgctagcgcagaaacgtcctagaagatgccaggaggatacttagcagagagacaataaggccggagcgaagccgtttttccataggctccgcccccctgacgaacatcacgaaatctgacgctcaaatcagtggtggcgaaacccgacaggactataaagataccaggcgtttccccctgatggctccctcttgcgctctcctgttcccgtcctgcggcgtccgtgttgtggtggaggctttacccaaatcaccacgtcccgttccgtgtagacagttcgctccaagctgggctgtgtgcaagaaccccccgttcagcccgactgctgcgccttatccggtaactatcatcttgagtccaacccggaaagacacgacaaaacgccactggcagcagccattggtaactgagaattagtggatttagatatcgagagtcttgaagtggtggcctaacagaggctacactgaaaggacagtatttggtatctgcgctccactaaagccagttaccaggttaagcagttccccaactgacttaaccttcgatcaaaccgcctccccaggcggttttttcgtttacagagcaggagattacgacgatcgtaaaaggatctcaagaagatcctttacggattcccgacaccatcactctagatttcagtgcaatttatctcttcaaatgtagcacctgaagtcagccccatacgatataagttgtaattctcatgttagtcatgccccgcgcccaccggaaggagctgactgggttgaaggctctcaagggcatcggtcgagatcccggtgcctaatgagtgagctaacttacattaattgcgttgcgctcactgcccgctttccagtcgggaaacctgtcgtgccagctgcattaatgaatcggccaacgcgcggggagaggcggtttgcgtattgggcgccagggtggtttttcttttcaccagtgagacgggcaacagctgattgcccttcaccgcctggccctgagagagttgcagcaagcggtccacgctggtttgccccagcaggcgaaaatcctgtttgatggtggttaacggcgggatataacatgagctgtcttcggtatcgtcgtatcccactaccgagatgtccgcaccaacgcgcagcccggactcggtaatggcgcgcattgcgcccagcgccatctgatcgttggcaaccagcatcgcagtgggaacgatgccctcattcagcatttgcatggtttgttgaaaaccggacatggcactccagtcgccttcccgttccgctatcggctgaatttgattgcgagtgagatatttatgccagccagccagacgcagacgcgccgagacagaacttaatgggcccgctaacagcgcgatttgctggtgacccaatgcgaccagatgctccacgcccagtcgcgtaccgtcttcatgggagaaaataatactgttgatgggtgtctggtcagagacatcaagaaataacgccggaacattagtgcaggcagcttccacagcaatggcatcctggtcatccagcggatagttaatgatcagcccactgacgcgttgcgcgagaagattgtgcaccgccgctttacaggcttcgacgccgcttcgttctaccatcgacaccaccacgctggcacccagttgatcggcgcgagatttaatcgccgcgacaatttgcgacggcgcgtgcagggccagactggaggtggcaacgccaatcagcaacgactgtttgcccgccagttgttgtgccacgcggttgggaatgtaattcagctccgccatcgccgcttccactttttcccgcgttttcgcagaaacgtggctggcctggttcaccacgcgggaaacggtctgataagagacaccggcatactctgcgacatcgtataacgttactggtttcacattcaccaccctgaattgactctcttccgggcgctatcatgccataccgcgaaaggttttgcgccattcgatggtgtccgggatctcgacgctctcccttatgcgactcctgcattaggaaattaatacgactcactataggggaattgtgag

SEQ ID NO: 17 - DNA, 5869 bp, Synthetic construct
  source 1..5869: mol_type = other DNA
taatacgactcactataggggaattgtgagcggataacaattcccctgtagaaataattttgtttaactttaataaggagatataccatggcgacaagtttacctacgccctcagcaattacgacttcggcgttagagtatgcattccatactcccgctcgcaatctaacgaaatctcgcggaaaaaacattcatcgttatgtcagtgtaaagatgagtaagaggattacggtagaatctactctagagtgtgatgcctgctatcactttgattttgagccaagtattgttcgcttttgcgctcaaccgattcgatttttatattatctcaatggtcagtctcactcctatgttcctgactttctagttcaatttgataccaacgagtttgttctatatgaagtaaagtcagcttatgctaagaacaaacctgattttgatgttgaatgggaggcgaaagtaaaagcagcaactgaactagggctagaattggagcttgttgaagagagtgatattagggatacggttgtattaaataatcttaagcgcatgcatcgttatgcttcgaaagatgagctgaataacgtacataactctctcttaaaaataataaagtacaatggcgcccaatctgcaagatgcttgggagaacagttgggtttaaaaggccgaactgttttaccaattttgtgcgatttgctgtcaaggtgtttactcgatacacgtttggataagcctctatctcttgaatctcgatttgagttggccagttatggctaagaaagggttctcaagtttccatagaaaagcagtctcttcccaagatacgcttgaatcgatagagcttgtctctagcgctaattgtctagaaagtgttacgtatcaagatatatcagcatttcccgaaacaattgcggtagagattaatttccgattaagcattcttcgctttttagcgcgaaagtgcgaaaccattgtggccaaatcaattgaaccacatcgtgtagagctacagcaaaactatagtagaaaaatacccagtgcaataacgatatatcgatggtggcttgcttttcgaaaatcagactacaaccccattagcttagcacctaatatcaaggatagaggtaatagagagacaaaagtgtcaacagttgttgattctattatggaacaggcagttgaaagagttatatctggacgaaaagtcaatgttagctctgcatataaacgtgttcgacgaaaagttcgtcaatacaatctaactcatggaacgaaatacacgtatcctaagtacgaatctgtaagaaagcgagtaaaaaagaaaaccccatttgagttattagccgcagggaaaggggagagagtagctaagagagagtttcgccgaatgggaaaaaagatcctcacgtctagcgtgctagagagggttgaaatagatcacactgtcgttgacctttttgcagtacacgaagagtatcgaatcccattgggccgaccttggcttactcaattggttgattgttacagtaaagctgtaatcggtttttatttaggtttcgagcctcctagctatgtgtcggtttcccttgcacttaagaatgcaatacaacgcaaagatgacttaatctcctcgtatgaatcgatcgagaatgaatggctatgttatggcatcccagacctactcgtaactgataatggtaaagagtttttgtcgaaagcatttgatcaagcatgtgaatcactattgatcaatgtgcatcaaaataaagttgagacgcccgacaacaaacctcatgttgaacgtaactacgggactattaatacttctctgttagacgatttacctgggaaatccttcagccagtaccttcaaagagaagggtacgactctgtgggagaagctacccttacactcaatgagattagagaaatttacttaatttggttggtggatatttatcataaaaaacccaatcagagaggcactaattgtcctaatgttgcgtggaaaaagggttgtcaagaatgggaaccagaggagttctctggttctaaagacgaattagactttaaatttgctattgttgattacaaacaacttactaaagtagggataactgtctacaaagaactgagttatagcaatgaccgtttagctgaatatagagggaagaaaggaaaccataaagttcagttcaagtataaccctgagtgtatggcagttatttgggtgttggatgaggatatgaatgagtactttacagttaatgcgattgactacgaatatgcaagtagagtatcactttggcaacataaatataacatgaaatatcaagcagaactaaattcagcagaatatgatgaggacaaggaaattgatgcagaaataaaaattgaagaaatcgcagatcgttcaattgttaagactaacaaaatcagagctcggaggcgtggcgctaggcatcaagagaatagcgcaagggctaagtcaatcagtaatgcgaacccggcctcgatacaaaaacatgaagatgaaatcgttagtgcagataatgacgattgggatattgattatgtctgagaaatcgtcgaataacctaggctgctgccaccgctgagcaataactagcataaccccttggggcctctaaacgggtcttgaggggttttttgctgaaacctcaggcatttgagaagcacacggtcacactgcttccggtagtcaataaaccggtaaaccagcaatagacataagcggctatttaacgaccctgccctgaaccgacgacaagctgacgaccgggtctccgcaagtggcacttttcggggaaatgtgcgcggaacccctatttgtttatttttctaaatacattcaaatatgtatccgctcatgaattaattcttagaaaaactcatcgagcatcaaatgaaactgcaatttattcatatcaggattatcaataccatatttttgaaaaagccgtttctgtaatgaaggagaaaactcaccgaggcagttccataggatggcaagatcctggtatcggtctgcgattccgactcgtccaacatcaatacaacctattaatttcccctcgtcaaaaataaggttatcaagtgagaaatcaccatgagtgacgactgaatccggtgagaatggcaaaagtttatgcatttctttccagacttgttcaacaggccagccattacgctcgtcatcaaaatcactcgcatcaaccaaaccgttattcattcgtgattgcgcctgagcgagacgaaatacgcggtcgctgttaaaaggacaattacaaacaggaatcgaatgcaaccggcgcaggaacactgccagcgcatcaacaatattttcacctgaatcaggatattcttctaatacctggaatgctgttttcccggggatcgcagtggtgagtaaccatgcatcatcaggagtacggataaaatgcttgatggtcggaagaggcataaattccgtcagccagtttagtctgaccatctcatctgtaacatcattggcaacgctacctttgccatgtttcagaaacaactctggcgcatcgggcttcccatacaatcgatagattgtcgcacctgattgcccgacattatcgcgagcccatttatacccatataaatcagcatccatgttggaatttaatcgcggcctagagcaagacgtttcccgttgaatatggctcatactcttcctttttcaatattattgaagcatttatcagggttattgtctcatgagcggatacatatttgaatgtatttagaaaaataaacaaataggcatgctagcgcagaaacgtcctagaagatgccaggaggatacttagcagagagacaataaggccggagcgaagccgtttttccataggctccgcccccctgacgaacatcacgaaatctgacgctcaaatcagtggtggcgaaacccgacaggactataaagataccaggcgtttccccctgatggctccctcttgcgctctcctgttcccgtcctgcggcgtccgtgttgtggtggaggctttacccaaatcaccacgtcccgttccgtgtagacagttcgctccaagctgggctgtgtgcaagaaccccccgttcagcccgactgctgcgccttatccggtaactatcatcttgagtccaacccggaaagacacgacaaaacgccactggcagcagccattggtaactgagaattagtggatttagatatcgagagtcttgaagtggtggcctaacagaggctacactgaaaggacagtatttggtatctgcgctccactaaagccagttaccaggttaagcagttccccaactgacttaaccttcgatcaaaccgcctccccaggcggttttttcgtttacagagcaggagattacgacgatcgtaaaaggatctcaagaagatcctttacggattcccgacaccatcactctagatttcagtgcaatttatctcttcaaatgtagcacctgaagtcagccccatacgatataagttgtaattctcatgttagtcatgccccgcgcccaccggaaggagctgactgggttgaaggctctcaagggcatcggtcgagatcccggtgcctaatgagtgagctaacttacattaattgcgttgcgctcactgcccgctttccagtcgggaaacctgtcgtgccagctgcattaatgaatcggccaacgcgcggggagaggcggtttgcgtattgggcgccagggtggtttttcttttcaccagtgagacgggcaacagctgattgcccttcaccgcctggccctgagagagttgcagcaagcggtccacgctggtttgccccagcaggcgaaaatcctgtttgatggtggttaacggcgggatataacatgagctgtcttcggtatcgtcgtatcccactaccgagatgtccgcaccaacgcgcagcccggactcggtaatggcgcgcattgcgcccagcgccatctgatcgttggcaaccagcatcgcagtgggaacgatgccctcattcagcatttgcatggtttgttgaaaaccggacatggcactccagtcgccttcccgttccgctatcggctgaatttgattgcgagtgagatatttatgccagccagccagacgcagacgcgccgagacagaacttaatgggcccgctaacagcgcgatttgctggtgacccaatgcgaccagatgctccacgcccagtcgcgtaccgtcttcatgggagaaaataatactgttgatgggtgtctggtcagagacatcaagaaataacgccggaacattagtgcaggcagcttccacagcaatggcatcctggtcatccagcggatagttaatgatcagcccactgacgcgttgcgcgagaagattgtgcaccgccgctttacaggcttcgacgccgcttcgttctaccatcgacaccaccacgctggcacccagttgatcggcgcgagatttaatcgccgcgacaatttgcgacggcgcgtgcagggccagactggaggtggcaacgccaatcagcaacgactgtttgcccgccagttgttgtgccacgcggttgggaatgtaattcagctccgccatcgccgcttccactttttcccgcgttttcgcagaaacgtggctggcctggttcaccacgcgggaaacggtctgataagagacaccggcatactctgcgacatcgtataacgttactggtttcacattcaccaccctgaattgactctcttccgggcgctatcatgccataccgcgaaaggttttgcgccattcgatggtgtccgggatctcgacgctctcccttatgcgactcctgcattaggaaat

SEQ ID NO: 18 - DNA, 7260 bp, Synthetic construct
  source 1..7260: mol_type = other DNA
attcaccaccctgaattgactctcttccgggcgctatcatgccataccgcgaaaggttttgcgccattcgatggtgtccgggatctcgacgctctcccttatgcgactcctgcattaggaaattaatacgactcactataggggaattgtgagcggataacaattcccctgtagaaataattttgtttaactttaataaggagatataccatgggtgaactgccgagtaggtagctgataacagtacagcgcggctgaaatcatcattaaagcggtgaactgccgagtaggtagctgataacggatccgaattcgagctcggcgcgcctgcaggtcgacaagcttgcggccgcataatgcttaagtcgaacagaaagtaatcgtattgtacacggccgcataatcgaaattaatacgactcactataggggaattgtgagcggataacaattccccatcttagtatattagttaagtataagaaggagatatacatatgcaaactctgaaagaactaatcgcatccaatcctgacgacttaacaactgaacttaagagagcatttcgtccactcacaccgcatattgcaattgatggtaatgaacttgacgcactgacgatattagtcaatttaaccgataagactgatgatcagaaagacctgctcgatcgagccaaatgcaagcaaaaacttcgagatgaaaaatggtgggctagctgcataaattgcgttaattacagacaaagccataacccaaaattcccggatatacgttctgaaggcgtgattcgaacccaagccctgggtgaattaccgagtttcctactctcgtcctcaaaaatcccaccataccattggtcatatagccatgattcaaaatacgtcaacaaaagcgcattcctcaccaatgagttttgttgggatggtgagatctcatgtttgggtgagcttcttaaagatgcagatcacccactttggaatactttgaaaaagttaggttgttctcaaaaaacttgcaaagcaatggcaaaacaactagctgatattactctcacgactatcaatgtcacactcgcaccaaattacctgactcaaatatctctccccgatagtgatacatcctacatttcactctctcctgttgcatcgctatcgatgcaaagccactttcatcagaggctccaagatgaaaatcggcatagcgcgataacgcggtttagccgaactaccaacatgggggtcactgcgatgacatgtggcggcgcatttagaatgttaaagtctggcgctaagttttccagcccccctcatcaccgattaaacagtaaacgaagttggttgacgtcagagcatgttcagtcattaaaacagtaccagcgcctcaacaaaagcctcatacctgaaaactctcggattgcactccgtagaaaatacaaaatcgagcttcaaaatatggtcagatcttggtttgcaatgcaagaccatacccttgattcgaacatacttatccaacatttgaatcatgacctatcttacttaggagccacaaaacgttttgcatacgatccagcgatgaccaagctctttactgagcttttgaaacgagagttatcaaattcaatcaataatggtgagcaacacactaatggatcgtttttagtcctaccgaatatcagggtttgtggcgcaacagctttaagctccccggtaacggtggggattccatcacttacagctttctttggcttcgttcacgcatttgaacggaatataaatcgcaccacctcatcgtttcgtgttgaatcctttgcgatatgcgtccatcaactacatgtcgagaagcgaggtttgacagcagagtttgtggaaaaaggcgacgggactatatccgctcccgcgacccgggatgactggcagtgtgatgtcgtatttagccttattttgaacaccaactttgctcaacatattgaccaagatacgttagttacatcactaccaaagcgattggctcggggttcagcaaaaattgcgattgatgactttaaacatatcaactcattctcgacattagaaacagcgatcgaatctctgccaatagaagctggtaggtggttatcactttacgcacagtcaaacaataatctaagtgatctattagcagccatgacagaggaccatcagctcatggcaagctgcgtcggttaccacttgttagaagagcccaaagataaaccaaactccctcagaggttacaaacacgctatcgccgagtgcatcattggactcattaactcaatcacctttagctcagagactgatcccaacacaatcttttggtcgctaaagaactatcaaaactacctagtggtacagccaaggagtatcaacgatgaaactaccgacaaatctagcctatgagcgctctatcgacccatcagatgtctgtttttttgtcgtctggcccgatgatagaaaaacacctttaacctacaattctcgtactctgctcgggcaaatggaagcggcatcattagcctatgatgtctcaggtcaaccaataaaaagtgccaccgctgaggcgttagctcaagggaaccctcatcaagttgatttctgccacgttccatacggtgcgagtcatattgaatgcagtttctccgtctcgttttcttctgaactacgtcaaccatataagtgtaactcaagcaaagttaaacaaacgctagtgcaattagtcgagctctacgaaacgaaaatcggctggactgagctagcaacccgatatttgatgaacatttgcaacggtaaatggctgtggaaaaatacccgtaaagcctattgctggaacattgtacttacaccttggccttggaacggggaaaaggttggatttgaagatattcgtactaactacacctcacggcaagactttaaaaataataaaaattggtctgctatagttgaaatgatcaaaaccgcattttctagtactgatgggctggcgatatttgaagtcagggccaccttgcacttgccaacgaatgctatggtgcggccaagccaagttttcacagaaaaagaaagtggcagtaaaagtaaatctaaaactcaaaacagtcgagtttttcagagtacaactattgatggtgaacgatcgccaatactaggggcctttaaaacgggagcagctattgcaaccattgacgactggtatcctgaagccactgagccactaagggtcggacggtttggggttcatcgcgaagatgtcacttgctaccgtcatccgtctaccggaaaagattttttctcgatattacaacaagcagagcactatattgaagtgttgagcgccaacaaaactcccgctcaagaaactatcaacgacatgcactttttaatggctaacctgattaagggtgggatgttccagcataaaggagactgactgtgaaatggtattataagacaatcacctttctgccagagttgtgcaacaacgagtcactggctgcaaagtgtctccgcgttctgcatggatttaactatcagtatgagacacgaaatatcggcgtttcatttccgctttggtgtgatgcaacggttggaaaaaagatttcatttgtcagcaagaacaagatagaactcgacttactacttaaacaacactatttcgtccaaatggaacaacttcaatactttcatatatccaacactgttctcgtcccagaagattgtacatacgtttcctttagacgctgtcaatctatagataagctcacagcagcagggctggcaaggaaaatcagacgcctggagaaacgtgctctatctagaggcgagcaatttgacccatcatcttttgctcaaaaagagcatactgcaatagcgcactaccactcacttggggagtccagcaaacagacgaaccgcaactttcgactcaatatcaggatgctctcggagcaaccccgtgaggggaactcgatttttagtagctatggcttatcaaattcagaaaactcgtttcagcctgtacccttaatctgacctaggctgctgccaccgctgagcaataactagcataaccccttggggcctctaaacgggtcttgaggggttttttgctgaaacctcaggcatttgagaagcacacggtcacactgcttccggtagtcaataaaccggtaaaccagcaatagacataagcggctatttaacgaccctgccctgaaccgacgaccgggtcatcgtggccggatcttgcggcccctcggcttgaacgaattgttagacattatttgccgactaccttggtgatctcgcctttcacgtagtggacaaattcttccaactgatctgcgcgcgaggccaagcgatcttcttcttgtccaagataagcctgtctagcttcaagtatgacgggctgatactgggccggcaggcgctccattgcccagtcggcagcgacatccttcggcgcgattttgccggttactgcgctgtaccaaatgcgggacaacgtaagcactacatttcgctcatcgccagcccagtcgggcggcgagttccatagcgttaaggtttcatttagcgcctcaaatagatcctgttcaggaaccggatcaaagagttcctccgccgctggacctaccaaggcaacgctatgttctcttgcttttgtcagcaagatagccagatcaatgtcgatcgtggctggctcgaagatacctgcaagaatgtcattgcgctgccattctccaaattgcagttcgcgcttagctggataacgccacggaatgatgtcgtcgtgcacaacaatggtgacttctacagcgcggagaatctcgctctctccaggggaagccgaagtttccaaaaggtcgttgatcaaagctcgccgcgttgtttcatcaagccttacggtcaccgtaaccagcaaatcaatatcactgtgtggcttcaggccgccatccactgcggagccgtacaaatgtacggccagcaacgtcggttcgagatggcgctcgatgacgccaactacctctgatagttgagtcgatacttcggcgatcaccgcttccctcatactcttcctttttcaatattattgaagcatttatcagggttattgtctcatgagcggatacatatttgaatgtatttagaaaaataaacaaatagctagctcactcggtcgctacgctccgggcgtgagactgcggcgggcgctgcggacacatacaaagttacccacagattccgtggataagcaggggactaacatgtgaggcaaaacagcagggccgcgccggtggcgtttttccataggctccgccctcctgccagagttcacataaacagacgcttttccggtgcatctgtgggagccgtgaggctcaaccatgaatctgacagtacgggcgaaacccgacaggacttaaagatccccaccgtttccggcgggtcgctccctcttgcgctctcctgttccgaccctgccgtttaccggatacctgttccgcctttctcccttacgggaagtgtggcgctttctcatagctcacacactggtatctcggctcggtgtaggtcgttcgctccaagctgggctgtaagcaagaactccccgttcagcccgactgctgcgccttatccggtaactgttcacttgagtccaacccggaaaagcacggtaaaacgccactggcagcagccattggtaactgggagttcgcagaggatttgtttagctaaacacgcggttgctcttgaagtgtgcgccaaagtccggctacactggaaggacagatttggttgctgtgctctgcgaaagccagttaccacggttaagcagttccccaactgacttaaccttcgatcaaaccacctccccaggtggttttttcgtttacagggcaaaagattacgcgcagaaaaaaaggatctcaagaagatcctttgatcttttctactgaaccgctctagatttcagtgcaatttatctcttcaaatgtagcacctgaagtcagccccatacgatataagttgtaattctcatgttagtcatgccccgcgcccaccggaaggagctgactgggttgaaggctctcaagggcatcggtcgagatcccggtgcctaatgagtgagctaacttacattaattgcgttgcgctcactgcccgctttccagtcgggaaacctgtcgtgccagctgcattaatgaatcggccaacgcgcggggagaggcggtttgcgtattgggcgccagggtggtttttcttttcaccagtgagacgggcaacagctgattgcccttcaccgcctggccctgagagagttgcagcaagcggtccacgctggtttgccccagcaggcgaaaatcctgtttgatggtggttaacggcgggatataacatgagctgtcttcggtatcgtcgtatcccactaccgagatgtccgcaccaacgcgcagcccggactcggtaatggcgcgcattgcgcccagcgccatctgatcgttggcaaccagcatcgcagtgggaacgatgccctcattcagcatttgcatggtttgttgaaaaccggacatggcactccagtcgccttcccgttccgctatcggctgaatttgattgcgagtgagatatttatgccagccagccagacgcagacgcgccgagacagaacttaatgggcccgctaacagcgcgatttgctggtgacccaatgcgaccagatgctccacgcccagtcgcgtaccgtcttcatgggagaaaataatactgttgatgggtgtctggtcagagacatcaagaaataacgccggaacattagtgcaggcagcttccacagcaatggcatcctggtcatccagcggatagttaatgatcagcccactgacgcgttgcgcgagaagattgtgcaccgccgctttacaggcttcgacgccgcttcgttctaccatcgacaccaccacgctggcacccagttgatcggcgcgagatttaatcgccgcgacaatttgcgacggcgcgtgcagggccagactggaggtggcaacgccaatcagcaacgactgtttgcccgccagttgttgtgccacgcggttgggaatgtaattcagctccgccatcgccgcttccactttttcccgcgttttcgcagaaacgtggctggcctggttcaccacgcgggaaacggtctgataagagacaccggcatactctgcgacatcgtataacgttactggtttcac

SEQ ID NO: 19 - DNA, 6551 bp, Synthetic construct
  source 1..6551: mol_type = other DNA
attcaccaccctgaattgactctcttccgggcgctatcatgccataccgcgaaaggttttgcgccattcgatggtgtccgggatctcgacgctctcccttatgcgactcctgcattaggaaattaatacgactcactataggggaattgtgagcggataacaattcccctgtagaaataattttgtttaactttaataaggagatataccatgggtgaactgccgagtaggtagctgataacagtacagcgcggctgaaatcatcattaaagcggtgaactgccgagtaggtagctgataacggatccgaattcgagctcggcgcgcctgcaggtcgacaagcttgcggccgcataatgcttaagtcgaacagaaagtaatcgtattgtacacggccgcataatcgaaattaatacgactcactataggggaattgtgagcggataacaattccccatcttagtatattagttaagtataagaaggagatatacatatgtttttgcaaagacctaaaccttacagcgatgaaagtttagaaagtttctttatccgagtggctaacaaaaatggctacggtgatgtccatcgcttcctagaagccactaaacgattccttcaagacattgaccataatggctatcaaacctttccgactgatataactcggataaacccatactcagctaaaaacagttccagcgcacgaactgcgtcattcctgaaacttgcacaattgacatttaatgaaccgccagagctacttgggttggcaattaacagaacaaacatgaaatactcgccgtcaactagcgcggttgttagaggtgcagaagtctttcctcgcagtttactacggacgcactccatcccctgctgtcctttgtgtctgcgagaaaatggctacgcctcctacctttggcactttcaggggtacgaatactgccacagccataacgtacctttaattaccacttgtagctgtggtaaggagtttgactaccgagtatctgggttaaagggcatttgctgcaaatgcaaggagcctatcaccttaaccagcagggagaacggtcatgaggcagcgtgtactgtttcaaactggcttgctggccatgaatctaaacctctgccaaatcttcctaaaagctaccgatggggtttagttcattggtggatgggtattaaagatagcgagttcgatcacttttcgttcgttcaatttttctcaaactggccaaggtcattccactcgataatcgaagatgaagtagagttcaaccttgagcatgctgttgtcagcacgtctgaattacgactaaaagatcttcttggtcgattgtttttcggttcaattcggttacctgagcggaatcttcaacacaatatcatccttggtgagcttctctgctatttagaaaatcgtttatggcaagacaagggattaatcgccaacctcaaaatgaacgcgttagaggcgactgtaatgttaaattgtagcctcgatcagattgcatcaatggttgaacaacgcatcttgaagccaaatcgaaaaagcaagcccaacagccctcttgatgttaccgattatctatttcatttcggcgatattttctgtctttggttagctgagttccaaagcgatgagtttaaccgttcgttttatgtgtcgaggtggtaaatgaaactaccgacaaatctagcctatgagcgctctatcgacccatcagatgtctgtttttttgtcgtctggcccgatgatagaaaaacacctttaacctacaattctcgtactctgctcgggcaaatggaagcggcatcattagcctatgatgtctcaggtcaaccaataaaaagtgccaccgctgaggcgttagctcaagggaaccctcatcaagttgatttctgccacgttccatacggtgcgagtcatattgaatgcagtttctccgtctcgttttcttctgaactacgtcaaccatataagtgtaactcaagcaaagttaaacaaacgctagtgcaattagtcgagctctacgaaacgaaaatcggctggactgagctagcaacccgatatttgatgaacatttgcaacggtaaatggctgtggaaaaatacccgtaaagcctattgctggaacattgtacttacaccttggccttggaacggggaaaaggttggatttgaagatattcgtactaactacacctcacggcaagactttaaaaataataaaaattggtctgctatagttgaaatgatcaaaaccgcattttctagtactgatgggctggcgatatttgaagtcagggccaccttgcacttgccaacgaatgctatggtgcggccaagccaagttttcacagaaaaagaaagtggcagtaaaagtaaatctaaaactcaaaacagtcgagtttttcagagtacaactattgatggtgaacgatcgccaatactaggggcctttaaaacgggagcagctattgcaaccattgacgactggtatcctgaagccactgagccactaagggtcggacggtttggggttcatcgcgaagatgtcacttgctaccgtcatccgtctaccggaaaagattttttctcgatattacaacaagcagagcactatattgaagtgttgagcgccaacaaaactcccgctcaagaaactatcaacgacatgcactttttaatggctaacctgattaagggtgggatgttccagcataaaggagactgactgtgaaatggtattataagacaatcacctttctgccagagttgtgcaacaacgagtcactggctgcaaagtgtctccgcgttctgcatggatttaactatcagtatgagacacgaaatatcggcgtttcatttccgctttggtgtgatgcaacggttggaaaaaagatttcatttgtcagcaagaacaagatagaactcgacttactacttaaacaacactatttcgtccaaatggaacaacttcaatactttcatatatccaacactgttctcgtcccagaagattgtacatacgtttcctttagacgctgtcaatctatagataagctcacagcagcagggctggcaaggaaaatcagacgcctggagaaacgtgctctatctagaggcgagcaatttgacccatcatcttttgctcaaaaagagcatactgcaatagcgcactaccactcacttggggagtccagcaaacagacgaaccgcaactttcgactcaatatcaggatgctctcggagcaaccccgtgaggggaactcgatttttagtagctatggcttatcaaattcagaaaactcgtttcagcctgtacccttaatctgacctaggctgctgccaccgctgagcaataactagcataaccccttggggcctctaaacgggtcttgaggggttttttgctgaaacctcaggcatttgagaagcacacggtcacactgcttccggtagtcaataaaccggtaaaccagcaatagacataagcggctatttaacgaccctgccctgaaccgacgaccgggtcatcgtggccggatcttgcggcccctcggcttgaacgaattgttagacattatttgccgactaccttggtgatctcgcctttcacgtagtggacaaattcttccaactgatctgcgcgcgaggccaagcgatcttcttcttgtccaagataagcctgtctagcttcaagtatgacgggctgatactgggccggcaggcgctccattgcccagtcggcagcgacatccttcggcgcgattttgccggttactgcgctgtaccaaatgcgggacaacgtaagcactacatttcgctcatcgccagcccagtcgggcggcgagttccatagcgttaaggtttcatttagcgcctcaaatagatcctgttcaggaaccggatcaaagagttcctccgccgctggacctaccaaggcaacgctatgttctcttgcttttgtcagcaagatagccagatcaatgtcgatcgtggctggctcgaagatacctgcaagaatgtcattgcgctgccattctccaaattgcagttcgcgcttagctggataacgccacggaatgatgtcgtcgtgcacaacaatggtgacttctacagcgcggagaatctcgctctctccaggggaagccgaagtttccaaaaggtcgttgatcaaagctcgccgcgttgtttcatcaagccttacggtcaccgtaaccagcaaatcaatatcactgtgtggcttcaggccgccatccactgcggagccgtacaaatgtacggccagcaacgtcggttcgagatggcgctcgatgacgccaactacctctgatagttgagtcgatacttcggcgatcaccgcttccctcatactcttcctttttcaatattattgaagcatttatcagggttattgtctcatgagcggatacatatttgaatgtatttagaaaaataaacaaatagctagctcactcggtcgctacgctccgggcgtgagactgcggcgggcgctgcggacacatacaaagttacccacagattccgtggataagcaggggactaacatgtgaggcaaaacagcagggccgcgccggtggcgtttttccataggctccgccctcctgccagagttcacataaacagacgcttttccggtgcatctgtgggagccgtgaggctcaaccatgaatctgacagtacgggcgaaacccgacaggacttaaagatccccaccgtttccggcgggtcgctccctcttgcgctctcctgttccgaccctgccgtttaccggatacctgttccgcctttctcccttacgggaagtgtggcgctttctcatagctcacacactggtatctcggctcggtgtaggtcgttcgctccaagctgggctgtaagcaagaactccccgttcagcccgactgctgcgccttatccggtaactgttcacttgagtccaacccggaaaagcacggtaaaacgccactggcagcagccattggtaactgggagttcgcagaggatttgtttagctaaacacgcggttgctcttgaagtgtgcgccaaagtccggctacactggaaggacagatttggttgctgtgctctgcgaaagccagttaccacggttaagcagttccccaactgacttaaccttcgatcaaaccacctccccaggtggttttttcgtttacagggcaaaagattacgcgcagaaaaaaaggatctcaagaagatcctttgatcttttctactgaaccgctctagatttcagtgcaatttatctcttcaaatgtagcacctgaagtcagccccatacgatataagttgtaattctcatgttagtcatgccccgcgcccaccggaaggagctgactgggttgaaggctctcaagggcatcggtcgagatcccggtgcctaatgagtgagctaacttacattaattgcgttgcgctcactgcccgctttccagtcgggaaacctgtcgtgccagctgcattaatgaatcggccaacgcgcggggagaggcggtttgcgtattgggcgccagggtggtttttcttttcaccagtgagacgggcaacagctgattgcccttcaccgcctggccctgagagagttgcagcaagcggtccacgctggtttgccccagcaggcgaaaatcctgtttgatggtggttaacggcgggatataacatgagctgtcttcggtatcgtcgtatcccactaccgagatgtccgcaccaacgcgcagcccggactcggtaatggcgcgcattgcgcccagcgccatctgatcgttggcaaccagcatcgcagtgggaacgatgccctcattcagcatttgcatggtttgttgaaaaccggacatggcactccagtcgccttcccgttccgctatcggctgaatttgattgcgagtgagatatttatgccagccagccagacgcagacgcgccgagacagaacttaatgggcccgctaacagcgcgatttgctggtgacccaatgcgaccagatgctccacgcccagtcgcgtaccgtcttcatgggagaaaataatactgttgatgggtgtctggtcagagacatcaagaaataacgccggaacattagtgcaggcagcttccacagcaatggcatcctggtcatccagcggatagttaatgatcagcccactgacgcgttgcgcgagaagattgtgcaccgccgctttacaggcttcgacgccgcttcgttctaccatcgacaccaccacgctggcacccagttgatcggcgcgagatttaatcgccgcgacaatttgcgacggcgcgtgcagggccagactggaggtggcaacgccaatcagcaacgactgtttgcccgccagttgttgtgccacgcggttgggaatgtaattcagctccgccatcgccgcttccactttttcccgcgttttcgcagaaacgtggctggcctggttcaccacgcgggaaacggtctgataagagacaccggcatactctgcgacatcgtataacgttactggtttcac

SEQ ID NO: 20 - DNA, 7429 bp, Synthetic construct
  source 1..7429: mol_type = other DNA
attcaccaccctgaattgactctcttccgggcgctatcatgccataccgcgaaaggttttgcgccattcgatggtgtccgggatctcgacgctctcccttatgcgactcctgcattaggaaattaatacgactcactataggggaattgtgagcggataacaattcccctgtagaaataattttgtttaactttaataaggagatataccatgggtgaactgccgagtaggtagctgataacagtacagcgcggctgaaatcatcattaaagcggtgaactgccgagtaggtagctgataacggatccgaattcgagctcggcgcgcctgcaggtcgacaagcttgcggccgcataatgcttaagtcgaacagaaagtaatcgtattgtacacggccgcataatcgaaattaatacgactcactataggggaattgtgagcggataacaattccccatcttagtatattagttaagtataagaaggagatatacatatgtttttgcaaagacctaaaccttacagcgatgaaagtttagaaagtttctttatccgagtggctaacaaaaatggctacggtgatgtccatcgcttcctagaagccactaaacgattccttcaagacattgaccataatggctatcaaacctttccgactgatataactcggataaacccatactcagctaaaaacagttccagcgcacgaactgcgtcattcctgaaacttgcacaattgacatttaatgaaccgccagagctacttgggttggcaattaacagaacaaacatgaaatactcgccgtcaactagcgcggttgttagaggtgcagaagtctttcctcgcagtttactacggacgcactccatcccctgctgtcctttgtgtctgcgagaaaatggctacgcctcctacctttggcactttcaggggtacgaatactgccacagccataacgtacctttaattaccacttgtagctgtggtaaggagtttgactaccgagtatctgggttaaagggcatttgctgcaaatgcaaggagcctatcaccttaaccagcagggagaacggtcatgaggcagcgtgtactgtttcaaactggcttgctggccatgaatctaaacctctgccaaatcttcctaaaagctaccgatggggtttagttcattggtggatgggtattaaagatagcgagttcgatcacttttcgttcgttcaatttttctcaaactggccaaggtcattccactcgataatcgaagatgaagtagagttcaaccttgagcatgctgttgtcagcacgtctgaattacgactaaaagatcttcttggtcgattgtttttcggttcaattcggttacctgagcggaatcttcaacacaatatcatccttggtgagcttctctgctatttagaaaatcgtttatggcaagacaagggattaatcgccaacctcaaaatgaacgcgttagaggcgactgtaatgttaaattgtagcctcgatcagattgcatcaatggttgaacaacgcatcttgaagccaaatcgaaaaagcaagcccaacagccctcttgatgttaccgattatctatttcatttcggcgatattttctgtctttggttagctgagttccaaagcgatgagtttaaccgttcgttttatgtgtcgaggtggtaaatgcaaactctgaaagaactaatcgcatccaatcctgacgacttaacaactgaacttaagagagcatttcgtccactcacaccgcatattgcaattgatggtaatgaacttgacgcactgacgatattagtcaatttaaccgataagactgatgatcagaaagacctgctcgatcgagccaaatgcaagcaaaaacttcgagatgaaaaatggtgggctagctgcataaattgcgttaattacagacaaagccataacccaaaattcccggatatacgttctgaaggcgtgattcgaacccaagccctgggtgaattaccgagtttcctactctcgtcctcaaaaatcccaccataccattggtcatatagccatgattcaaaatacgtcaacaaaagcgcattcctcaccaatgagttttgttgggatggtgagatctcatgtttgggtgagcttcttaaagatgcagatcacccactttggaatactttgaaaaagttaggttgttctcaaaaaacttgcaaagcaatggcaaaacaactagctgatattactctcacgactatcaatgtcacactcgcaccaaattacctgactcaaatatctctccccgatagtgatacatcctacatttcactctctcctgttgcatcgctatcgatgcaaagccactttcatcagaggctccaagatgaaaatcggcatagcgcgataacgcggtttagccgaactaccaacatgggggtcactgcgatgacatgtggcggcgcatttagaatgttaaagtctggcgctaagttttccagcccccctcatcaccgattaaacagtaaacgaagttggttgacgtcagagcatgttcagtcattaaaacagtaccagcgcctcaacaaaagcctcatacctgaaaactctcggattgcactccgtagaaaatacaaaatcgagcttcaaaatatggtcagatcttggtttgcaatgcaagaccatacccttgattcgaacatacttatccaacatttgaatcatgacctatcttacttaggagccacaaaacgttttgcatacgatccagcgatgaccaagctctttactgagcttttgaaacgagagttatcaaattcaatcaataatggtgagcaacacactaatggatcgtttttagtcctaccgaatatcagggtttgtggcgcaacagctttaagctccccggtaacggtggggattccatcacttacagctttctttggcttcgttcacgcatttgaacggaatataaatcgcaccacctcatcgtttcgtgttgaatcctttgcgatatgcgtccatcaactacatgtcgagaagcgaggtttgacagcagagtttgtggaaaaaggcgacgggactatatccgctcccgcgacccgggatgactggcagtgtgatgtcgtatttagccttattttgaacaccaactttgctcaacatattgaccaagatacgttagttacatcactaccaaagcgattggctcggggttcagcaaaaattgcgattgatgactttaaacatatcaactcattctcgacattagaaacagcgatcgaatctctgccaatagaagctggtaggtggttatcactttacgcacagtcaaacaataatctaagtgatctattagcagccatgacagaggaccatcagctcatggcaagctgcgtcggttaccacttgttagaagagcccaaagataaaccaaactccctcagaggttacaaacacgctatcgccgagtgcatcattggactcattaactcaatcacctttagctcagagactgatcccaacacaatcttttggtcgctaaagaactatcaaaactacctagtggtacagccaaggagtatcaacgatgaaactaccgacaaatctagcctatgaataaaggagactgactgtgaaatggtattataagacaatcacctttctgccagagttgtgcaacaacgagtcactggctgcaaagtgtctccgcgttctgcatggatttaactatcagtatgagacacgaaatatcggcgtttcatttccgctttggtgtgatgcaacggttggaaaaaagatttcatttgtcagcaagaacaagatagaactcgacttactacttaaacaacactatttcgtccaaatggaacaacttcaatactttcatatatccaacactgttctcgtcccagaagattgtacatacgtttcctttagacgctgtcaatctatagataagctcacagcagcagggctggcaaggaaaatcagacgcctggagaaacgtgctctatctagaggcgagcaatttgacccatcatcttttgctcaaaaagagcatactgcaatagcgcactaccactcacttggggagtccagcaaacagacgaaccgcaactttcgactcaatatcaggatgctctcggagcaaccccgtgaggggaactcgatttttagtagctatggcttatcaaattcagaaaactcgtttcagcctgtacccttaatctgacctaggctgctgccaccgctgagcaataactagcataaccccttggggcctctaaacgggtcttgaggggttttttgctgaaacctcaggcatttgagaagcacacggtcacactgcttccggtagtcaataaaccggtaaaccagcaatagacataagcggctatttaacgaccctgccctgaaccgacgaccgggtcatcgtggccggatcttgcggcccctcggcttgaacgaattgttagacattatttgccgactaccttggtgatctcgcctttcacgtagtggacaaattcttccaactgatctgcgcgcgaggccaagcgatcttcttcttgtccaagataagcctgtctagcttcaagtatgacgggctgatactgggccggcaggcgctccattgcccagtcggcagcgacatccttcggcgcgattttgccggttactgcgctgtaccaaatgcgggacaacgtaagcactacatttcgctcatcgccagcccagtcgggcggcgagttccatagcgttaaggtttcatttagcgcctcaaatagatcctgttcaggaaccggatcaaagagttcctccgccgctggacctaccaaggcaacgctatgttctcttgcttttgtcagcaagatagccagatcaatgtcgatcgtggctggctcgaagatacctgcaagaatgtcattgcgctgccattctccaaattgcagttcgcgcttagctggataacgccacggaatgatgtcgtcgtgcacaacaatggtgacttctacagcgcggagaatctcgctctctccaggggaagccgaagtttccaaaaggtcgttgatcaaagctcgccgcgttgtttcatcaagccttacggtcaccgtaaccagcaaatcaatatcactgtgtggcttcaggccgccatccactgcggagccgtacaaatgtacggccagcaacgtcggttcgagatggcgctcgatgacgccaactacctctgatagttgagtcgatacttcggcgatcaccgcttccctcatactcttcctttttcaatattattgaagcatttatcagggttattgtctcatgagcggatacatatttgaatgtatttagaaaaataaacaaatagctagctcactcggtcgctacgctccgggcgtgagactgcggcgggcgctgcggacacatacaaagttacccacagattccgtggataagcaggggactaacatgtgaggcaaaacagcagggccgcgccggtggcgtttttccataggctccgccctcctgccagagttcacataaacagacgcttttccggtgcatctgtgggagccgtgaggctcaaccatgaatctgacagtacgggcgaaacccgacaggacttaaagatccccaccgtttccggcgggtcgctccctcttgcgctctcctgttccgaccctgccgtttaccggatacctgttccgcctttctcccttacgggaagtgtggcgctttctcatagctcacacactggtatctcggctcggtgtaggtcgttcgctccaagctgggctgtaagcaagaactccccgttcagcccgactgctgcgccttatccggtaactgttcacttgagtccaacccggaaaagcacggtaaaacgccactggcagcagccattggtaactgggagttcgcagaggatttgtttagctaaacacgcggttgctcttgaagtgtgcgccaaagtccggctacactggaaggacagatttggttgctgtgctctgcgaaagccagttaccacggttaagcagttccccaactgacttaaccttcgatcaaaccacctccccaggtggttttttcgtttacagggcaaaagattacgcgcagaaaaaaaggatctcaagaagatcctttgatcttttctactgaaccgctctagatttcagtgcaatttatctcttcaaatgtagcacctgaagtcagccccatacgatataagttgtaattctcatgttagtcatgccccgcgcccaccggaaggagctgactgggttgaaggctctcaagggcatcggtcgagatcccggtgcctaatgagtgagctaacttacattaattgcgttgcgctcactgcccgctttccagtcgggaaacctgtcgtgccagctgcattaatgaatcggccaacgcgcggggagaggcggtttgcgtattgggcgccagggtggtttttcttttcaccagtgagacgggcaacagctgattgcccttcaccgcctggccctgagagagttgcagcaagcggtccacgctggtttgccccagcaggcgaaaatcctgtttgatggtggttaacggcgggatataacatgagctgtcttcggtatcgtcgtatcccactaccgagatgtccgcaccaacgcgcagcccggactcggtaatggcgcgcattgcgcccagcgccatctgatcgttggcaaccagcatcgcagtgggaacgatgccctcattcagcatttgcatggtttgttgaaaaccggacatggcactccagtcgccttcccgttccgctatcggctgaatttgattgcgagtgagatatttatgccagccagccagacgcagacgcgccgagacagaacttaatgggcccgctaacagcgcgatttgctggtgacccaatgcgaccagatgctccacgcccagtcgcgtaccgtcttcatgggagaaaataatactgttgatgggtgtctggtcagagacatcaagaaataacgccggaacattagtgcaggcagcttccacagcaatggcatcctggtcatccagcggatagttaatgatcagcccactgacgcgttgcgcgagaagattgtgcaccgccgctttacaggcttcgacgccgcttcgttctaccatcgacaccaccacgctggcacccagttgatcggcgcgagatttaatcgccgcgacaatttgcgacggcgcgtgcagggccagactggaggtggcaacgccaatcagcaacgactgtttgcccgccagttgttgtgccacgcggttgggaatgtaattcagctccgccatcgccgcttccactttttcccgcgttttcgcagaaacgtggctggcctggttcaccacgcgggaaacggtctgataagagacaccggcatactctgcgacatcgtataacgttactggtttcac

SEQ ID NO: 21 - DNA, 7843 bp, Synthetic construct
  source 1..7843: mol_type = other DNA
attcaccaccctgaattgactctcttccgggcgctatcatgccataccgcgaaaggttttgcgccattcgatggtgtccgggatctcgacgctctcccttatgcgactcctgcattaggaaattaatacgactcactataggggaattgtgagcggataacaattcccctgtagaaataattttgtttaactttaataaggagatataccatgggtgaactgccgagtaggtagctgataacagtacagcgcggctgaaatcatcattaaagcggtgaactgccgagtaggtagctgataacggatccgaattcgagctcggcgcgcctgcaggtcgacaagcttgcggccgcataatgcttaagtcgaacagaaagtaatcgtattgtacacggccgcataatcgaaattaatacgactcactataggggaattgtgagcggataacaattccccatcttagtatattagttaagtataagaaggagatatacatatgtttttgcaaagacctaaaccttacagcgatgaaagtttagaaagtttctttatccgagtggctaacaaaaatggctacggtgatgtccatcgcttcctagaagccactaaacgattccttcaagacattgaccataatggctatcaaacctttccgactgatataactcggataaacccatactcagctaaaaacagttccagcgcacgaactgcgtcattcctgaaacttgcacaattgacatttaatgaaccgccagagctacttgggttggcaattaacagaacaaacatgaaatactcgccgtcaactagcgcggttgttagaggtgcagaagtctttcctcgcagtttactacggacgcactccatcccctgctgtcctttgtgtctgcgagaaaatggctacgcctcctacctttggcactttcaggggtacgaatactgccacagccataacgtacctttaattaccacttgtagctgtggtaaggagtttgactaccgagtatctgggttaaagggcatttgctgcaaatgcaaggagcctatcaccttaaccagcagggagaacggtcatgaggcagcgtgtactgtttcaaactggcttgctggccatgaatctaaacctctgccaaatcttcctaaaagctaccgatggggtttagttcattggtggatgggtattaaagatagcgagttcgatcacttttcgttcgttcaatttttctcaaactggccaaggtcattccactcgataatcgaagatgaagtagagttcaaccttgagcatgctgttgtcagcacgtctgaattacgactaaaagatcttcttggtcgattgtttttcggttcaattcggttacctgagcggaatcttcaacacaatatcatccttggtgagcttctctgctatttagaaaatcgtttatggcaagacaagggattaatcgccaacctcaaaatgaacgcgttagaggcgactgtaatgttaaattgtagcctcgatcagattgcatcaatggttgaacaacgcatcttgaagccaaatcgaaaaagcaagcccaacagccctcttgatgttaccgattatctatttcatttcggcgatattttctgtctttggttagctgagttccaaagcgatgagtttaaccgttcgttttatgtgtcgaggtggtaaatgcaaactctgaaagaactaatcgcatccaatcctgacgacttaacaactgaacttaagagagcatttcgtccactcacaccgcatattgcaattgatggtaatgaacttgacgcactgacgatattagtcaatttaaccgataagactgatgatcagaaagacctgctcgatcgagccaaatgcaagcaaaaacttcgagatgaaaaatggtgggctagctgcataaattgcgttaattacagacaaagccataacccaaaattcccggatatacgttctgaaggcgtgattcgaacccaagccctgggtgaattaccgagtttcctactctcgtcctcaaaaatcccaccataccattggtcatatagccatgattcaaaatacgtcaacaaaagcgcattcctcaccaatgagttttgttgggatggtgagatctcatgtttgggtgagcttcttaaagatgcagatcacccactttggaatactttgaaaaagttaggttgttctcaaaaaacttgcaaagcaatggcaaaacaactagctgatattactctcacgactatcaatgtcacactcgcaccaaattacctgactcaaatatctctccccgatagtgatacatcctacatttcactctctcctgttgcatcgctatcgatgcaaagccactttcatcagaggctccaagatgaaaatcggcatagcgcgataacgcggtttagccgaactaccaacatgggggtcactgcgatgacatgtggcggcgcatttagaatgttaaagtctggcgctaagttttccagcccccctcatcaccgattaaacagtaaacgaagttggttgacgtcagagcatgttcagtcattaaaacagtaccagcgcctcaacaaaagcctcatacctgaaaactctcggattgcactccgtagaaaatacaaaatcgagcttcaaaatatggtcagatcttggtttgcaatgcaagaccatacccttgattcgaacatacttatccaacatttgaatcatgacctatcttacttaggagccacaaaacgttttgcatacgatccagcgatgaccaagctctttactgagcttttgaaacgagagttatcaaattcaatcaataatggtgagcaacacactaatggatcgtttttagtcctaccgaatatcagggtttgtggcgcaacagctttaagctccccggtaacggtggggattccatcacttacagctttctttggcttcgttcacgcatttgaacggaatataaatcgcaccacctcatcgtttcgtgttgaatcctttgcgatatgcgtccatcaactacatgtcgagaagcgaggtttgacagcagagtttgtggaaaaaggcgacgggactatatccgctcccgcgacccgggatgactggcagtgtgatgtcgtatttagccttattttgaacaccaactttgctcaacatattgaccaagatacgttagttacatcactaccaaagcgattggctcggggttcagcaaaaattgcgattgatgactttaaacatatcaactcattctcgacattagaaacagcgatcgaatctctgccaatagaagctggtaggtggttatcactttacgcacagtcaaacaataatctaagtgatctattagcagccatgacagaggaccatcagctcatggcaagctgcgtcggttaccacttgttagaagagcccaaagataaaccaaactccctcagaggttacaaacacgctatcgccgagtgcatcattggactcattaactcaatcacctttagctcagagactgatcccaacacaatcttttggtcgctaaagaactatcaaaactacctagtggtacagccaaggagtatcaacgatgaaactaccgacaaatctagcctatgagcgctctatcgacccatcagatgtctgtttttttgtcgtctggcccgatgatagaaaaacacctttaacctacaattctcgtactctgctcgggcaaatggaagcggcatcattagcctatgatgtctcaggtcaaccaataaaaagtgccaccgctgaggcgttagctcaagggaaccctcatcaagttgatttctgccacgttccatacggtgcgagtcatattgaatgcagtttctccgtctcgttttcttctgaactacgtcaaccatataagtgtaactcaagcaaagttaaacaaacgctagtgcaattagtcgagctctacgaaacgaaaatcggctggactgagctagcaacccgatatttgatgaacatttgcaacggtaaatggctgtggaaaaatacccgtaaagcctattgctggaacattgtacttacaccttggccttggaacggggaaaaggttggatttgaagatattcgtactaactacacctcacggcaagactttaaaaataataaaaattggtctgctatagttgaaatgatcaaaaccgcattttctagtactgatgggctggcgatatttgaagtcagggccaccttgcacttgccaacgaatgctatggtgcggccaagccaagttttcacagaaaaagaaagtggcagtaaaagtaaatctaaaactcaaaacagtcgagtttttcagagtacaactattgatggtgaacgatcgccaatactaggggcctttaaaacgggagcagctattgcaaccattgacgactggtatcctgaagccactgagccactaagggtcggacggtttggggttcatcgcgaagatgtcacttgctaccgtcatccgtctaccggaaaagattttttctcgatattacaacaagcagagcactatattgaagtgttgagcgccaacaaaactcccgctcaagaaactatcaacgacatgcactttttaatggctaacctgattaagggtgggatgttccagcataaaggagactgacctaggctgctgccaccgctgagcaataactagcataaccccttggggcctctaaacgggtcttgaggggttttttgctgaaacctcaggcatttgagaagcacacggtcacactgcttccggtagtcaataaaccggtaaaccagcaatagacataagcggctatttaacgaccctgccctgaaccgacgaccgggtcatcgtggccggatcttgcggcccctcggcttgaacgaattgttagacattatttgccgactaccttggtgatctcgcctttcacgtagtggacaaattcttccaactgatctgcgcgcgaggccaagcgatcttcttcttgtccaagataagcctgtctagcttcaagtatgacgggctgatactgggccggcaggcgctccattgcccagtcggcagcgacatccttcggcgcgattttgccggttactgcgctgtaccaaatgcgggacaacgtaagcactacatttcgctcatcgccagcccagtcgggcggcgagttccatagcgttaaggtttcatttagcgcctcaaatagatcctgttcaggaaccggatcaaagagttcctccgccgctggacctaccaaggcaacgctatgttctcttgcttttgtcagcaagatagccagatcaatgtcgatcgtggctggctcgaagatacctgcaagaatgtcattgcgctgccattctccaaattgcagttcgcgcttagctggataacgccacggaatgatgtcgtcgtgcacaacaatggtgacttctacagcgcggagaatctcgctctctccaggggaagccgaagtttccaaaaggtcgttgatcaaagctcgccgcgttgtttcatcaagccttacggtcaccgtaaccagcaaatcaatatcactgtgtggcttcaggccgccatccactgcggagccgtacaaatgtacggccagcaacgtcggttcgagatggcgctcgatgacgccaactacctctgatagttgagtcgatacttcggcgatcaccgcttccctcatactcttcctttttcaatattattgaagcatttatcagggttattgtctcatgagcggatacatatttgaatgtatttagaaaaataaacaaatagctagctcactcggtcgctacgctccgggcgtgagactgcggcgggcgctgcggacacatacaaagttacccacagattccgtggataagcaggggactaacatgtgaggcaaaacagcagggccgcgccggtggcgtttttccataggctccgccctcctgccagagttcacataaacagacgcttttccggtgcatctgtgggagccgtgaggctcaaccatgaatctgacagtacgggcgaaacccgacaggacttaaagatccccaccgtttccggcgggtcgctccctcttgcgctctcctgttccgaccctgccgtttaccggatacctgttccgcctttctcccttacgggaagtgtggcgctttctcatagctcacacactggtatctcggctcggtgtaggtcgttcgctccaagctgggctgtaagcaagaactccccgttcagcccgactgctgcgccttatccggtaactgttcacttgagtccaacccggaaaagcacggtaaaacgccactggcagcagccattggtaactgggagttcgcagaggatttgtttagctaaacacgcggttgctcttgaagtgtgcgccaaagtccggctacactggaaggacagatttggttgctgtgctctgcgaaagccagttaccacggttaagcagttccccaactgacttaaccttcgatcaaaccacctccccaggtggttttttcgtttacagggcaaaagattacgcgcagaaaaaaaggatctcaagaagatcctttgatcttttctactgaaccgctctagatttcagtgcaatttatctcttcaaatgtagcacctgaagtcagccccatacgatataagttgtaattctcatgttagtcatgccccgcgcccaccggaaggagctgactgggttgaaggctctcaagggcatcggtcgagatcccggtgcctaatgagtgagctaacttacattaattgcgttgcgctcactgcccgctttccagtcgggaaacctgtcgtgccagctgcattaatgaatcggccaacgcgcggggagaggcggtttgcgtattgggcgccagggtggtttttcttttcaccagtgagacgggcaacagctgattgcccttcaccgcctggccctgagagagttgcagcaagcggtccacgctggtttgccccagcaggcgaaaatcctgtttgatggtggttaacggcgggatataacatgagctgtcttcggtatcgtcgtatcccactaccgagatgtccgcaccaacgcgcagcccggactcggtaatggcgcgcattgcgcccagcgccatctgatcgttggcaaccagcatcgcagtgggaacgatgccctcattcagcatttgcatggtttgttgaaaaccggacatggcactccagtcgccttcccgttccgctatcggctgaatttgattgcgagtgagatatttatgccagccagccagacgcagacgcgccgagacagaacttaatgggcccgctaacagcgcgatttgctggtgacccaatgcgaccagatgctccacgcccagtcgcgtaccgtcttcatgggagaaaataatactgttgatgggtgtctggtcagagacatcaagaaataacgccggaacattagtgcaggcagcttccacagcaatggcatcctggtcatccagcggatagttaatgatcagcccactgacgcgttgcgcgagaagattgtgcaccgccgctttacaggcttcgacgccgcttcgttctaccatcgacaccaccacgctggcacccagttgatcggcgcgagatttaatcgccgcgacaatttgcgacggcgcgtgcagggccagactggaggtggcaacgccaatcagcaacgactgtttgcccgccagttgttgtgccacgcggttgggaatgtaattcagctccgccatcgccgcttccactttttcccgcgttttcgcagaaacgtggctggcctggttcaccacgcgggaaacggtctgataagagacaccggcatactctgcgacatcgtataacgttactggtttcac

SEQ ID NO: 22 - DNA, 6858 bp, Synthetic construct
  source 1..6858: mol_type = other DNA
tttctaaatacattcaaatatgtatccgctcatgaattaattcttagaaaaactcatcgagcatcaaatgaaactgcaatttattcatatcaggattatcaataccatatttttgaaaaagccgtttctgtaatgaaggagaaaactcaccgaggcagttccataggatggcaagatcctggtatcggtctgcgattccgactcgtccaacatcaatacaacctattaatttcccctcgtcaaaaataaggttatcaagtgagaaatcaccatgagtgacgactgaatccggtgagaatggcaaaagtttatgcatttctttccagacttgttcaacaggccagccattacgctcgtcatcaaaatcactcgcatcaaccaaaccgttattcattcgtgattgcgcctgagcgagacgaaatacgcggtcgctgttaaaaggacaattacaaacaggaatcgaatgcaaccggcgcaggaacactgccagcgcatcaacaatattttcacctgaatcaggatattcttctaatacctggaatgctgttttcccggggatcgcagtggtgagtaaccatgcatcatcaggagtacggataaaatgcttgatggtcggaagaggcataaattccgtcagccagtttagtctgaccatctcatctgtaacatcattggcaacgctacctttgccatgtttcagaaacaactctggcgcatcgggcttcccatacaatcgatagattgtcgcacctgattgcccgacattatcgcgagcccatttatacccatataaatcagcatccatgttggaatttaatcgcggcctagagcaagacgtttcccgttgaatatggctcatactcttcctttttcaatattattgaagcatttatcagggttattgtctcatgagcggatacatatttgaatgtatttagaaaaataaacaaataggcatgctagcgcagaaacgtcctagaagatgccaggaggatacttagcagagagacaataaggccggagcgaagccgtttttccataggctccgcccccctgacgaacatcacgaaatctgacgctcaaatcagtggtggcgaaacccgacaggactataaagataccaggcgtttccccctgatggctccctcttgcgctctcctgttcccgtcctgcggcgtccgtgttgtggtggaggctttacccaaatcaccacgtcccgttccgtgtagacagttcgctccaagctgggctgtgtgcaagaaccccccgttcagcccgactgctgcgccttatccggtaactatcatcttgagtccaacccggaaagacacgacaaaacgccactggcagcagccattggtaactgagaattagtggatttagatatcgagagtcttgaagtggtggcctaacagaggctacactgaaaggacagtatttggtatctgcgctccactaaagccagttaccaggttaagcagttccccaactgacttaaccttcgatcaaaccgcctccccaggcggttttttcgtttacagagcaggagattacgacgatcgtaaaaggatctcaagaagatcctttacggattcccgacaccatcactctagatttcagtgcaatttatctcttcaaatgtagcacctgaagtcagccccatacgatataagttgtaattctcatgttagtcatgccccgcgcccaccggaaggagctgactgggttgaaggctctcaagggcatcggtcgagatcccggtgcctaatgagtgagctaacttacattaattgcgttgcgctcactgcccgctttccagtcgggaaacctgtcgtgccagctgcattaatgaatcggccaacgcgcggggagaggcggtttgcgtattgggcgccagggtggtttttcttttcaccagtgagacgggcaacagctgattgcccttcaccgcctggccctgagagagttgcagcaagcggtccacgctggtttgccccagcaggcgaaaatcctgtttgatggtggttaacggcgggatataacatgagctgtcttcggtatcgtcgtatcccactaccgagatgtccgcaccaacgcgcagcccggactcggtaatggcgcgcattgcgcccagcgccatctgatcgttggcaaccagcatcgcagtgggaacgatgccctcattcagcatttgcatggtttgttgaaaaccggacatggcactccagtcgccttcccgttccgctatcggctgaatttgattgcgagtgagatatttatgccagccagccagacgcagacgcgccgagacagaacttaatgggcccgctaacagcgcgatttgctggtgacccaatgcgaccagatgctccacgcccagtcgcgtaccgtcttcatgggagaaaataatactgttgatgggtgtctggtcagagacatcaagaaataacgccggaacattagtgcaggcagcttccacagcaatggcatcctggtcatccagcggatagttaatgatcagcccactgacgcgttgcgcgagaagattgtgcaccgccgctttacaggcttcgacgccgcttcgttctaccatcgacaccaccacgctggcacccagttgatcggcgcgagatttaatcgccgcgacaatttgcgacggcgcgtgcagggccagactggaggtggcaacgccaatcagcaacgactgtttgcccgccagttgttgtgccacgcggttgggaatgtaattcagctccgccatcgccgcttccactttttcccgcgttttcgcagaaacgtggctggcctggttcaccacgcgggaaacggtctgataagagacaccggcatactctgcgacatcgtataacgttactggtttcacattcaccaccctgaattgactctcttccgggcgctatcatgccataccgcgaaaggttttgcgccattcgatggtgtccgggatctcgacgctctcccttatgcgactcctgcattaggaaattaatacgactcactataggggaattgtgagcggataacaattcccctgtagaaataattttgtttaactttaataaggagatataccatggcgacaagtttacctacgccctcagcaattacgacttcggcgttagagtatgcattccatactcccgctcgcaatctaacgaaatctcgcggaaaaaacattcatcgttatgtcagtgtaaagatgagtaagaggattacggtagaatctactctagagtgtgatgcctgctatcactttgattttgagccaagtattgttcgcttttgcgctcaaccgattcgatttttatattatctcaatggtcagtctcactcctatgttcctgcctttctagttcaatttgataccaacgagtttgttctatatgaagtaaagtcagcttatgctaagaacaaacctgattttgatgttgaatgggaggcgaaagtaaaagcagcaactgaactagggctagaattggagcttgttgaagagagtgatattagggatacggttgtattaaataatcttaagcgcatgcatcgttatgcttcgaaagatgagctgaataacgtacataactctctcttaaaaataataaagtacaatggcgcccaatctgcaagatgcttgggagaacagttgggtttaaaaggccgaactgttttaccaattttgtgcgatttgctgtcaaggtgtttactcgatacacgtttggataagcctctatctcttgaatctcgatttgagttggccagttatggctaagaaagggttctcaagtttccatagaaaagcagtctcttcccaagatacgcttgaatcgatagagcttgtctctagcgctaattgtctagaaagtgttacgtatcaagatatatcagcatttcccgaaacaattgcggtagagattaatttccgattaagcattcttcgctttttagcgcgaaagtgcgaaaccattgtggccaaatcaattgaaccacatcgtgtagagctacagcaaaactatagtagaaaaatacccagtgcaataacgatatatcgatggtggcttgcttttcgaaaatcagactacaaccccattagcttagcacctaatatcaaggatagaggtaatagagagacaaaagtgtcaacagttgttgattctattatggaacaggcagttgaaagagttatatctggacgaaaagtcaatgttagctctgcatataaacgtgttcgacgaaaagttcgtcaatacaatctaactcatggaacgaaatacacgtatcctaagtacgaatctgtaagaaagcgagtaaaaaagaaaaccccatttgagttattagccgcagggaaaggggagagagtagctaagagagagtttcgccgaatgggaaaaaagatcctcacgtctagcgtgctagagagggttgaaatagatcacactgtcgttgacctttttgcagtacacgaagagtatcgaatcccattgggccgaccttggcttactcaattggttgattgttacagtaaagctgtaatcggtttttatttaggtttcgagcctcctagctatgtgtcggtttcccttgcacttaagaatgcaatacaacgcaaagatgacttaatctcctcgtatgaatcgatcgagaatgaatggctatgttatggcatcccagacctactcgtaactgataatggtaaagagtttttgtcgaaagcatttgatcaagcatgtgaatcactattgatcaatgtgcatcaaaataaagttgagacgcccgacaacaaacctcatgttgaacgtaactacgggactattaatacttctctgttagacgatttacctgggaaatccttcagccagtaccttcaaagagaagggtacgactctgtgggagaagctacccttacactcaatgagattagagaaatttacttaatttggttggtggatatttatcataaaaaacccaatcagagaggcactaattgtcctaatgttgcgtggaaaaagggttgtcaagaatgggaaccagaggagttctctggttctaaagacgaattagactttaaatttgctattgttgattacaaacaacttactaaagtagggataactgtctacaaagaactgagttatagcaatgaccgtttagctgaatatagagggaagaaaggaaaccataaagttcagttcaagtataaccctgagtgtatggcagttatttgggtgttggatgaggatatgaatgagtactttacagttaatgcgattgactacgaatatgcaagtagagtatcactttggcaacataaatataacatgaaatatcaagcagaactaaattcagcagaatatgatgaggacaaggaaattgatgcagaaataaaaattgaagaaatcgcagatcgttcaattgttaagactaacaaaatcagagctcggaggcgtggcgctaggcatcaagagaatagcgcaagggctaagtcaatcagtaatgcgaacccggcctcgatacaaaaacatgaagatgaaatcgttagtgcagataatgacgattgggatattgattatgtctgagaaatcgtcaaatgagtgaaacgcgtgaggctcgtatatcaagagctaaaagggcatttgtatccacaccgagcgttaggaaaatcttgagttacatggatagatgtagagatctatcagacctagagtctgagcctacatgcatgatggtctatggtgcttcgggtgtaggtaaaacgaccgtcatcaagaaatacttaaatcaaaacagaagagagtccgaagccgggggcgatataataccggttttgcatattgagttgccagacaatgcgaagccagtagatgcagcaagggaattgctggttgaaatgggtgacccgctagcactttatgaaactgacttagctagattgacgaaaagactgactgaattaatccctgcggtcggcgtgaagctgattattatcgatgagttccaacatttggtggaagaaaggtcaaatcgggttcttacccaagtaggtaattggctaaaaatgatacttaacaaaacgaaatgtccaattgttatatttggtatgccatactcaaaagttgtactgcaagcaaactcgcaacttcacgggcgattttccattcaggttgaactgcgcccctttagctaccagggaggtagaggtgtatttaaaacttttttggaataccttgataaagccctaccttttgaaaaacaggctggcttagccaacgaaagtttgcagaaaaaattgtatgcattctctcagggaaacatgcgttcgttgagaaaccttatttatcaagcatctatcgaagcaattgataatcagcatgagacgataaccgaagaagatttcgtttttgcatcgaagttgacatcgggcgataaacccaactcatggaaaaatccttttgaggagggtgttgaggtaacagaagatatgttacgaccgccaccaaaagatattggttgggaggactatttgagacattcaaccccgagagtgagtaaaccaggtagaaataaaaactttttcgaataacctaggctgctgccaccgctgagcaataactagcataaccccttggggcctctaaacgggtcttgaggggttttttgctgaaacctcaggcatttgagaagcacacggtcacactgcttccggtagtcaataaaccggtaaaccagcaatagacataagcggctatttaacgaccctgccctgaaccgacgacaagctgacgaccgggtctccgcaagtggcacttttcggggaaatgtgcgcggaacccctatttgtttatt

SEQ ID NO: 23 - DNA, 6858 bp, Synthetic construct
  source 1..6858: mol_type = other DNA
agttcgctccaagctgggctgtgtgcaagaaccccccgttcagcccgactgctgcgccttatccggtaactatcatcttgagtccaacccggaaagacacgacaaaacgccactggcagcagccattggtaactgagaattagtggatttagatatcgagagtcttgaagtggtggcctaacagaggctacactgaaaggacagtatttggtatctgcgctccactaaagccagttaccaggttaagcagttccccaactgacttaaccttcgatcaaaccgcctccccaggcggttttttcgtttacagagcaggagattacgacgatcgtaaaaggatctcaagaagatcctttacggattcccgacaccatcactctagatttcagtgcaatttatctcttcaaatgtagcacctgaagtcagccccatacgatataagttgtaattctcatgttagtcatgccccgcgcccaccggaaggagctgactgggttgaaggctctcaagggcatcggtcgagatcccggtgcctaatgagtgagctaacttacattaattgcgttgcgctcactgcccgctttccagtcgggaaacctgtcgtgccagctgcattaatgaatcggccaacgcgcggggagaggcggtttgcgtattgggcgccagggtggtttttcttttcaccagtgagacgggcaacagctgattgcccttcaccgcctggccctgagagagttgcagcaagcggtccacgctggtttgccccagcaggcgaaaatcctgtttgatggtggttaacggcgggatataacatgagctgtcttcggtatcgtcgtatcccactaccgagatgtccgcaccaacgcgcagcccggactcggtaatggcgcgcattgcgcccagcgccatctgatcgttggcaaccagcatcgcagtgggaacgatgccctcattcagcatttgcatggtttgttgaaaaccggacatggcactccagtcgccttcccgttccgctatcggctgaatttgattgcgagtgagatatttatgccagccagccagacgcagacgcgccgagacagaacttaatgggcccgctaacagcgcgatttgctggtgacccaatgcgaccagatgctccacgcccagtcgcgtaccgtcttcatgggagaaaataatactgttgatgggtgtctggtcagagacatcaagaaataacgccggaacattagtgcaggcagcttccacagcaatggcatcctggtcatccagcggatagttaatgatcagcccactgacgcgttgcgcgagaagattgtgcaccgccgctttacaggcttcgacgccgcttcgttctaccatcgacaccaccacgctggcacccagttgatcggcgcgagatttaatcgccgcgacaatttgcgacggcgcgtgcagggccagactggaggtggcaacgccaatcagcaacgactgtttgcccgccagttgttgtgccacgcggttgggaatgtaattcagctccgccatcgccgcttccactttttcccgcgttttcgcagaaacgtggctggcctggttcaccacgcgggaaacggtctgataagagacaccggcatactctgcgacatcgtataacgttactggtttcacattcaccaccctgaattgactctcttccgggcgctatcatgccataccgcgaaaggttttgcgccattcgatggtgtccgggatctcgacgctctcccttatgcgactcctgcattaggaaattaatacgactcactataggggaattgtgagcggataacaattcccctgtagaaataattttgtttaactttaataaggagatataccatggcgacaagtttacctacgccctcagcaattacgacttcggcgttagagtatgcattccatactcccgctcgcaatctaacgaaatctcgcggaaaaaacattcatcgttatgtcagtgtaaagatgagtaagaggattacggtagaatctactctagagtgtgatgcctgctatcactttgattttgagccaagtattgttcgcttttgcgctcaaccgattcgatttttatattatctcaatggtcagtctcactcctatgttcctgactttctagttcaatttgataccaacgagtttgttctatatgaagtaaagtcagcttatgctaagaacaaacctgattttgatgttgaatgggaggcgaaagtaaaagcagcaactgaactagggctagaattggagcttgttgaagagagtgatattagggatacggttgtattaaataatcttaagcgcatgcatcgttatgcttcgaaagatgagctgaataacgtacataactctctcttaaaaataataaagtacaatggcgcccaatctgcaagatgcttgggagaacagttgggtttaaaaggccgaactgttttaccaattttgtgcgatttgctgtcaaggtgtttactcgatacacgtttggataagcctctatctcttgaatctcgatttgagttggccagttatggctaagaaagggttctcaagtttccatagaaaagcagtctcttcccaagatacgcttgaatcgatagagcttgtctctagcgctaattgtctagaaagtgttacgtatcaagatatatcagcatttcccgaaacaattgcggtagagattaatttccgattaagcattcttcgctttttagcgcgaaagtgcgaaaccattgtggccaaatcaattgaaccacatcgtgtagagctacagcaaaactatagtagaaaaatacccagtgcaataacgatatatcgatggtggcttgcttttcgaaaatcagactacaaccccattagcttagcacctaatatcaaggatagaggtaatagagagacaaaagtgtcaacagttgttgattctattatggaacaggcagttgaaagagttatatctggacgaaaagtcaatgttagctctgcatataaacgtgttcgacgaaaagttcgtcaatacaatctaactcatggaacgaaatacacgtatcctaagtacgaatctgtaagaaagcgagtaaaaaagaaaaccccatttgagttattagccgcagggaaaggggagagagtagctaagagagagtttcgccgaatgggaaaaaagatcctcacgtctagcgtgctagagagggttgaaataaatcacactgtcgttgacctttttgcagtacacgaagagtatcgaatcccattgggccgaccttggcttactcaattggttgattgttacagtaaagctgtaatcggtttttatttaggtttcgagcctcctagctatgtgtcggtttcccttgcacttaagaatgcaatacaacgcaaagatgacttaatctcctcgtatgaatcgatcgagaatgaatggctatgttatggcatcccagacctactcgtaactgataatggtaaagagtttttgtcgaaagcatttgatcaagcatgtgaatcactattgatcaatgtgcatcaaaataaagttgagacgcccgacaacaaacctcatgttgaacgtaactacgggactattaatacttctctgttagacgatttacctgggaaatccttcagccagtaccttcaaagagaagggtacgactctgtgggagaagctacccttacactcaatgagattagagaaatttacttaatttggttggtggatatttatcataaaaaacccaatcagagaggcactaattgtcctaatgttgcgtggaaaaagggttgtcaagaatgggaaccagaggagttctctggttctaaagacgaattagactttaaatttgctattgttgattacaaacaacttactaaagtagggataactgtctacaaagaactgagttatagcaatgaccgtttagctgaatatagagggaagaaaggaaaccataaagttcagttcaagtataaccctgagtgtatggcagttatttgggtgttggatgaggatatgaatgagtactttacagttaatgcgattgactacgaatatgcaagtagagtatcactttggcaacataaatataacatgaaatatcaagcagaactaaattcagcagaatatgatgaggacaaggaaattgatgcagaaataaaaattgaagaaatcgcagatcgttcaattgttaagactaacaaaatcagagctcggaggcgtggcgctaggcatcaagagaatagcgcaagggctaagtcaatcagtaatgcgaacccggcctcgatacaaaaacatgaagatgaaatcgttagtgcagataatgacgattgggatattgattatgtctgagaaatcgtcaaatgagtgaaacgcgtgaggctcgtatatcaagagctaaaagggcatttgtatccacaccgagcgttaggaaaatcttgagttacatggatagatgtagagatctatcagacctagagtctgagcctacatgcatgatggtctatggtgcttcgggtgtaggtaaaacgaccgtcatcaagaaatacttaaatcaaaacagaagagagtccgaagccgggggcgatataataccggttttgcatattgagttgccagacaatgcgaagccagtagatgcagcaagggaattgctggttgaaatgggtgacccgctagcactttatgaaactgacttagctagattgacgaaaagactgactgaattaatccctgcggtcggcgtgaagctgattattatcgatgagttccaacatttggtggaagaaaggtcaaatcgggttcttacccaagtaggtaattggctaaaaatgatacttaacaaaacgaaatgtccaattgttatatttggtatgccatactcaaaagttgtactgcaagcaaactcgcaacttcacgggcgattttccattcaggttgaactgcgcccctttagctaccagggaggtagaggtgtatttaaaacttttttggaataccttgataaagccctaccttttgaaaaacaggctggcttagccaacgaaagtttgcagaaaaaattgtatgcattctctcagggaaacatgcgttcgttgagaaaccttatttatcaagcatctatcgaagcaattgataatcagcatgagacgataaccgaagaagatttcgtttttgcatcgaagttgacatcgggcgataaacccaactcatggaaaaatccttttgaggagggtgttgaggtaacagaagatatgttacgaccgccaccaaaagatattggttgggaggactatttgagacattcaaccccgagagtgagtaaaccaggtagaaataaaaactttttcgaataacctaggctgctgccaccgctgagcaataactagcataaccccttggggcctctaaacgggtcttgaggggttttttgctgaaacctcaggcatttgagaagcacacggtcacactgcttccggtagtcaataaaccggtaaaccagcaatagacataagcggctatttaacgaccctgccctgaaccgacgacaagctgacgaccgggtctccgcaagtggcacttttcggggaaatgtgcgcggaacccctatttgtttatttttctaaatacattcaaatatgtatccgctcatgaattaattcttagaaaaactcatcgagcatcaaatgaaactgcaatttattcatatcaggattatcaataccatatttttgaaaaagccgtttctgtaatgaaggagaaaactcaccgaggcagttccataggatggcaagatcctggtatcggtctgcgattccgactcgtccaacatcaatacaacctattaatttcccctcgtcaaaaataaggttatcaagtgagaaatcaccatgagtgacgactgaatccggtgagaatggcaaaagtttatgcatttctttccagacttgttcaacaggccagccattacgctcgtcatcaaaatcactcgcatcaaccaaaccgttattcattcgtgattgcgcctgagcgagacgaaatacgcggtcgctgttaaaaggacaattacaaacaggaatcgaatgcaaccggcgcaggaacactgccagcgcatcaacaatattttcacctgaatcaggatattcttctaatacctggaatgctgttttcccggggatcgcagtggtgagtaaccatgcatcatcaggagtacggataaaatgcttgatggtcggaagaggcataaattccgtcagccagtttagtctgaccatctcatctgtaacatcattggcaacgctacctttgccatgtttcagaaacaactctggcgcatcgggcttcccatacaatcgatagattgtcgcacctgattgcccgacattatcgcgagcccatttatacccatataaatcagcatccatgttggaatttaatcgcggcctagagcaagacgtttcccgttgaatatggctcatactcttcctttttcaatattattgaagcatttatcagggttattgtctcatgagcggatacatatttgaatgtatttagaaaaataaacaaataggcatgctagcgcagaaacgtcctagaagatgccaggaggatacttagcagagagacaataaggccggagcgaagccgtttttccataggctccgcccccctgacgaacatcacgaaatctgacgctcaaatcagtggtggcgaaacccgacaggactataaagataccaggcgtttccccctgatggctccctcttgcgctctcctgttcccgtcctgcggcgtccgtgttgtggtggaggctttacccaaatcaccacgtcccgttccgtgtagac

SEQ ID NO: 24 - DNA, 6858 bp, Synthetic construct
  source 1..6858: mol_type = other DNA
taatacgactcactataggggaattgtgagcggataacaattcccctgtagaaataattttgtttaactttaataaggagatataccatggcgacaagtttacctacgccctcagcaattacgacttcggcgttagagtatgcattccatactcccgctcgcaatctaacgaaatctcgcggaaaaaacattcatcgttatgtcagtgtaaagatgagtaagaggattacggtagaatctactctagagtgtgatgcctgctatcactttgattttgagccaagtattgttcgcttttgcgctcaaccgattcgatttttatattatctcaatggtcagtctcactcctatgttcctgactttctagttcaatttgataccaacgagtttgttctatatgaagtaaagtcagcttatgctaagaacaaacctgattttgatgttgaatgggaggcgaaagtaaaagcagcaactgaactagggctagaattggagcttgttgaagagagtgatattagggatacggttgtattaaataatcttaagcgcatgcatcgttatgcttcgaaagatgagctgaataacgtacataactctctcttaaaaataataaagtacaatggcgcccaatctgcaagatgcttgggagaacagttgggtttaaaaggccgaactgttttaccaattttgtgcgatttgctgtcaaggtgtttactcgatacacgtttggataagcctctatctcttgaatctcgatttgagttggccagttatggctaagaaagggttctcaagtttccatagaaaagcagtctcttcccaagatacgcttgaatcgatagagcttgtctctagcgctaattgtctagaaagtgttacgtatcaagatatatcagcatttcccgaaacaattgcggtagagattaatttccgattaagcattcttcgctttttagcgcgaaagtgcgaaaccattgtggccaaatcaattgaaccacatcgtgtagagctacagcaaaactatagtagaaaaatacccagtgcaataacgatatatcgatggtggcttgcttttcgaaaatcagactacaaccccattagcttagcacctaatatcaaggatagaggtaatagagagacaaaagtgtcaacagttgttgattctattatggaacaggcagttgaaagagttatatctggacgaaaagtcaatgttagctctgcatataaacgtgttcgacgaaaagttcgtcaatacaatctaactcatggaacgaaatacacgtatcctaagtacgaatctgtaagaaagcgagtaaaaaagaaaaccccatttgagttattagccgcagggaaaggggagagagtagctaagagagagtttcgccgaatgggaaaaaagatcctcacgtctagcgtgctagagagggttgaaatagatcacactgtcgttgacctttttgcagtacacgaagagtatcgaatcccattgggccgaccttggcttactcaattggttgattgttacagtaaagctgtaatcggtttttatttaggtttcgagcctcctagctatgtgtcggtttcccttgcacttaagaatgcaatacaacgcaaagatgacttaatctcctcgtatgaatcgatcgagaatgaatggctatgttatggcatcccagacctactcgtaactgataatggtaaagagtttttgtcgaaagcatttgatcaagcatgtgaatcactattgatcaatgtgcatcaaaataaagttgagacgcccgacaacaaacctcatgttgaacgtaactacgggactattaatacttctctgttagacgatttacctgggaaatccttcagccagtaccttcaaagagaagggtacgactctgtgggagaagctacccttacactcaatgagattagagaaatttacttaatttggttggtggatatttatcataaaaaacccaatcagagaggcactaattgtcctaatgttgcgtggaaaaagggttgtcaagaatgggaaccagaggagttctctggttctaaagacgaattagactttaaatttgctattgttgattacaaacaacttactaaagtagggataactgtctacaaagaactgagttatagcaatgaccgtttagctgaatatagagggaagaaaggaaaccataaagttcagttcaagtataaccctgagtgtatggcagttatttgggtgttggatgaggatatgaatgagtactttacagttaatgcgattgactacgaatatgcaagtagagtatcactttggcaacataaatataacatgaaatatcaagcagaactaaattcagcagaatatgatgaggacaaggaaattgatgcagaaataaaaattgaagaaatcgcagatcgttcaattgttaagactaacaaaatcagagctcggaggcgtggcgctaggcatcaagagaatagcgcaagggctaagtcaatcagtaatgcgaacccggcctcgatacaaaaacatgaagatgaaatcgttagtgcagataatgacgattgggatattgattatgtctgagaaatcgtcaaatgagtgaaacgcgtgaggctcgtatatcaagagctaaaagggcatttgtatccacaccgagcgttaggaaaatcttgagttacatggatagatgtagagatctatcagacctagagtctgagcctacatgcatgatggtctatggtgcttcgggtgtaggtaaaacgaccgtcatcaagaaatacttaaatcaaaacagaagagagtccgaagccgggggcgatataataccggttttgcatattgagttgccagacaatgcgaagccagtagatgcagcaagggaattgctggttgaaatgggtgacccgctagcactttatgaaactgacttagctagattgacgaaaagactgactgaattaatccctgcggtcggcgtgaagctgattattatcgatgcgttccaacatttggtggaagaaaggtcaaatcgggttcttacccaagtaggtaattggctaaaaatgatacttaacaaaacgaaatgtccaattgttatatttggtatgccatactcaaaagttgtactgcaagcaaactcgcaacttcacgggcgattttccattcaggttgaactgcgcccctttagctaccagggaggtagaggtgtatttaaaacttttttggaataccttgataaagccctaccttttgaaaaacaggctggcttagccaacgaaagtttgcagaaaaaattgtatgcattctctcagggaaacatgcgttcgttgagaaaccttatttatcaagcatctatcgaagcaattgataatcagcatgagacgataaccgaagaagatttcgtttttgcatcgaagttgacatcgggcgataaacccaactcatggaaaaatccttttgaggagggtgttgaggtaacagaagatatgttacgaccgccaccaaaagatattggttgggaggactatttgagacattcaaccccgagagtgagtaaaccaggtagaaataaaaactttttcgaataacctaggctgctgccaccgctgagcaataactagcataaccccttggggcctctaaacgggtcttgaggggttttttgctgaaacctcaggcatttgagaagcacacggtcacactgcttccggtagtcaataaaccggtaaaccagcaatagacataagcggctatttaacgaccctgccctgaaccgacgacaagctgacgaccgggtctccgcaagtggcacttttcggggaaatgtgcgcggaacccctatttgtttatttttctaaatacattcaaatatgtatccgctcatgaattaattcttagaaaaactcatcgagcatcaaatgaaactgcaatttattcatatcaggattatcaataccatatttttgaaaaagccgtttctgtaatgaaggagaaaactcaccgaggcagttccataggatggcaagatcctggtatcggtctgcgattccgactcgtccaacatcaatacaacctattaatttcccctcgtcaaaaataaggttatcaagtgagaaatcaccatgagtgacgactgaatccggtgagaatggcaaaagtttatgcatttctttccagacttgttcaacaggccagccattacgctcgtcatcaaaatcactcgcatcaaccaaaccgttattcattcgtgattgcgcctgagcgagacgaaatacgcggtcgctgttaaaaggacaattacaaacaggaatcgaatgcaaccggcgcaggaacactgccagcgcatcaacaatattttcacctgaatcaggatattcttctaatacctggaatgctgttttcccggggatcgcagtggtgagtaaccatgcatcatcaggagtacggataaaatgcttgatggtcggaagaggcataaattccgtcagccagtttagtctgaccatctcatctgtaacatcattggcaacgctacctttgccatgtttcagaaacaactctggcgcatcgggcttcccatacaatcgatagattgtcgcacctgattgcccgacattatcgcgagcccatttatacccatataaatcagcatccatgttggaatttaatcgcggcctagagcaagacgtttcccgttgaatatggctcatactcttcctttttcaatattattgaagcatttatcagggttattgtctcatgagcggatacatatttgaatgtatttagaaaaataaacaaataggcatgctagcgcagaaacgtcctagaagatgccaggaggatacttagcagagagacaataaggccggagcgaagccgtttttccataggctccgcccccctgacgaacatcacgaaatctgacgctcaaatcagtggtggcgaaacccgacaggactataaagataccaggcgtttccccctgatggctccctcttgcgctctcctgttcccgtcctgcggcgtccgtgttgtggtggaggctttacccaaatcaccacgtcccgttccgtgtagacagttcgctccaagctgggctgtgtgcaagaaccccccgttcagcccgactgctgcgccttatccggtaactatcatcttgagtccaacccggaaagacacgacaaaacgccactggcagcagccattggtaactgagaattagtggatttagatatcgagagtcttgaagtggtggcctaacagaggctacactgaaaggacagtatttggtatctgcgctccactaaagccagttaccaggttaagcagttccccaactgacttaaccttcgatcaaaccgcctccccaggcggttttttcgtttacagagcaggagattacgacgatcgtaaaaggatctcaagaagatcctttacggattcccgacaccatcactctagatttcagtgcaatttatctcttcaaatgtagcacctgaagtcagccccatacgatataagttgtaattctcatgttagtcatgccccgcgcccaccggaaggagctgactgggttgaaggctctcaagggcatcggtcgagatcccggtgcctaatgagtgagctaacttacattaattgcgttgcgctcactgcccgctttccagtcgggaaacctgtcgtgccagctgcattaatgaatcggccaacgcgcggggagaggcggtttgcgtattgggcgccagggtggtttttcttttcaccagtgagacgggcaacagctgattgcccttcaccgcctggccctgagagagttgcagcaagcggtccacgctggtttgccccagcaggcgaaaatcctgtttgatggtggttaacggcgggatataacatgagctgtcttcggtatcgtcgtatcccactaccgagatgtccgcaccaacgcgcagcccggactcggtaatggcgcgcattgcgcccagcgccatctgatcgttggcaaccagcatcgcagtgggaacgatgccctcattcagcatttgcatggtttgttgaaaaccggacatggcactccagtcgccttcccgttccgctatcggctgaatttgattgcgagtgagatatttatgccagccagccagacgcagacgcgccgagacagaacttaatgggcccgctaacagcgcgatttgctggtgacccaatgcgaccagatgctccacgcccagtcgcgtaccgtcttcatgggagaaaataatactgttgatgggtgtctggtcagagacatcaagaaataacgccggaacattagtgcaggcagcttccacagcaatggcatcctggtcatccagcggatagttaatgatcagcccactgacgcgttgcgcgagaagattgtgcaccgccgctttacaggcttcgacgccgcttcgttctaccatcgacaccaccacgctggcacccagttgatcggcgcgagatttaatcgccgcgacaatttgcgacggcgcgtgcagggccagactggaggtggcaacgccaatcagcaacgactgtttgcccgccagttgttgtgccacgcggttgggaatgtaattcagctccgccatcgccgcttccactttttcccgcgttttcgcagaaacgtggctggcctggttcaccacgcgggaaacggtctgataagagacaccggcatactctgcgacatcgtataacgttactggtttcacattcaccaccctgaattgactctcttccgggcgctatcatgccataccgcgaaaggttttgcgccattcgatggtgtccgggatctcgacgctctcccttatgcgactcctgcattaggaaat

SEQ ID NO: 25 - DNA, 8445 bp, Synthetic construct
  source 1..8445: mol_type = other DNA
attcaccaccctgaattgactctcttccgggcgctatcatgccataccgcgaaaggttttgcgccattcgatggtgtccgggatctcgacgctctcccttatgcgactcctgcattaggaaattaatacgactcactataggggaattgtgagcggataacaattcccctgtagaaataattttgtttaactttaataaggagatataccatgggtgaactgccgagtaggtagctgataacagtacagcgcggctgaaatcatcattaaagcggtgaactgccgagtaggtagctgataacggatccgaattcgagctcggcgcgcctgcaggtcgacaagcttgcggccgcataatgcttaagtcgaacagaaagtaatcgtattgtacacggccgcataatcgaaattaatacgactcactataggggaattgtgagcggataacaattccccatcttagtatattagttaagtataagaaggagatatacatatgtttttgcaaagacctaaaccttacagcgatgaaagtttagaaagtttctttatccgagtggctaacaaaaatggctacggtgatgtccatcgcttcctagaagccactaaacgattccttcaagacattgaccataatggctatcaaacctttccgactgatataactcggataaacccatactcagctaaaaacagttccagcgcacgaactgcgtcattcctgaaacttgcacaattgacatttaatgaaccgccagagctacttgggttggcaattaacagaacaaacatgaaatactcgccgtcaactagcgcggttgttagaggtgcagaagtctttcctcgcagtttactacggacgcactccatcccctgctgtcctttgtgtctgcgagaaaatggctacgcctcctacctttggcactttcaggggtacgaatactgccacagccataacgtacctttaattaccacttgtagctgtggtaaggagtttgactaccgagtatctgggttaaagggcatttgctgcaaatgcaaggagcctatcaccttaaccagcagggagaacggtcatgaggcagcgtgtactgtttcaaactggcttgctggccatgaatctaaacctctgccaaatcttcctaaaagctaccgatggggtttagttcattggtggatgggtattaaagatagcgagttcgatcacttttcgttcgttcaatttttctcaaactggccaaggtcattccactcgataatcgaagatgaagtagagttcaaccttgagcatgctgttgtcagcacgtctgaattacgactaaaagatcttcttggtcgattgtttttcggttcaattcggttacctgagcggaatcttcaacacaatatcatccttggtgagcttctctgctatttagaaaatcgtttatggcaagacaagggattaatcgccaacctcaaaatgaacgcgttagaggcgactgtaatgttaaattgtagcctcgatcagattgcatcaatggttgaacaacgcatcttgaagccaaatcgaaaaagcaagcccaacagccctcttgatgttaccgattatctatttcatttcggcgatattttctgtctttggttagctgagttccaaagcgatgagtttaaccgttcgttttatgtgtcgaggtggtaaatgcaaactctgaaagaactaatcgcatccaatcctgacgacttaacaactgaacttaagagagcatttcgtccactcacaccgcatattgcaattgatggtaatgaacttgacgcactgacgatattagtcaatttaaccgataagactgatgatcagaaagacctgctcgatcgagccaaatgcaagcaaaaacttcgagatgaaaaatggtgggctagctgcataaattgcgttaattacagacaaagccataacccaaaattcccggatatacgttctgaaggcgtgattcgaacccaagccctgggtgaattaccgagtttcctactctcgtcctcaaaaatcccaccataccattggtcatatagccatgattcaaaatacgtcaacaaaagcgcattcctcaccaatgagttttgttgggatggtgagatctcatgtttgggtgagcttcttaaagatgcagatcacccactttggaatactttgaaaaagttaggttgttctcaaaaaacttgcaaagcaatggcaaaacaactagctgatattactctcacgactatcaatgtcacactcgcaccaaattacctgactcaaatatctctccccgatagtgatacatcctacatttcactctctcctgttgcatcgctatcgatgcaaagccactttcatcagaggctccaagatgaaaatcggcatagcgcgataacgcggtttagccgaactaccaacatgggggtcactgcgatgacatgtggcggcgcatttagaatgttaaagtctggcgctaagttttccagcccccctcatcaccgattaaacagtaaacgaagttggttgacgtcagagcatgttcagtcattaaaacagtaccagcgcctcaacaaaagcctcatacctgaaaactctcggattgcactccgtagaaaatacaaaatcgagcttcaaaatatggtcagatcttggtttgcaatgcaagaccatacccttgattcgaacatacttatccaacatttgaatcatgacctatcttacttaggagccacaaaacgttttgcatacgatccagcgatgaccaagctctttactgagcttttgaaacgagagttatcaaattcaatcaataatggtgagcaacacactaatggatcgtttttagtcctaccgaatatcagggtttgtggcgcaacagctttaagctccccggtaacggtggggattccatcacttacagctttctttggcttcgttcacgcatttgaacggaatataaatcgcaccacctcatcgtttcgtgttgaatcctttgcgatatgcgtccatcaactacatgtcgagaagcgaggtttgacagcagagtttgtggaaaaaggcgacgggactatatccgctcccgcgacccgggatgactggcagtgtgatgtcgtatttagccttattttgaacaccaactttgctcaacatattgaccaagatacgttagttacatcactaccaaagcgattggctcggggttcagcaaaaattgcgattgatgactttaaacatatcaactcattctcgacattagaaacagcgatcgaatctctgccaatagaagctggtaggtggttatcactttacgcacagtcaaacaataatctaagtgatctattagcagccatgacagaggaccatcagctcatggcaagctgcgtcggttaccacttgttagaagagcccaaagataaaccaaactccctcagaggttacaaacacgctatcgccgagtgcatcattggactcattaactcaatcacctttagctcagagactgatcccaacacaatcttttggtcgctaaagaactatcaaaactacctagtggtacagccaaggagtatcaacgatgaaactaccgacaaatctagcctatgagcgctctatcgacccatcagatgtctgtttttttgtcgtctggcccgatgatagaaaaacacctttaacctacaattctcgtactctgctcgggcaaatggaagcggcatcattagcctatgatgtctcaggtcaaccaataaaaagtgccaccgctgaggcgttagctcaagggaaccctcatcaagttgatttctgccacgttccatacggtgcgagtcatattgaatgcagtttctccgtctcgttttcttctgaactacgtcaaccatataagtgtaactcaagcaaagttaaacaaacgctagtgcaattagtcgagctctacgaaacgaaaatcggctggactgagctagcaacccgatatttgatgaacatttgcaacggtaaatggctgtggaaaaatacccgtaaagcctattgctggaacattgtacttacaccttggccttggaacggggaaaaggttggatttgaagatattcgtactaactacacctcacggcaagactttaaaaataataaaaattggtctgctatagttgaaatgatcaaaaccgcattttctagtactgatgggctggcgatatttgaagtcagggccaccttgcacttgccaacgaatgctatggtgcggccaagccaagttttcacagaaaaagaaagtggcagtaaaagtaaatctaaaactcaaaacagtcgagtttttcagagtacaactattgatggtgaacgatcgccaatactaggggcctttaaaacgggagcagctattgcaaccattgacgactggtatcctgaagccactgagccactaagggtcggacggtttggggttcatcgcgaagatgtcacttgctaccgtcatccgtctaccggaaaagattttttctcgatattacaacaagcagagcactatattgaagtgttgagcgccaacaaaactcccgctcaagaaactatcaacgacatgcactttttaatggctaacctgattaagggtgggatgttccagcataaaggagactgactgtgaaatggtattataagacaatcacctttctgccagagttgtgcaacaacgagtcactggctgcaaagtgtctccgcgttctggcgggatttaactatcagtatgagacacgaaatatcggcgtttcatttccgctttggtgtgatgcaacggttggaaaaaagatttcatttgtcagcaagaacaagatagaactcgacttactacttaaacaacactatttcgtccaaatggaacaacttcaatactttcatatatccaacactgttctcgtcccagaagattgtacatacgtttcctttagacgctgtcaatctatagataagctcacagcagcagggctggcaaggaaaatcagacgcctggagaaacgtgctctatctagaggcgagcaatttgacccatcatcttttgctcaaaaagagcatactgcaatagcgcactaccactcacttggggagtccagcaaacagacgaaccgcaactttcgactcaatatcaggatgctctcggagcaaccccgtgaggggaactcgatttttagtagctatggcttatcaaattcagaaaactcgtttcagcctgtacccttaatctgacctaggctgctgccaccgctgagcaataactagcataaccccttggggcctctaaacgggtcttgaggggttttttgctgaaacctcaggcatttgagaagcacacggtcacactgcttccggtagtcaataaaccggtaaaccagcaatagacataagcggctatttaacgaccctgccctgaaccgacgaccgggtcatcgtggccggatcttgcggcccctcggcttgaacgaattgttagacattatttgccgactaccttggtgatctcgcctttcacgtagtggacaaattcttccaactgatctgcgcgcgaggccaagcgatcttcttcttgtccaagataagcctgtctagcttcaagtatgacgggctgatactgggccggcaggcgctccattgcccagtcggcagcgacatccttcggcgcgattttgccggttactgcgctgtaccaaatgcgggacaacgtaagcactacatttcgctcatcgccagcccagtcgggcggcgagttccatagcgttaaggtttcatttagcgcctcaaatagatcctgttcaggaaccggatcaaagagttcctccgccgctggacctaccaaggcaacgctatgttctcttgcttttgtcagcaagatagccagatcaatgtcgatcgtggctggctcgaagatacctgcaagaatgtcattgcgctgccattctccaaattgcagttcgcgcttagctggataacgccacggaatgatgtcgtcgtgcacaacaatggtgacttctacagcgcggagaatctcgctctctccaggggaagccgaagtttccaaaaggtcgttgatcaaagctcgccgcgttgtttcatcaagccttacggtcaccgtaaccagcaaatcaatatcactgtgtggcttcaggccgccatccactgcggagccgtacaaatgtacggccagcaacgtcggttcgagatggcgctcgatgacgccaactacctctgatagttgagtcgatacttcggcgatcaccgcttccctcatactcttcctttttcaatattattgaagcatttatcagggttattgtctcatgagcggatacatatttgaatgtatttagaaaaataaacaaatagctagctcactcggtcgctacgctccgggcgtgagactgcggcgggcgctgcggacacatacaaagttacccacagattccgtggataagcaggggactaacatgtgaggcaaaacagcagggccgcgccggtggcgtttttccataggctccgccctcctgccagagttcacataaacagacgcttttccggtgcatctgtgggagccgtgaggctcaaccatgaatctgacagtacgggcgaaacccgacaggacttaaagatccccaccgtttccggcgggtcgctccctcttgcgctctcctgttccgaccctgccgtttaccggatacctgttccgcctttctcccttacgggaagtgtggcgctttctcatagctcacacactggtatctcggctcggtgtaggtcgttcgctccaagctgggctgtaagcaagaactccccgttcagcccgactgctgcgccttatccggtaactgttcacttgagtccaacccggaaaagcacggtaaaacgccactggcagcagccattggtaactgggagttcgcagaggatttgtttagctaaacacgcggttgctcttgaagtgtgcgccaaagtccggctacactggaaggacagatttggttgctgtgctctgcgaaagccagttaccacggttaagcagttccccaactgacttaaccttcgatcaaaccacctccccaggtggttttttcgtttacagggcaaaagattacgcgcagaaaaaaaggatctcaagaagatcctttgatcttttctactgaaccgctctagatttcagtgcaatttatctcttcaaatgtagcacctgaagtcagccccatacgatataagttgtaattctcatgttagtcatgccccgcgcccaccggaaggagctgactgggttgaaggctctcaagggcatcggtcgagatcccggtgcctaatgagtgagctaacttacattaattgcgttgcgctcactgcccgctttccagtcgggaaacctgtcgtgccagctgcattaatgaatcggccaacgcgcggggagaggcggtttgcgtattgggcgccagggtggtttttcttttcaccagtgagacgggcaacagctgattgcccttcaccgcctggccctgagagagttgcagcaagcggtccacgctggtttgccccagcaggcgaaaatcctgtttgatggtggttaacggcgggatataacatgagctgtcttcggtatcgtcgtatcccactaccgagatgtccgcaccaacgcgcagcccggactcggtaatggcgcgcattgcgcccagcgccatctgatcgttggcaaccagcatcgcagtgggaacgatgccctcattcagcatttgcatggtttgttgaaaaccggacatggcactccagtcgccttcccgttccgctatcggctgaatttgattgcgagtgagatatttatgccagccagccagacgcagacgcgccgagacagaacttaatgggcccgctaacagcgcgatttgctggtgacccaatgcgaccagatgctccacgcccagtcgcgtaccgtcttcatgggagaaaataatactgttgatgggtgtctggtcagagacatcaagaaataacgccggaacattagtgcaggcagcttccacagcaatggcatcctggtcatccagcggatagttaatgatcagcccactgacgcgttgcgcgagaagattgtgcaccgccgctttacaggcttcgacgccgcttcgttctaccatcgacaccaccacgctggcacccagttgatcggcgcgagatttaatcgccgcgacaatttgcgacggcgcgtgcagggccagactggaggtggcaacgccaatcagcaacgactgtttgcccgccagttgttgtgccacgcggttgggaatgtaattcagctccgccatcgccgcttccactttttcccgcgttttcgcagaaacgtggctggcctggttcaccacgcgggaaacggtctgataagagacaccggcatactctgcgacatcgtataacgttactggtttcac

SEQ ID NO: 26 - DNA, 7154 bp, Synthetic construct
  source 1..7154: mol_type = other DNA
ttcttgaagacgaaagggcctcgtgatacgcctatttttataggttaatgtcatgataataatggtttcttagacgtcaggtggcacttttcggggaaatgtgcgcggaacccctatttgtttatttttctaaatacattcaaatatgtatccgctcatgagacaataaccctgataaatgcttcaataacattgaaaaaggaagagtatgagtattcaacatttccgtgtcgcccttattcccttttttgcggcattttgccttcctgtttttgctcacccagaaacgctggtgaaagtaaaagatgctgaagatcagttgggtgcacgagtgggttacatcgaactggatctcaacagcggtaagatccttgagagttttcgccccgaagaacgttttccaatgatgagcacttttaaagttctgctatgtggcgcggtattatcccgtgttgacgccgggcaagagcaactcggtcgccgcatacactattctcagaatgacttggttgagtactcaccagtcacagaaaagcatcttacggatggcatgacagtaagagaattatgcagtgctgccataaccatgagtgataacactgcggccaacttacttctgacaacgatcggaggaccgaaggagctaaccgcttttttgcacaacatgggggatcatgtaactcgccttgatcgttgggaaccggagctgaatgaagccataccaaacgacgagcgtgacaccacgatgcctgcagcaatggcaacaacgttgcgcaaactattaactggcgaactacttactctagcttcccggcaacaattaatagactggatggaggcggataaagttgcaggaccacttctgcgctcggcccttccggctggctggtttattgctgataaatctggagccggtgagcgtgggtctcgcggtatcattgcagcactggggccagatggtaagccctcccgtatcgtagttatctacacgacggggagtcaggcaactatggatgaacgaaatagacagatcgctgagataggtgcctcactgattaagcattggtaactgtcagaccaagtttactcatatatactttagattgatttaaaacttcatttttaatttaaaaggatctaggtgaagatcctttttgataatctcatgaccaaaatcccttaacgtgagttttcgttccactgagcgtcagaccccgtagaaaagatcaaaggatcttcttgagatcctttttttctgcgcgtaatctgctgcttgcaaacaaaaaaaccaccgctaccagcggtggtttgtttgccggatcaagagctaccaactctttttccgaaggtaactggcttcagcagagcgcagataccaaatactgtccttctagtgtagccgtagttaggccaccacttcaagaactctgtagcaccgcctacatacctcgctctgctaatcctgttaccagtggctgctgccagtggcgataagtcgtgtcttaccgggttggactcaagacgatagttaccggataaggcgcagcggtcgggctgaacggggggttcgtgcacacagcccagcttggagcgaacgacctacaccgaactgagatacctacagcgtgagctatgagaaagcgccacgcttcccgaagggagaaaggcggacaggtatccggtaagcggcagggtcggaacaggagagcgcacgagggagcttccagggggaaacgcctggtatctttatagtcctgtcgggtttcgccacctctgacttgagcgtcgatttttgtgatgctcgtcaggggggcggagcctatggaaaaacgccagcaacgcggcctttttacggttcctggccttttgctggccttttgctcacatgttctttcctgcgttatcccctgattctgtggataaccgtattaccgcctttgagtgagctgataccgctcgccgcagccgaacgaccgagcgcagcgagtcagtgagcgaggaagcggaagagcgcctgatgcggtattttctccttacgcatctgtgcggtatttcacaccgcatatatggtgcactctcagtacaatctgctctgatgccgcatagttaagccagtatacactccgctatcgctacgtgactgggtcatggctgcgccccgacacccgccaacacccgctgacgcgccctgacgggcttgtctgctcccggcatccgcttacagacaagctgtgaccgtctccgggagctgcatgtgtcagaggttttcaccgtcatcaccgaaacgcgcgaggcagctgcggtaaagctcatcagcgtggtcgtgaagcgattcacagatgtctgcctgttcatccgcgtccagctcgttgagtttctccagaagcgttaatgtctggcttctgataaagcgggccatgttaagggcggttttttcctgtttggtcactgatgcctccgtgtaagggggatttctgttcatgggggtaatgataccgatgaaacgagagaggatgctcacgatacgggttactgatgatgaacatgcccggttactggaacgttgtgagggtaaacaactggcggtatggatgcggcgggaccagagaaaaatcactcagggtcaatgccagcgcttcgttaatacagatgtaggtgttccacagggtagccagcagcatcctgcgatgcagatccggaacataatggtgcagggcgctgacttccgcgtttccagactttacgaaacacggaaaccgaagaccattcatgttgttgctcaggtcgcagacgttttgcagcagcagtcgcttcacgttcgctcgcgtatcggtgattcattctgctaaccagtaaggcaaccccgccagcctagccgggtcctcaacgacaggagcacgatcatgcgcacccgtggccaggacccaacgctgcccgagatgcgccgcgtgcggctgctggagatggcggacgcgatggatatgttctgccaagggttggtttgcgcattcacagttctccgcaagaattgattggctccaattcttggagtggtgaatccgttagcgaggtgccgccggcttccattcaggtcgaggtggcccggctccatgcaccgcgacgcaacgcggggaggcagacaaggtatagggcggcgcctacaatccatgccaacccgttccatgtgctcgccgaggcggcataaatcgccgtgacgatcagcggtccagtgatcgaagttaggctggtaagagccgcgagcgatccttgaagctgtccctgatggtcgtcatctacctgcctggacagcatggcctgcaacgcgggcatcccgatgccgccggaagcgagaagaatcataatggggaaggccatccagcctcgcgtcgcgaacgccagcaagacgtagcccagcgcgtcggccgccatgccggcgataatggcctgcttctcgccgaaacgtttggtggcgggaccagtgacgaaggcttgagcgagggcgtgcaagattccgaataccgcaagcgacaggccgatcatcgtcgcgctccagcgaaagcggtcctcgccgaaaatgacccagagcgctgccggcacctgtcctacgagttgcatgataaagaagacagtcataagtgcggcgacgatagtcatgccccgcgcccaccggaaggagctgactgggttgaaggctctcaagggcatcggtcgacgctctcccttatgcgactcctgcattaggaagcagcccagtagtaggttgaggccgttgagcaccgccgccgcaaggaatggtgcatgcaaggagatggcgcccaacagtcccccggccacggggcctgccaccatacccacgccgaaacaagcgctcatgagcccgaagtggcgagcccgatcttccccatcggtgatgtcggcgatataggcgccagcaaccgcacctgtggcgccggtgatgccggccacgatgcgtccggcgtagaggatcgagatctcgatcccgcgaaattaatacgactcactatagggagaccacaacggtttccctctagtgccggctccggagagctctttaattaagcggccgccctgcaggactcgagttctagaaataattttgtttaactttaagaaggagatatacatatgaaatcttctcaccatcaccatcaccatcaccatcaccatggttcttctatgaaaatcgaagaaggtaaactggtaatctggattaacggcgataaaggctataacggtctcgctgaagtcggtaagaaattcgagaaagataccggaattaaagtcaccgttgagcatccggataaactggaagagaaattcccacaggttgcggcaactggcgatggccctgacattatcttctgggcacacgaccgctttggtggctacgctcaatctggcctgttggctgaaatcaccccggacaaagcgttccaggacaagctgtatccgtttacctgggatgccgtacgttacaacggcaagctgattgcttacccgatcgctgttgaagcgttatcgctgatttataacaaagatctgctgccgaacccgccaaaaacctgggaagagatcccggcgctggataaagaactgaaagcgaaaggtaagagcgcgctgatgttcaacctgcaagaaccgtacttcacctggccgctgattgctgctgacgggggttatgcgttcaagtatgaaaacggcaagtacgacattaaagacgtgggcgtggataacgctggcgcgaaagcgggtctgaccttcctggttgacctgattaaaaacaaacacatgaatgcagacaccgattactccatcgcagaagctgcctttaataaaggcgaaacagcgatgaccatcaacggcccgtgggcatggtccaacatcgacaccagcaaagtgaattatggtgtaacggtactgccgaccttcaagggtcaaccatccaaaccgttcgttggcgtgctgagcgcaggtattaacgccgccagtccgaacaaagagctggcaaaagagttcctcgaaaactatctgctgactgatgaaggtctggaagcggttaataaagacaaaccgctgggtgccgtagcgctgaagtcttacgaggaagagttggcgaaagatccacgtattgccgccactatggaaaacgcccagaaaggtgaaatcatgccgaacatcccgcagatgtccgctttctggtatgccgtgcgtactgcggtgatcaacgccgccagcggtcgtcagactgtcgatgaagccctgaaagacgcgcagactaattcgagctcgaacaacaacaacaataacaataacaacaacctcgggatcgaggaaaacctgtacttccaatccaatgcaatgtttttgcaaagacctaaaccttacagcgatgaaagtttagaaagtttctttatccgagtggctaacaaaaatggctacggtgatgtccatcgcttcctagaagccactaaacgattccttcaagacattgaccataatggctatcaaacctttccgactgatataactcggataaacccatactcagctaaaaacagttccagcgcacgaactgcgtcattcctgaaacttgcacaattgacatttaatgaaccgccagagctacttgggttggcaattaacagaacaaacatgaaatactcgccgtcaactagcgcggttgttagaggtgcagaagtctttcctcgcagtttactacggacgcactccatcccctgctgtcctttgtgtctgcgagaaaatggctacgcctcctacctttggcactttcaggggtacgaatactgccacagccataacgtacctttaattaccacttgtagctgtggtaaggagtttgactaccgagtatctgggttaaagggcatttgctgcaaatgcaaggagcctatcaccttaaccagcagggagaacggtcatgaggcagcgtgtactgtttcaaactggcttgctggccatgaatctaaacctctgccaaatcttcctaaaagctaccgatggggtttagttcattggtggatgggtattaaagatagcgagttcgatcacttttcgttcgttcaatttttctcaaactggccaaggtcattccactcgataatcgaagatgaagtagagttcaaccttgagcatgctgttgtcagcacgtctgaattacgactaaaagatcttcttggtcgattgtttttcggttcaattcggttacctgagcggaatcttcaacacaatatcatccttggtgagcttctctgctatttagaaaatcgtttatggcaagacaagggattaatcgccaacctcaaaatgaacgcgttagaggcgactgtaatgttaaattgtagcctcgatcagattgcatcaatggttgaacaacgcatcttgaagccaaatcgaaaaagcaagcccaacagccctcttgatgttaccgattatctatttcatttcggcgatattttctgtctttggttagctgagttccaaagcgatgagtttaaccgttcgttttatgtgtcgaggtggtaatagcattggaagtggataacggatccgcgatcgcggcgcgccacctggtggccggccggtaccacgcgtgcgcgctgatccggctgctaacaaagcccgaaaggaagctgagttggctgctgccaccgctgagcaataactagcataaccccttggggcctctaaacgggtcttgaggggttttttgctgaaaggaggaactatatccggatatccacaggacgggtgtggtcgccatgatcgcgtagtcgatagtggctccaagtagcgaagcgagcaggactgggcggcggccaaagcggtcggacagtgctccgagaacgggtgcgcatagaaattgcatcaacgcatatagcgctagcagcacgccatagtgactggcgatgctgtcggaatggacgatatcccgcaagaggcccggcagtaccggcataaccaagcctatgcctacagcatccagggtgacggtgccgaggatgacgatgagcgcattgttagatttcatacacggtgcctgactgcgttagcaatttaactgtgataaactaccgcattaaagcttatcgatgataagctgtcaaacatgagaa

SEQ ID NO: 27 - DNA, 9524 bp, Synthetic construct
  source 1..9524: mol_type = other DNA
ttcttgaagacgaaagggcctcgtgatacgcctatttttataggttaatgtcatgataataatggtttcttagacgtcaggtggcacttttcggggaaatgtgcgcggaacccctatttgtttatttttctaaatacattcaaatatgtatccgctcatgagacaataaccctgataaatgcttcaataacattgaaaaaggaagagtatgagtattcaacatttccgtgtcgcccttattcccttttttgcggcattttgccttcctgtttttgctcacccagaaacgctggtgaaagtaaaagatgctgaagatcagttgggtgcacgagtgggttacatcgaactggatctcaacagcggtaagatccttgagagttttcgccccgaagaacgttttccaatgatgagcacttttaaagttctgctatgtggcgcggtattatcccgtgttgacgccgggcaagagcaactcggtcgccgcatacactattctcagaatgacttggttgagtactcaccagtcacagaaaagcatcttacggatggcatgacagtaagagaattatgcagtgctgccataaccatgagtgataacactgcggccaacttacttctgacaacgatcggaggaccgaaggagctaaccgcttttttgcacaacatgggggatcatgtaactcgccttgatcgttgggaaccggagctgaatgaagccataccaaacgacgagcgtgacaccacgatgcctgcagcaatggcaacaacgttgcgcaaactattaactggcgaactacttactctagcttcccggcaacaattaatagactggatggaggcggataaagttgcaggaccacttctgcgctcggcccttccggctggctggtttattgctgataaatctggagccggtgagcgtgggtctcgcggtatcattgcagcactggggccagatggtaagccctcccgtatcgtagttatctacacgacggggagtcaggcaactatggatgaacgaaatagacagatcgctgagataggtgcctcactgattaagcattggtaactgtcagaccaagtttactcatatatactttagattgatttaaaacttcatttttaatttaaaaggatctaggtgaagatcctttttgataatctcatgaccaaaatcccttaacgtgagttttcgttccactgagcgtcagaccccgtagaaaagatcaaaggatcttcttgagatcctttttttctgcgcgtaatctgctgcttgcaaacaaaaaaaccaccgctaccagcggtggtttgtttgccggatcaagagctaccaactctttttccgaaggtaactggcttcagcagagcgcagataccaaatactgtccttctagtgtagccgtagttaggccaccacttcaagaactctgtagcaccgcctacatacctcgctctgctaatcctgttaccagtggctgctgccagtggcgataagtcgtgtcttaccgggttggactcaagacgatagttaccggataaggcgcagcggtcgggctgaacggggggttcgtgcacacagcccagcttggagcgaacgacctacaccgaactgagatacctacagcgtgagctatgagaaagcgccacgcttcccgaagggagaaaggcggacaggtatccggtaagcggcagggtcggaacaggagagcgcacgagggagcttccagggggaaacgcctggtatctttatagtcctgtcgggtttcgccacctctgacttgagcgtcgatttttgtgatgctcgtcaggggggcggagcctatggaaaaacgccagcaacgcggcctttttacggttcctggccttttgctggccttttgctcacatgttctttcctgcgttatcccctgattctgtggataaccgtattaccgcctttgagtgagctgataccgctcgccgcagccgaacgaccgagcgcagcgagtcagtgagcgaggaagcggaagagcgcctgatgcggtattttctccttacgcatctgtgcggtatttcacaccgcatatatggtgcactctcagtacaatctgctctgatgccgcatagttaagccagtatacactccgctatcgctacgtgactgggtcatggctgcgccccgacacccgccaacacccgctgacgcgccctgacgggcttgtctgctcccggcatccgcttacagacaagctgtgaccgtctccgggagctgcatgtgtcagaggttttcaccgtcatcaccgaaacgcgcgaggcagctgcggtaaagctcatcagcgtggtcgtgaagcgattcacagatgtctgcctgttcatccgcgtccagctcgttgagtttctccagaagcgttaatgtctggcttctgataaagcgggccatgttaagggcggttttttcctgtttggtcactgatgcctccgtgtaagggggatttctgttcatgggggtaatgataccgatgaaacgagagaggatgctcacgatacgggttactgatgatgaacatgcccggttactggaacgttgtgagggtaaacaactggcggtatggatgcggcgggaccagagaaaaatcactcagggtcaatgccagcgcttcgttaatacagatgtaggtgttccacagggtagccagcagcatcctgcgatgcagatccggaacataatggtgcagggcgctgacttccgcgtttccagactttacgaaacacggaaaccgaagaccattcatgttgttgctcaggtcgcagacgttttgcagcagcagtcgcttcacgttcgctcgcgtatcggtgattcattctgctaaccagtaaggcaaccccgccagcctagccgggtcctcaacgacaggagcacgatcatgcgcacccgtggccaggacccaacgctgcccgagatgcgccgcgtgcggctgctggagatggcggacgcgatggatatgttctgccaagggttggtttgcgcattcacagttctccgcaagaattgattggctccaattcttggagtggtgaatccgttagcgaggtgccgccggcttccattcaggtcgaggtggcccggctccatgcaccgcgacgcaacgcggggaggcagacaaggtatagggcggcgcctacaatccatgccaacccgttccatgtgctcgccgaggcggcataaatcgccgtgacgatcagcggtccagtgatcgaagttaggctggtaagagccgcgagcgatccttgaagctgtccctgatggtcgtcatctacctgcctggacagcatggcctgcaacgcgggcatcccgatgccgccggaagcgagaagaatcataatggggaaggccatccagcctcgcgtcgcgaacgccagcaagacgtagcccagcgcgtcggccgccatgccggcgataatggcctgcttctcgccgaaacgtttggtggcgggaccagtgacgaaggcttgagcgagggcgtgcaagattccgaataccgcaagcgacaggccgatcatcgtcgcgctccagcgaaagcggtcctcgccgaaaatgacccagagcgctgccggcacctgtcctacgagttgcatgataaagaagacagtcataagtgcggcgacgatagtcatgccccgcgcccaccggaaggagctgactgggttgaaggctctcaagggcatcggtcgacgctctcccttatgcgactcctgcattaggaagcagcccagtagtaggttgaggccgttgagcaccgccgccgcaaggaatggtgcatgcaaggagatggcgcccaacagtcccccggccacggggcctgccaccatacccacgccgaaacaagcgctcatgagcccgaagtggcgagcccgatcttccccatcggtgatgtcggcgatataggcgccagcaaccgcacctgtggcgccggtgatgccggccacgatgcgtccggcgtagaggatcgagatctcgatcccgcgaaattaatacgactcactatagggagaccacaacggtttccctctagtgccggctccggagagctctttaattaagcggccgccctgcaggactcgagttctagaaataattttgtttaactttaagaaggagatatacatatgaaatcttctcaccatcaccatcaccatcaccatcaccatggttcttctatgaaaatcgaagaaggtaaactggtaatctggattaacggcgataaaggctataacggtctcgctgaagtcggtaagaaattcgagaaagataccggaattaaagtcaccgttgagcatccggataaactggaagagaaattcccacaggttgcggcaactggcgatggccctgacattatcttctgggcacacgaccgctttggtggctacgctcaatctggcctgttggctgaaatcaccccggacaaagcgttccaggacaagctgtatccgtttacctgggatgccgtacgttacaacggcaagctgattgcttacccgatcgctgttgaagcgttatcgctgatttataacaaagatctgctgccgaacccgccaaaaacctgggaagagatcccggcgctggataaagaactgaaagcgaaaggtaagagcgcgctgatgttcaacctgcaagaaccgtacttcacctggccgctgattgctgctgacgggggttatgcgttcaagtatgaaaacggcaagtacgacattaaagacgtgggcgtggataacgctggcgcgaaagcgggtctgaccttcctggttgacctgattaaaaacaaacacatgaatgcagacaccgattactccatcgcagaagctgcctttaataaaggcgaaacagcgatgaccatcaacggcccgtgggcatggtccaacatcgacaccagcaaagtgaattatggtgtaacggtactgccgaccttcaagggtcaaccatccaaaccgttcgttggcgtgctgagcgcaggtattaacgccgccagtccgaacaaagagctggcaaaagagttcctcgaaaactatctgctgactgatgaaggtctggaagcggttaataaagacaaaccgctgggtgccgtagcgctgaagtcttacgaggaagagttggcgaaagatccacgtattgccgccactatggaaaacgcccagaaaggtgaaatcatgccgaacatcccgcagatgtccgctttctggtatgccgtgcgtactgcggtgatcaacgccgccagcggtcgtcagactgtcgatgaagccctgaaagacgcgcagactaattcgagctcgaacaacaacaacaataacaataacaacaacctcgggatcgaggaaaacctgtacttccaatccaatgcaatgcaaactctgaaagaactaatcgcatccaatcctgacgacttaacaactgaacttaagagagcatttcgtccactcacaccgcatattgcaattgatggtaatgaacttgacgcactgacgatattagtcaatttaaccgataagactgatgatcagaaagacctgctcgatcgagccaaatgcaagcaaaaacttcgagatgaaaaatggtgggctagctgcataaattgcgttaattacagacaaagccataacccaaaattcccggatatacgttctgaaggcgtgattcgaacccaagccctgggtgaattaccgagtttcctactctcgtcctcaaaaatcccaccataccattggtcatatagccatgattcaaaatacgtcaacaaaagcgcattcctcaccaatgagttttgttgggatggtgagatctcatgtttgggtgagcttcttaaagatgcagatcacccactttggaatactttgaaaaagttaggttgttctcaaaaaacttgcaaagcaatggcaaaacaactagctgatattactctcacgactatcaatgtcacactcgcaccaaattacctgactcaaatatctctccccgatagtgatacatcctacatttcactctctcctgttgcatcgctatcgatgcaaagccactttcatcagaggctccaagatgaaaatcggcatagcgcgataacgcggtttagccgaactaccaacatgggggtcactgcgatgacatgtggcggcgcatttagaatgttaaagtctggcgctaagttttccagcccccctcatcaccgattaaacagtaaacgaagttggttgacgtcagagcatgttcagtcattaaaacagtaccagcgcctcaacaaaagcctcatacctgaaaactctcggattgcactccgtagaaaatacaaaatcgagcttcaaaatatggtcagatcttggtttgcaatgcaagaccatacccttgattcgaacatacttatccaacatttgaatcatgacctatcttacttaggagccacaaaacgttttgcatacgatccagcgatgaccaagctctttactgagcttttgaaacgagagttatcaaattcaatcaataatggtgagcaacacactaatggatcgtttttagtcctaccgaatatcagggtttgtggcgcaacagctttaagctccccggtaacggtggggattccatcacttacagctttctttggcttcgttcacgcatttgaacggaatataaatcgcaccacctcatcgtttcgtgttgaatcctttgcgatatgcgtccatcaactacatgtcgagaagcgaggtttgacagcagagtttgtggaaaaaggcgacgggactatatccgctcccgcgacccgggatgactggcagtgtgatgtcgtatttagccttattttgaacaccaactttgctcaacatattgaccaagatacgttagttacatcactaccaaagcgattggctcggggttcagcaaaaattgcgattgatgactttaaacatatcaactcattctcgacattagaaacagcgatcgaatctctgccaatagaagctggtaggtggttatcactttacgcacagtcaaacaataatctaagtgatctattagcagccatgacagaggaccatcagctcatggcaagctgcgtcggttaccacttgttagaagagcccaaagataaaccaaactccctcagaggttacaaacacgctatcgccgagtgcatcattggactcattaactcaatcacctttagctcagagactgatcccaacacaatcttttggtcgctaaagaactatcaaaactacctagtggtacagccaaggagtatcaacgatgaaactaccgacaaatctagcctatgagcgctctatcgacccatcagatgtctgtttttttgtcgtctggcccgatgatagaaaaacacctttaacctacaattctcgtactctgctcgggcaaatggaagcggcatcattagcctatgatgtctcaggtcaaccaataaaaagtgccaccgctgaggcgttagctcaagggaaccctcatcaagttgatttctgccacgttccatacggtgcgagtcatattgaatgcagtttctccgtctcgttttcttctgaactacgtcaaccatataagtgtaactcaagcaaagttaaacaaacgctagtgcaattagtcgagctctacgaaacgaaaatcggctggactgagctagcaacccgatatttgatgaacatttgcaacggtaaatggctgtggaaaaatacccgtaaagcctattgctggaacattgtacttacaccttggccttggaacggggaaaaggttggatttgaagatattcgtactaactacacctcacggcaagactttaaaaataataaaaattggtctgctatagttgaaatgatcaaaaccgcattttctagtactgatgggctggcgatatttgaagtcagggccaccttgcacttgccaacgaatgctatggtgcggccaagccaagttttcacagaaaaagaaagtggcagtaaaagtaaatctaaaactcaaaacagtcgagtttttcagagtacaactattgatggtgaacgatcgccaatactaggggcctttaaaacgggagcagctattgcaaccattgacgactggtatcctgaagccactgagccactaagggtcggacggtttggggttcatcgcgaagatgtcacttgctaccgtcatccgtctaccggaaaagattttttctcgatattacaacaagcagagcactatattgaagtgttgagcgccaacaaaactcccgctcaagaaactatcaacgacatgcactttttaatggctaacctgattaagggtgggatgttccagcataaaggagactgactgtgaaatggtattataagacaatcacctttctgccagagttgtgcaacaacgagtcactggctgcaaagtgtctccgcgttctgcatggatttaactatcagtatgagacacgaaatatcggcgtttcatttccgctttggtgtgatgcaacggttggaaaaaagatttcatttgtcagcaagaacaagatagaactcgacttactacttaaacaacactatttcgtccaaatggaacaacttcaatactttcatatatccaacactgttctcgtcccagaagattgtacatacgtttcctttagacgctgtcaatctatagataagctcacagcagcagggctggcaaggaaaatcagacgcctggagaaacgtgctctatctagaggcgagcaatttgacccatcatcttttgctcaaaaagagcatactgcaatagcgcactaccactcacttggggagtccagcaaacagacgaaccgcaactttcgactcaatatcaggatgctctcggagcaaccccgtgaggggaactcgatttttagtagctatggcttatcaaattcagaaaactcgtttcagcctgtacccttaatctaatagcattggaagtggataacggatccgcgatcgcggcgcgccacctggtggccggccggtaccacgcgtgcgcgctgatccggctgctaacaaagcccgaaaggaagctgagttggctgctgccaccgctgagcaataactagcataaccccttggggcctctaaacgggtcttgaggggttttttgctgaaaggaggaactatatccggatatccacaggacgggtgtggtcgccatgatcgcgtagtcgatagtggctccaagtagcgaagcgagcaggactgggcggcggccaaagcggtcggacagtgctccgagaacgggtgcgcatagaaattgcatcaacgcatatagcgctagcagcacgccatagtgactggcgatgctgtcggaatggacgatatcccgcaagaggcccggcagtaccggcataaccaagcctatgcctacagcatccagggtgacggtgccgaggatgacgatgagcgcattgttagatttcatacacggtgcctgactgcgttagcaatttaactgtgataaactaccgcattaaagcttatcgatgataagctgtcaaacatgagaa

SEQ ID NO: 28 - DNA, 10709 bp, Synthetic construct
  source 1..10709: mol_type = other DNA
ttcttgaagacgaaagggcctcgtgatacgcctatttttataggttaatgtcatgataataatggtttcttagacgtcaggtggcacttttcggggaaatgtgcgcggaacccctatttgtttatttttctaaatacattcaaatatgtatccgctcatgagacaataaccctgataaatgcttcaataacattgaaaaaggaagagtatgagtattcaacatttccgtgtcgcccttattcccttttttgcggcattttgccttcctgtttttgctcacccagaaacgctggtgaaagtaaaagatgctgaagatcagttgggtgcacgagtgggttacatcgaactggatctcaacagcggtaagatccttgagagttttcgccccgaagaacgttttccaatgatgagcacttttaaagttctgctatgtggcgcggtattatcccgtgttgacgccgggcaagagcaactcggtcgccgcatacactattctcagaatgacttggttgagtactcaccagtcacagaaaagcatcttacggatggcatgacagtaagagaattatgcagtgctgccataaccatgagtgataacactgcggccaacttacttctgacaacgatcggaggaccgaaggagctaaccgcttttttgcacaacatgggggatcatgtaactcgccttgatcgttgggaaccggagctgaatgaagccataccaaacgacgagcgtgacaccacgatgcctgcagcaatggcaacaacgttgcgcaaactattaactggcgaactacttactctagcttcccggcaacaattaatagactggatggaggcggataaagttgcaggaccacttctgcgctcggcccttccggctggctggtttattgctgataaatctggagccggtgagcgtgggtctcgcggtatcattgcagcactggggccagatggtaagccctcccgtatcgtagttatctacacgacggggagtcaggcaactatggatgaacgaaatagacagatcgctgagataggtgcctcactgattaagcattggtaactgtcagaccaagtttactcatatatactttagattgatttaaaacttcatttttaatttaaaaggatctaggtgaagatcctttttgataatctcatgaccaaaatcccttaacgtgagttttcgttccactgagcgtcagaccccgtagaaaagatcaaaggatcttcttgagatcctttttttctgcgcgtaatctgctgcttgcaaacaaaaaaaccaccgctaccagcggtggtttgtttgccggatcaagagctaccaactctttttccgaaggtaactggcttcagcagagcgcagataccaaatactgtccttctagtgtagccgtagttaggccaccacttcaagaactctgtagcaccgcctacatacctcgctctgctaatcctgttaccagtggctgctgccagtggcgataagtcgtgtcttaccgggttggactcaagacgatagttaccggataaggcgcagcggtcgggctgaacggggggttcgtgcacacagcccagcttggagcgaacgacctacaccgaactgagatacctacagcgtgagctatgagaaagcgccacgcttcccgaagggagaaaggcggacaggtatccggtaagcggcagggtcggaacaggagagcgcacgagggagcttccagggggaaacgcctggtatctttatagtcctgtcgggtttcgccacctctgacttgagcgtcgatttttgtgatgctcgtcaggggggcggagcctatggaaaaacgccagcaacgcggcctttttacggttcctggccttttgctggccttttgctcacatgttctttcctgcgttatcccctgattctgtggataaccgtattaccgcctttgagtgagctgataccgctcgccgcagccgaacgaccgagcgcagcgagtcagtgagcgaggaagcggaagagcgcctgatgcggtattttctccttacgcatctgtgcggtatttcacaccgcatatatggtgcactctcagtacaatctgctctgatgccgcatagttaagccagtatacactccgctatcgctacgtgactgggtcatggctgcgccccgacacccgccaacacccgctgacgcgccctgacgggcttgtctgctcccggcatccgcttacagacaagctgtgaccgtctccgggagctgcatgtgtcagaggttttcaccgtcatcaccgaaacgcgcgaggcagctgcggtaaagctcatcagcgtggtcgtgaagcgattcacagatgtctgcctgttcatccgcgtccagctcgttgagtttctccagaagcgttaatgtctggcttctgataaagcgggccatgttaagggcggttttttcctgtttggtcactgatgcctccgtgtaagggggatttctgttcatgggggtaatgataccgatgaaacgagagaggatgctcacgatacgggttactgatgatgaacatgcccggttactggaacgttgtgagggtaaacaactggcggtatggatgcggcgggaccagagaaaaatcactcagggtcaatgccagcgcttcgttaatacagatgtaggtgttccacagggtagccagcagcatcctgcgatgcagatccggaacataatggtgcagggcgctgacttccgcgtttccagactttacgaaacacggaaaccgaagaccattcatgttgttgctcaggtcgcagacgttttgcagcagcagtcgcttcacgttcgctcgcgtatcggtgattcattctgctaaccagtaaggcaaccccgccagcctagccgggtcctcaacgacaggagcacgatcatgcgcacccgtggccaggacccaacgctgcccgagatgcgccgcgtgcggctgctggagatggcggacgcgatggatatgttctgccaagggttggtttgcgcattcacagttctccgcaagaattgattggctccaattcttggagtggtgaatccgttagcgaggtgccgccggcttccattcaggtcgaggtggcccggctccatgcaccgcgacgcaacgcggggaggcagacaaggtatagggcggcgcctacaatccatgccaacccgttccatgtgctcgccgaggcggcataaatcgccgtgacgatcagcggtccagtgatcgaagttaggctggtaagagccgcgagcgatccttgaagctgtccctgatggtcgtcatctacctgcctggacagcatggcctgcaacgcgggcatcccgatgccgccggaagcgagaagaatcataatggggaaggccatccagcctcgcgtcgcgaacgccagcaagacgtagcccagcgcgtcggccgccatgccggcgataatggcctgcttctcgccgaaacgtttggtggcgggaccagtgacgaaggcttgagcgagggcgtgcaagattccgaataccgcaagcgacaggccgatcatcgtcgcgctccagcgaaagcggtcctcgccgaaaatgacccagagcgctgccggcacctgtcctacgagttgcatgataaagaagacagtcataagtgcggcgacgatagtcatgccccgcgcccaccggaaggagctgactgggttgaaggctctcaagggcatcggtcgacgctctcccttatgcgactcctgcattaggaagcagcccagtagtaggttgaggccgttgagcaccgccgccgcaaggaatggtgcatgcaaggagatggcgcccaacagtcccccggccacggggcctgccaccatacccacgccgaaacaagcgctcatgagcccgaagtggcgagcccgatcttccccatcggtgatgtcggcgatataggcgccagcaaccgcacctgtggcgccggtgatgccggccacgatgcgtccggcgtagaggatcgagatctcgatcccgcgaaattaatacgactcactatagggagaccacaacggtttccctctagtgccggctccggagagctctttaattaagcggccgccctgcaggactcgagttctagaaataattttgtttaactttaagaaggagatatacatatgaaatcttctcaccatcaccatcaccatcaccatcaccatggttcttctatgaaaatcgaagaaggtaaactggtaatctggattaacggcgataaaggctataacggtctcgctgaagtcggtaagaaattcgagaaagataccggaattaaagtcaccgttgagcatccggataaactggaagagaaattcccacaggttgcggcaactggcgatggccctgacattatcttctgggcacacgaccgctttggtggctacgctcaatctggcctgttggctgaaatcaccccggacaaagcgttccaggacaagctgtatccgtttacctgggatgccgtacgttacaacggcaagctgattgcttacccgatcgctgttgaagcgttatcgctgatttataacaaagatctgctgccgaacccgccaaaaacctgggaagagatcccggcgctggataaagaactgaaagcgaaaggtaagagcgcgctgatgttcaacctgcaagaaccgtacttcacctggccgctgattgctgctgacgggggttatgcgttcaagtatgaaaacggcaagtacgacattaaagacgtgggcgtggataacgctggcgcgaaagcgggtctgaccttcctggttgacctgattaaaaacaaacacatgaatgcagacaccgattactccatcgcagaagctgcctttaataaaggcgaaacagcgatgaccatcaacggcccgtgggcatggtccaacatcgacaccagcaaagtgaattatggtgtaacggtactgccgaccttcaagggtcaaccatccaaaccgttcgttggcgtgctgagcgcaggtattaacgccgccagtccgaacaaagagctggcaaaagagttcctcgaaaactatctgctgactgatgaaggtctggaagcggttaataaagacaaaccgctgggtgccgtagcgctgaagtcttacgaggaagagttggcgaaagatccacgtattgccgccactatggaaaacgcccagaaaggtgaaatcatgccgaacatcccgcagatgtccgctttctggtatgccgtgcgtactgcggtgatcaacgccgccagcggtcgtcagactgtcgatgaagccctgaaagacgcgcagactaattcgagctcgaacaacaacaacaataacaataacaacaacctcgggatcgaggaaaacctgtacttccaatccaatgcaatgtttttgcaaagacctaaaccttacagcgatgaaagtttagaaagtttctttatccgagtggctaacaaaaatggctacggtgatgtccatcgcttcctagaagccactaaacgattccttcaagacattgaccataatggctatcaaacctttccgactgatataactcggataaacccatactcagctaaaaacagttccagcgcacgaactgcgtcattcctgaaacttgcacaattgacatttaatgaaccgccagagctacttgggttggcaattaacagaacaaacatgaaatactcgccgtcaactagcgcggttgttagaggtgcagaagtctttcctcgcagtttactacggacgcactccatcccctgctgtcctttgtgtctgcgagaaaatggctacgcctcctacctttggcactttcaggggtacgaatactgccacagccataacgtacctttaattaccacttgtagctgtggtaaggagtttgactaccgagtatctgggttaaagggcatttgctgcaaatgcaaggagcctatcaccttaaccagcagggagaacggtcatgaggcagcgtgtactgtttcaaactggcttgctggccatgaatctaaacctctgccaaatcttcctaaaagctaccgatggggtttagttcattggtggatgggtattaaagatagcgagttcgatcacttttcgttcgttcaatttttctcaaactggccaaggtcattccactcgataatcgaagatgaagtagagttcaaccttgagcatgctgttgtcagcacgtctgaattacgactaaaagatcttcttggtcgattgtttttcggttcaattcggttacctgagcggaatcttcaacacaatatcatccttggtgagcttctctgctatttagaaaatcgtttatggcaagacaagggattaatcgccaacctcaaaatgaacgcgttagaggcgactgtaatgttaaattgtagcctcgatcagattgcatcaatggttgaacaacgcatcttgaagccaaatcgaaaaagcaagcccaacagccctcttgatgttaccgattatctatttcatttcggcgatattttctgtctttggttagctgagttccaaagcgatgagtttaaccgttcgttttatgtgtcgaggtggtaaatgcaaactctgaaagaactaatcgcatccaatcctgacgacttaacaactgaacttaagagagcatttcgtccactcacaccgcatattgcaattgatggtaatgaacttgacgcactgacgatattagtcaatttaaccgataagactgatgatcagaaagacctgctcgatcgagccaaatgcaagcaaaaacttcgagatgaaaaatggtgggctagctgcataaattgcgttaattacagacaaagccataacccaaaattcccggatatacgttctgaaggcgtgattcgaacccaagccctgggtgaattaccgagtttcctactctcgtcctcaaaaatcccaccataccattggtcatatagccatgattcaaaatacgtcaacaaaagcgcattcctcaccaatgagttttgttgggatggtgagatctcatgtttgggtgagcttcttaaagatgcagatcacccactttggaatactttgaaaaagttaggttgttctcaaaaaacttgcaaagcaatggcaaaacaactagctgatattactctcacgactatcaatgtcacactcgcaccaaattacctgactcaaatatctctccccgatagtgatacatcctacatttcactctctcctgttgcatcgctatcgatgcaaagccactttcatcagaggctccaagatgaaaatcggcatagcgcgataacgcggtttagccgaactaccaacatgggggtcactgcgatgacatgtggcggcgcatttagaatgttaaagtctggcgctaagttttccagcccccctcatcaccgattaaacagtaaacgaagttggttgacgtcagagcatgttcagtcattaaaacagtaccagcgcctcaacaaaagcctcatacctgaaaactctcggattgcactccgtagaaaatacaaaatcgagcttcaaaatatggtcagatcttggtttgcaatgcaagaccatacccttgattcgaacatacttatccaacatttgaatcatgacctatcttacttaggagccacaaaacgttttgcatacgatccagcgatgaccaagctctttactgagcttttgaaacgagagttatcaaattcaatcaataatggtgagcaacacactaatggatcgtttttagtcctaccgaatatcagggtttgtggcgcaacagctttaagctccccggtaacggtggggattccatcacttacagctttctttggcttcgttcacgcatttgaacggaatataaatcgcaccacctcatcgtttcgtgttgaatcctttgcgatatgcgtccatcaactacatgtcgagaagcgaggtttgacagcagagtttgtggaaaaaggcgacgggactatatccgctcccgcgacccgggatgactggcagtgtgatgtcgtatttagccttattttgaacaccaactttgctcaacatattgaccaagatacgttagttacatcactaccaaagcgattggctcggggttcagcaaaaattgcgattgatgactttaaacatatcaactcattctcgacattagaaacagcgatcgaatctctgccaatagaagctggtaggtggttatcactttacgcacagtcaaacaataatctaagtgatctattagcagccatgacagaggaccatcagctcatggcaagctgcgtcggttaccacttgttagaagagcccaaagataaaccaaactccctcagaggttacaaacacgctatcgccgagtgcatcattggactcattaactcaatcacctttagctcagagactgatcccaacacaatcttttggtcgctaaagaactatcaaaactacctagtggtacagccaaggagtatcaacgatgaaactaccgacaaatctagcctatgagcgctctatcgacccatcagatgtctgtttttttgtcgtctggcccgatgatagaaaaacacctttaacctacaattctcgtactctgctcgggcaaatggaagcggcatcattagcctatgatgtctcaggtcaaccaataaaaagtgccaccgctgaggcgttagctcaagggaaccctcatcaagttgatttctgccacgttccatacggtgcgagtcatattgaatgcagtttctccgtctcgttttcttctgaactacgtcaaccatataagtgtaactcaagcaaagttaaacaaacgctagtgcaattagtcgagctctacgaaacgaaaatcggctggactgagctagcaacccgatatttgatgaacatttgcaacggtaaatggctgtggaaaaatacccgtaaagcctattgctggaacattgtacttacaccttggccttggaacggggaaaaggttggatttgaagatattcgtactaactacacctcacggcaagactttaaaaataataaaaattggtctgctatagttgaaatgatcaaaaccgcattttctagtactgatgggctggcgatatttgaagtcagggccaccttgcacttgccaacgaatgctatggtgcggccaagccaagttttcacagaaaaagaaagtggcagtaaaagtaaatctaaaactcaaaacagtcgagtttttcagagtacaactattgatggtgaacgatcgccaatactaggggcctttaaaacgggagcagctattgcaaccattgacgactggtatcctgaagccactgagccactaagggtcggacggtttggggttcatcgcgaagatgtcacttgctaccgtcatccgtctaccggaaaagattttttctcgatattacaacaagcagagcactatattgaagtgttgagcgccaacaaaactcccgctcaagaaactatcaacgacatgcactttttaatggctaacctgattaagggtgggatgttccagcataaaggagactgactgtgaaatggtattataagacaatcacctttctgccagagttgtgcaacaacgagtcactggctgcaaagtgtctccgcgttctgcatggatttaactatcagtatgagacacgaaatatcggcgtttcatttccgctttggtgtgatgcaacggttggaaaaaagatttcatttgtcagcaagaacaagatagaactcgacttactacttaaacaacactatttcgtccaaatggaacaacttcaatactttcatatatccaacactgttctcgtcccagaagattgtacatacgtttcctttagacgctgtcaatctatagataagctcacagcagcagggctggcaaggaaaatcagacgcctggagaaacgtgctctatctagaggcgagcaatttgacccatcatcttttgctcaaaaagagcatactgcaatagcgcactaccactcacttggggagtccagcaaacagacgaaccgcaactttcgactcaatatcaggatgctctcggagcaaccccgtgaggggaactcgatttttagtagctatggcttatcaaattcagaaaactcgtttcagcctgtacccttaatctaatagcattggaagtggataacggatccgcgatcgcggcgcgccacctggtggccggccggtaccacgcgtgcgcgctgatccggctgctaacaaagcccgaaaggaagctgagttggctgctgccaccgctgagcaataactagcataaccccttggggcctctaaacgggtcttgaggggttttttgctgaaaggaggaactatatccggatatccacaggacgggtgtggtcgccatgatcgcgtagtcgatagtggctccaagtagcgaagcgagcaggactgggcggcggccaaagcggtcggacagtgctccgagaacgggtgcgcatagaaattgcatcaacgcatatagcgctagcagcacgccatagtgactggcgatgctgtcggaatggacgatatcccgcaagaggcccggcagtaccggcataaccaagcctatgcctacagcatccagggtgacggtgccgaggatgacgatgagcgcattgttagatttcatacacggtgcctgactgcgttagcaatttaactgtgataaactaccgcattaaagcttatcgatgataagctgtcaaacatgagaa

SEQ ID NO: 29 - DNA, 7193 bp, Synthetic construct
  source 1..7193: mol_type = other DNA
ttcttgaagacgaaagggcctcgtgatacgcctatttttataggttaatgtcatgataataatggtttcttagacgtcaggtggcacttttcggggaaatgtgcgcggaacccctatttgtttatttttctaaatacattcaaatatgtatccgctcatgagacaataaccctgataaatgcttcaataacattgaaaaaggaagagtatgagtattcaacatttccgtgtcgcccttattcccttttttgcggcattttgccttcctgtttttgctcacccagaaacgctggtgaaagtaaaagatgctgaagatcagttgggtgcacgagtgggttacatcgaactggatctcaacagcggtaagatccttgagagttttcgccccgaagaacgttttccaatgatgagcacttttaaagttctgctatgtggcgcggtattatcccgtgttgacgccgggcaagagcaactcggtcgccgcatacactattctcagaatgacttggttgagtactcaccagtcacagaaaagcatcttacggatggcatgacagtaagagaattatgcagtgctgccataaccatgagtgataacactgcggccaacttacttctgacaacgatcggaggaccgaaggagctaaccgcttttttgcacaacatgggggatcatgtaactcgccttgatcgttgggaaccggagctgaatgaagccataccaaacgacgagcgtgacaccacgatgcctgcagcaatggcaacaacgttgcgcaaactattaactggcgaactacttactctagcttcccggcaacaattaatagactggatggaggcggataaagttgcaggaccacttctgcgctcggcccttccggctggctggtttattgctgataaatctggagccggtgagcgtgggtctcgcggtatcattgcagcactggggccagatggtaagccctcccgtatcgtagttatctacacgacggggagtcaggcaactatggatgaacgaaatagacagatcgctgagataggtgcctcactgattaagcattggtaactgtcagaccaagtttactcatatatactttagattgatttaaaacttcatttttaatttaaaaggatctaggtgaagatcctttttgataatctcatgaccaaaatcccttaacgtgagttttcgttccactgagcgtcagaccccgtagaaaagatcaaaggatcttcttgagatcctttttttctgcgcgtaatctgctgcttgcaaacaaaaaaaccaccgctaccagcggtggtttgtttgccggatcaagagctaccaactctttttccgaaggtaactggcttcagcagagcgcagataccaaatactgtccttctagtgtagccgtagttaggccaccacttcaagaactctgtagcaccgcctacatacctcgctctgctaatcctgttaccagtggctgctgccagtggcgataagtcgtgtcttaccgggttggactcaagacgatagttaccggataaggcgcagcggtcgggctgaacggggggttcgtgcacacagcccagcttggagcgaacgacctacaccgaactgagatacctacagcgtgagctatgagaaagcgccacgcttcccgaagggagaaaggcggacaggtatccggtaagcggcagggtcggaacaggagagcgcacgagggagcttccagggggaaacgcctggtatctttatagtcctgtcgggtttcgccacctctgacttgagcgtcgatttttgtgatgctcgtcaggggggcggagcctatggaaaaacgccagcaacgcggcctttttacggttcctggccttttgctggccttttgctcacatgttctttcctgcgttatcccctgattctgtggataaccgtattaccgcctttgagtgagctgataccgctcgccgcagccgaacgaccgagcgcagcgagtcagtgagcgaggaagcggaagagcgcctgatgcggtattttctccttacgcatctgtgcggtatttcacaccgcatatatggtgcactctcagtacaatctgctctgatgccgcatagttaagccagtatacactccgctatcgctacgtgactgggtcatggctgcgccccgacacccgccaacacccgctgacgcgccctgacgggcttgtctgctcccggcatccgcttacagacaagctgtgaccgtctccgggagctgcatgtgtcagaggttttcaccgtcatcaccgaaacgcgcgaggcagctgcggtaaagctcatcagcgtggtcgtgaagcgattcacagatgtctgcctgttcatccgcgtccagctcgttgagtttctccagaagcgttaatgtctggcttctgataaagcgggccatgttaagggcggttttttcctgtttggtcactgatgcctccgtgtaagggggatttctgttcatgggggtaatgataccgatgaaacgagagaggatgctcacgatacgggttactgatgatgaacatgcccggttactggaacgttgtgagggtaaacaactggcggtatggatgcggcgggaccagagaaaaatcactcagggtcaatgccagcgcttcgttaatacagatgtaggtgttccacagggtagccagcagcatcctgcgatgcagatccggaacataatggtgcagggcgctgacttccgcgtttccagactttacgaaacacggaaaccgaagaccattcatgttgttgctcaggtcgcagacgttttgcagcagcagtcgcttcacgttcgctcgcgtatcggtgattcattctgctaaccagtaaggcaaccccgccagcctagccgggtcctcaacgacaggagcacgatcatgcgcacccgtggccaggacccaacgctgcccgagatgcgccgcgtgcggctgctggagatggcggacgcgatggatatgttctgccaagggttggtttgcgcattcacagttctccgcaagaattgattggctccaattcttggagtggtgaatccgttagcgaggtgccgccggcttccattcaggtcgaggtggcccggctccatgcaccgcgacgcaacgcggggaggcagacaaggtatagggcggcgcctacaatccatgccaacccgttccatgtgctcgccgaggcggcataaatcgccgtgacgatcagcggtccagtgatcgaagttaggctggtaagagccgcgagcgatccttgaagctgtccctgatggtcgtcatctacctgcctggacagcatggcctgcaacgcgggcatcccgatgccgccggaagcgagaagaatcataatggggaaggccatccagcctcgcgtcgcgaacgccagcaagacgtagcccagcgcgtcggccgccatgccggcgataatggcctgcttctcgccgaaacgtttggtggcgggaccagtgacgaaggcttgagcgagggcgtgcaagattccgaataccgcaagcgacaggccgatcatcgtcgcgctccagcgaaagcggtcctcgccgaaaatgacccagagcgctgccggcacctgtcctacgagttgcatgataaagaagacagtcataagtgcggcgacgatagtcatgccccgcgcccaccggaaggagctgactgggttgaaggctctcaagggcatcggtcgacgctctcccttatgcgactcctgcattaggaagcagcccagtagtaggttgaggccgttgagcaccgccgccgcaaggaatggtgcatgcaaggagatggcgcccaacagtcccccggccacggggcctgccaccatacccacgccgaaacaagcgctcatgagcccgaagtggcgagcccgatcttccccatcggtgatgtcggcgatataggcgccagcaaccgcacctgtggcgccggtgatgccggccacgatgcgtccggcgtagaggatcgagatctcgatcccgcgaaattaatacgactcactatagggagaccacaacggtttccctctagtgccggctccggagagctctttaattaagcggccgccctgcaggactcgagttctagaaataattttgtttaactttaagaaggagatatacatatgaaatcttctcaccatcaccatcaccatcaccatcaccatggttcttctatgaaaatcgaagaaggtaaactggtaatctggattaacggcgataaaggctataacggtctcgctgaagtcggtaagaaattcgagaaagataccggaattaaagtcaccgttgagcatccggataaactggaagagaaattcccacaggttgcggcaactggcgatggccctgacattatcttctgggcacacgaccgctttggtggctacgctcaatctggcctgttggctgaaatcaccccggacaaagcgttccaggacaagctgtatccgtttacctgggatgccgtacgttacaacggcaagctgattgcttacccgatcgctgttgaagcgttatcgctgatttataacaaagatctgctgccgaacccgccaaaaacctgggaagagatcccggcgctggataaagaactgaaagcgaaaggtaagagcgcgctgatgttcaacctgcaagaaccgtacttcacctggccgctgattgctgctgacgggggttatgcgttcaagtatgaaaacggcaagtacgacattaaagacgtgggcgtggataacgctggcgcgaaagcgggtctgaccttcctggttgacctgattaaaaacaaacacatgaatgcagacaccgattactccatcgcagaagctgcctttaataaaggcgaaacagcgatgaccatcaacggcccgtgggcatggtccaacatcgacaccagcaaagtgaattatggtgtaacggtactgccgaccttcaagggtcaaccatccaaaccgttcgttggcgtgctgagcgcaggtattaacgccgccagtccgaacaaagagctggcaaaagagttcctcgaaaactatctgctgactgatgaaggtctggaagcggttaataaagacaaaccgctgggtgccgtagcgctgaagtcttacgaggaagagttggcgaaagatccacgtattgccgccactatggaaaacgcccagaaaggtgaaatcatgccgaacatcccgcagatgtccgctttctggtatgccgtgcgtactgcggtgatcaacgccgccagcggtcgtcagactgtcgatgaagccctgaaagacgcgcagactaattcgagctcgaacaacaacaacaataacaataacaacaacctcgggatcgaggaaaacctgtacttccaatccaatgcatggagccacccgcagttcgaaaaaggtggcagcggttctatgtttttgcaaagacctaaaccttacagcgatgaaagtttagaaagtttctttatccgagtggctaacaaaaatggctacggtgatgtccatcgcttcctagaagccactaaacgattccttcaagacattgaccataatggctatcaaacctttccgactgatataactcggataaacccatactcagctaaaaacagttccagcgcacgaactgcgtcattcctgaaacttgcacaattgacatttaatgaaccgccagagctacttgggttggcaattaacagaacaaacatgaaatactcgccgtcaactagcgcggttgttagaggtgcagaagtctttcctcgcagtttactacggacgcactccatcccctgctgtcctttgtgtctgcgagaaaatggctacgcctcctacctttggcactttcaggggtacgaatactgccacagccataacgtacctttaattaccacttgtagctgtggtaaggagtttgactaccgagtatctgggttaaagggcatttgctgcaaatgcaaggagcctatcaccttaaccagcagggagaacggtcatgaggcagcgtgtactgtttcaaactggcttgctggccatgaatctaaacctctgccaaatcttcctaaaagctaccgatggggtttagttcattggtggatgggtattaaagatagcgagttcgatcacttttcgttcgttcaatttttctcaaactggccaaggtcattccactcgataatcgaagatgaagtagagttcaaccttgagcatgctgttgtcagcacgtctgaattacgactaaaagatcttcttggtcgattgtttttcggttcaattcggttacctgagcggaatcttcaacacaatatcatccttggtgagcttctctgctatttagaaaatcgtttatggcaagacaagggattaatcgccaacctcaaaatgaacgcgttagaggcgactgtaatgttaaattgtagcctcgatcagattgcatcaatggttgaacaacgcatcttgaagccaaatcgaaaaagcaagcccaacagccctcttgatgttaccgattatctatttcatttcggcgatattttctgtctttggttagctgagttccaaagcgatgagtttaaccgttcgttttatgtgtcgaggtggtaatagcattggaagtggataacggatccgcgatcgcggcgcgccacctggtggccggccggtaccacgcgtgcgcgctgatccggctgctaacaaagcccgaaaggaagctgagttggctgctgccaccgctgagcaataactagcataaccccttggggcctctaaacgggtcttgaggggttttttgctgaaaggaggaactatatccggatatccacaggacgggtgtggtcgccatgatcgcgtagtcgatagtggctccaagtagcgaagcgagcaggactgggcggcggccaaagcggtcggacagtgctccgagaacgggtgcgcatagaaattgcatcaacgcatatagcgctagcagcacgccatagtgactggcgatgctgtcggaatggacgatatcccgcaagaggcccggcagtaccggcataaccaagcctatgcctacagcatccagggtgacggtgccgaggatgacgatgagcgcattgttagatttcatacacggtgcctgactgcgttagcaatttaactgtgataaactaccgcattaaagcttatcgatgataagctgtcaaacatgagaa

SEQ ID NO: 30 - DNA, 3739 bp, Synthetic construct
  source 1..3739: mol_type = other DNA
ggggaattgtgagcggataacaattcccctgtagaaataattttgtttaactttaataaggagatataccatgggtgaactgccgagtaggtagctgataacttacaggacgctttggcttcattgcttttcaggtgaactgccgagtaggtagctgataaccctaggctgctgccaccgctgagcaataactagcataaccccttggggcctctaaacgggtcttgaggggttttttgctgaaacctcaggcatttgagaagcacacggtcacactgcttccggtagtcaataaaccggtaaaccagcaatagacataagcggctatttaacgaccctgccctgaaccgacgaccgggtcgaatttgctttcgaatttctgccattcatccgcttattatcacttattcaggcgtagcaaccaggcgtttaagggcaccaataactgccttaaaaaaattacgccccgccctgccactcatcgcagtactgttgtaattcattaagcattctgccgacatggaagccatcacaaacggcatgatgaacctgaatcgccagcggcatcagcaccttgtcgccttgcgtataatatttgcccatagtgaaaacgggggcgaagaagttgtccatattggccacgtttaaatcaaaactggtgaaactcacccagggattggctgagacgaaaaacatattctcaataaaccctttagggaaataggccaggttttcaccgtaacacgccacatcttgcgaatatatgtgtagaaactgccggaaatcgtcgtggtattcactccagagcgatgaaaacgtttcagtttgctcatggaaaacggtgtaacaagggtgaacactatcccatatcaccagctcaccgtctttcattgccatacggaactccggatgagcattcatcaggcgggcaagaatgtgaataaaggccggataaaacttgtgcttatttttctttacggtctttaaaaaggccgtaatatccagctgaacggtctggttataggtacattgagcaactgactgaaatgcctcaaaatgttctttacgatgccattgggatatatcaacggtggtatatccagtgatttttttctccattttagcttccttagctcctgaaaatctcgataactcaaaaaatacgcccggtagtgatcttatttcattatggtgaaagttggaacctcttacgtgccgatcaacgtctcattttcgccaaaagttggcccagggcttcccggtatcaacagggacaccaggatttatttattctgcgaagtgatcttccgtcacaggtatttattcggcgcaaagtgcgtcgggtgatgctgccaacttactgatttagtgtatgatggtgtttttgaggtgctccagtggcttctgtttctatcagctgtccctcctgttcagctactgacggggtggtgcgtaacggcaaaagcaccgccggacatcagcgctagcggagtgtatactggcttactatgttggcactgatgagggtgtcagtgaagtgcttcatgtggcaggagaaaaaaggctgcaccggtgcgtcagcagaatatgtgatacaggatatattccgcttcctcgctcactgactcgctacgctcggtcgttcgactgcggcgagcggaaatggcttacgaacggggcggagatttcctggaagatgccaggaagatacttaacagggaagtgagagggccgcggcaaagccgtttttccataggctccgcccccctgacaagcatcacgaaatctgacgctcaaatcagtggtggcgaaacccgacaggactataaagataccaggcgtttcccctggcggctccctcgtgcgctctcctgttcctgcctttcggtttaccggtgtcattccgctgttatggccgcgtttgtctcattccacgcctgacactcagttccgggtaggcagttcgctccaagctggactgtatgcacgaaccccccgttcagtccgaccgctgcgccttatccggtaactatcgtcttgagtccaacccggaaagacatgcaaaagcaccactggcagcagccactggtaattgatttagaggagttagtcttgaagtcatgcgccggttaaggctaaactgaaaggacaagttttggtgactgcgctcctccaagccagttacctcggttcaaagagttggtagctcagagaaccttcgaaaaaccgccctgcaaggcggttttttcgttttcagagcaagagattacgcgcagaccaaaacgatctcaagaagatcatcttattaatcagataaaatatttctagatttcagtgcaatttatctcttcaaatgtagcacctgaagtcagccccatacgatataagttgtaattctcatgttagtcatgccccgcgcccaccggaaggagctgactgggttgaaggctctcaagggcatcggtcgagatcccggtgcctaatgagtgagctaacttacattaattgcgttgcgctcactgcccgctttccagtcgggaaacctgtcgtgccagctgcattaatgaatcggccaacgcgcggggagaggcggtttgcgtattgggcgccagggtggtttttcttttcaccagtgagacgggcaacagctgattgcccttcaccgcctggccctgagagagttgcagcaagcggtccacgctggtttgccccagcaggcgaaaatcctgtttgatggtggttaacggcgggatataacatgagctgtcttcggtatcgtcgtatcccactaccgagatgtccgcaccaacgcgcagcccggactcggtaatggcgcgcattgcgcccagcgccatctgatcgttggcaaccagcatcgcagtgggaacgatgccctcattcagcatttgcatggtttgttgaaaaccggacatggcactccagtcgccttcccgttccgctatcggctgaatttgattgcgagtgagatatttatgccagccagccagacgcagacgcgccgagacagaacttaatgggcccgctaacagcgcgatttgctggtgacccaatgcgaccagatgctccacgcccagtcgcgtaccgtcttcatgggagaaaataatactgttgatgggtgtctggtcagagacatcaagaaataacgccggaacattagtgcaggcagcttccacagcaatggcatcctggtcatccagcggatagttaatgatcagcccactgacgcgttgcgcgagaagattgtgcaccgccgctttacaggcttcgacgccgcttcgttctaccatcgacaccaccacgctggcacccagttgatcggcgcgagatttaatcgccgcgacaatttgcgacggcgcgtgcagggccagactggaggtggcaacgccaatcagcaacgactgtttgcccgccagttgttgtgccacgcggttgggaatgtaattcagctccgccatcgccgcttccactttttcccgcgttttcgcagaaacgtggctggcctggttcaccacgcgggaaacggtctgataagagacaccggcatactctgcgacatcgtataacgttactggtttcacattcaccaccctgaattgactctcttccgggcgctatcatgccataccgcgaaaggttttgcgccattcgatggtgtccgggatctcgacgctctcccttatgcgactcctgcattaggaaattaatacgactcactata

SEQ ID NO: 31 - DNA, 3739 bp, Synthetic construct
  source 1..3739: mol_type = other DNA
actgcggcgagcggaaatggcttacgaacggggcggagatttcctggaagatgccaggaagatacttaacagggaagtgagagggccgcggcaaagccgtttttccataggctccgcccccctgacaagcatcacgaaatctgacgctcaaatcagtggtggcgaaacccgacaggactataaagataccaggcgtttcccctggcggctccctcgtgcgctctcctgttcctgcctttcggtttaccggtgtcattccgctgttatggccgcgtttgtctcattccacgcctgacactcagttccgggtaggcagttcgctccaagctggactgtatgcacgaaccccccgttcagtccgaccgctgcgccttatccggtaactatcgtcttgagtccaacccggaaagacatgcaaaagcaccactggcagcagccactggtaattgatttagaggagttagtcttgaagtcatgcgccggttaaggctaaactgaaaggacaagttttggtgactgcgctcctccaagccagttacctcggttcaaagagttggtagctcagagaaccttcgaaaaaccgccctgcaaggcggttttttcgttttcagagcaagagattacgcgcagaccaaaacgatctcaagaagatcatcttattaatcagataaaatatttctagatttcagtgcaatttatctcttcaaatgtagcacctgaagtcagccccatacgatataagttgtaattctcatgttagtcatgccccgcgcccaccggaaggagctgactgggttgaaggctctcaagggcatcggtcgagatcccggtgcctaatgagtgagctaacttacattaattgcgttgcgctcactgcccgctttccagtcgggaaacctgtcgtgccagctgcattaatgaatcggccaacgcgcggggagaggcggtttgcgtattgggcgccagggtggtttttcttttcaccagtgagacgggcaacagctgattgcccttcaccgcctggccctgagagagttgcagcaagcggtccacgctggtttgccccagcaggcgaaaatcctgtttgatggtggttaacggcgggatataacatgagctgtcttcggtatcgtcgtatcccactaccgagatgtccgcaccaacgcgcagcccggactcggtaatggcgcgcattgcgcccagcgccatctgatcgttggcaaccagcatcgcagtgggaacgatgccctcattcagcatttgcatggtttgttgaaaaccggacatggcactccagtcgccttcccgttccgctatcggctgaatttgattgcgagtgagatatttatgccagccagccagacgcagacgcgccgagacagaacttaatgggcccgctaacagcgcgatttgctggtgacccaatgcgaccagatgctccacgcccagtcgcgtaccgtcttcatgggagaaaataatactgttgatgggtgtctggtcagagacatcaagaaataacgccggaacattagtgcaggcagcttccacagcaatggcatcctggtcatccagcggatagttaatgatcagcccactgacgcgttgcgcgagaagattgtgcaccgccgctttacaggcttcgacgccgcttcgttctaccatcgacaccaccacgctggcacccagttgatcggcgcgagatttaatcgccgcgacaatttgcgacggcgcgtgcagggccagactggaggtggcaacgccaatcagcaacgactgtttgcccgccagttgttgtgccacgcggttgggaatgtaattcagctccgccatcgccgcttccactttttcccgcgttttcgcagaaacgtggctggcctggttcaccacgcgggaaacggtctgataagagacaccggcatactctgcgacatcgtataacgttactggtttcacattcaccaccctgaattgactctcttccgggcgctatcatgccataccgcgaaaggttttgcgccattcgatggtgtccgggatctcgacgctctcccttatgcgactcctgcattaggaaattaatacgactcactataggggaattgtgagcggataacaattcccctgtagaaataattttgtttaactttaataaggagatataccatgggtgaactgccgagtaggtagctgataactatcccattacggtcaatccgccgtttgttccgtgaactgccgagtaggtagctgataaccctaggctgctgccaccgctgagcaataactagcataaccccttggggcctctaaacgggtcttgaggggttttttgctgaaacctcaggcatttgagaagcacacggtcacactgcttccggtagtcaataaaccggtaaaccagcaatagacataagcggctatttaacgaccctgccctgaaccgacgaccgggtcgaatttgctttcgaatttctgccattcatccgcttattatcacttattcaggcgtagcaaccaggcgtttaagggcaccaataactgccttaaaaaaattacgccccgccctgccactcatcgcagtactgttgtaattcattaagcattctgccgacatggaagccatcacaaacggcatgatgaacctgaatcgccagcggcatcagcaccttgtcgccttgcgtataatatttgcccatagtgaaaacgggggcgaagaagttgtccatattggccacgtttaaatcaaaactggtgaaactcacccagggattggctgagacgaaaaacatattctcaataaaccctttagggaaataggccaggttttcaccgtaacacgccacatcttgcgaatatatgtgtagaaactgccggaaatcgtcgtggtattcactccagagcgatgaaaacgtttcagtttgctcatggaaaacggtgtaacaagggtgaacactatcccatatcaccagctcaccgtctttcattgccatacggaactccggatgagcattcatcaggcgggcaagaatgtgaataaaggccggataaaacttgtgcttatttttctttacggtctttaaaaaggccgtaatatccagctgaacggtctggttataggtacattgagcaactgactgaaatgcctcaaaatgttctttacgatgccattgggatatatcaacggtggtatatccagtgatttttttctccattttagcttccttagctcctgaaaatctcgataactcaaaaaatacgcccggtagtgatcttatttcattatggtgaaagttggaacctcttacgtgccgatcaacgtctcattttcgccaaaagttggcccagggcttcccggtatcaacagggacaccaggatttatttattctgcgaagtgatcttccgtcacaggtatttattcggcgcaaagtgcgtcgggtgatgctgccaacttactgatttagtgtatgatggtgtttttgaggtgctccagtggcttctgtttctatcagctgtccctcctgttcagctactgacggggtggtgcgtaacggcaaaagcaccgccggacatcagcgctagcggagtgtatactggcttactatgttggcactgatgagggtgtcagtgaagtgcttcatgtggcaggagaaaaaaggctgcaccggtgcgtcagcagaatatgtgatacaggatatattccgcttcctcgctcactgactcgctacgctcggtcgttcg

SEQ ID NO: 32 - DNA, 8158 bp, Synthetic construct
  source 1..8158: mol_type = other DNA
taatacgactcactataggggaattgtgagcggataacaattcccctgtagaaataattttgtttaactttaataaggagatataccatggcgacaagtttacctacgccctcagcaattacgacttcggcgttagagtatgcattccatactcccgctcgcaatctaacgaaatctcgcggaaaaaacattcatcgttatgtcagtgtaaagatgagtaagaggattacggtagaatctactctagagtgtgatgcctgctatcactttgattttgagccaagtattgttcgcttttgcgctcaaccgattcgatttttatattatctcaatggtcagtctcactcctatgttcctgactttctagttcaatttgataccaacgagtttgttctatatgaagtaaagtcagcttatgctaagaacaaacctgattttgatgttgaatgggaggcgaaagtaaaagcagcaactgaactagggctagaattggagcttgttgaagagagtgatattagggatacggttgtattaaataatcttaagcgcatgcatcgttatgcttcgaaagatgagctgaataacgtacataactctctcttaaaaataataaagtacaatggcgcccaatctgcaagatgcttgggagaacagttgggtttaaaaggccgaactgttttaccaattttgtgcgatttgctgtcaaggtgtttactcgatacacgtttggataagcctctatctcttgaatctcgatttgagttggccagttatggctaagaaagggttctcaagtttccatagaaaagcagtctcttcccaagatacgcttgaatcgatagagcttgtctctagcgctaattgtctagaaagtgttacgtatcaagatatatcagcatttcccgaaacaattgcggtagagattaatttccgattaagcattcttcgctttttagcgcgaaagtgcgaaaccattgtggccaaatcaattgaaccacatcgtgtagagctacagcaaaactatagtagaaaaatacccagtgcaataacgatatatcgatggtggcttgcttttcgaaaatcagactacaaccccattagcttagcacctaatatcaaggatagaggtaatagagagacaaaagtgtcaacagttgttgattctattatggaacaggcagttgaaagagttatatctggacgaaaagtcaatgttagctctgcatataaacgtgttcgacgaaaagttcgtcaatacaatctaactcatggaacgaaatacacgtatcctaagtacgaatctgtaagaaagcgagtaaaaaagaaaaccccatttgagttattagccgcagggaaaggggagagagtagctaagagagagtttcgccgaatgggaaaaaagatcctcacgtctagcgtgctagagagggttgaaatagatcacactgtcgttgacctttttgcagtacacgaagagtatcgaatcccattgggccgaccttggcttactcaattggttgattgttacagtaaagctgtaatcggtttttatttaggtttcgagcctcctagctatgtgtcggtttcccttgcacttaagaatgcaatacaacgcaaagatgacttaatctcctcgtatgaatcgatcgagaatgaatggctatgttatggcatcccagacctactcgtaactgataatggtaaagagtttttgtcgaaagcatttgatcaagcatgtgaatcactattgatcaatgtgcatcaaaataaagttgagacgcccgacaacaaacctcatgttgaacgtaactacgggactattaatacttctctgttagacgatttacctgggaaatccttcagccagtaccttcaaagagaagggtacgactctgtgggagaagctacccttacactcaatgagattagagaaatttacttaatttggttggtggatatttatcataaaaaacccaatcagagaggcactaattgtcctaatgttgcgtggaaaaagggttgtcaagaatgggaaccagaggagttctctggttctaaagacgaattagactttaaatttgctattgttgattacaaacaacttactaaagtagggataactgtctacaaagaactgagttatagcaatgaccgtttagctgaatatagagggaagaaaggaaaccataaagttcagttcaagtataaccctgagtgtatggcagttatttgggtgttggatgaggatatgaatgagtactttacagttaatgcgattgactacgaatatgcaagtagagtatcactttggcaacataaatataacatgaaatatcaagcagaactaaattcagcagaatatgatgaggacaaggaaattgatgcagaaataaaaattgaagaaatcgcagatcgttcaattgttaagactaacaaaatcagagctcggaggcgtggcgctaggcatcaagagaatagcgcaagggctaagtcaatcagtaatgcgaacccggcctcgatacaaaaacatgaagatgaaatcgttagtgcagataatgacgattgggatattgattatgtctgagaaatcgtcaaatgagtgaaacgcgtgaggctcgtatatcaagagctaaaagggcatttgtatccacaccgagcgttaggaaaatcttgagttacatggatagatgtagagatctatcagacctagagtctgagcctacatgcatgatggtctatggtgcttcgggtgtaggtaaaacgaccgtcatcaagaaatacttaaatcaaaacagaagagagtccgaagccgggggcgatataataccggttttgcatattgagttgccagacaatgcgaagccagtagatgcagcaagggaattgctggttgaaatgggtgacccgctagcactttatgaaactgacttagctagattgacgaaaagactgactgaattaatccctgcggtcggcgtgaagctgattattatcgatgagttccaacatttggtggaagaaaggtcaaatcgggttcttacccaagtaggtaattggctaaaaatgatacttaacaaaacgaaatgtccaattgttatatttggtatgccatactcaaaagttgtactgcaagcaaactcgcaacttcacgggcgattttccattcaggttgaactgcgcccctttagctaccagggaggtagaggtgtatttaaaacttttttggaataccttgataaagccctaccttttgaaaaacaggctggcttagccaacgaaagtttgcagaaaaaattgtatgcattctctcagggaaacatgcgttcgttgagaaaccttatttatcaagcatctatcgaagcaattgataatcagcatgagacgataaccgaagaagatttcgtttttgcatcgaagttgacatcgggcgataaacccaactcatggaaaaatccttttgaggagggtgttgaggtaacagaagatatgttacgaccgccaccaaaagatattggttgggaggactatttgagacattcaaccccgagagtgagtaaaccaggtagaaataaaaactttttcgaataacctaggcacggccgcataatcgaaattaatacgactcactataggggaattgtgagcggataacaattccccatcttagtatattagttaagtataagaaggagatatacatatgtttttgcaaagacctaaaccttacagcgatgaaagtttagaaagtttctttatccgagtggctaacaaaaatggctacggtgatgtccatcgcttcctagaagccactaaacgattccttcaagacattgaccataatggctatcaaacctttccgactgatataactcggataaacccatactcagctaaaaacagttccagcgcacgaactgcgtcattcctgaaacttgcacaattgacatttaatgaaccgccagagctacttgggttggcaattaacagaacaaacatgaaatactcgccgtcaactagcgcggttgttagaggtgcagaagtctttcctcgcagtttactacggacgcactccatcccctgctgtcctttgtgtctgcgagaaaatggctacgcctcctacctttggcactttcaggggtacgaatactgccacagccataacgtacctttaattaccacttgtagctgtggtaaggagtttgactaccgagtatctgggttaaagggcatttgctgcaaatgcaaggagcctatcaccttaaccagcagggagaacggtcatgaggcagcgtgtactgtttcaaactggcttgctggccatgaatctaaacctctgccaaatcttcctaaaagctaccgatggggtttagttcattggtggatgggtattaaagatagcgagttcgatcacttttcgttcgttcaatttttctcaaactggccaaggtcattccactcgataatcgaagatgaagtagagttcaaccttgagcatgctgttgtcagcacgtctgaattacgactaaaagatcttcttggtcgattgtttttcggttcaattcggttacctgagcggaatcttcaacacaatatcatccttggtgagcttctctgctatttagaaaatcgtttatggcaagacaagggattaatcgccaacctcaaaatgaacgcgttagaggcgactgtaatgttaaattgtagcctcgatcagattgcatcaatggttgaacaacgcatcttgaagccaaatcgaaaaagcaagcccaacagccctcttgatgttaccgattatctatttcatttcggcgatattttctgtctttggttagctgagttccaaagcgatgagtttaaccgttcgttttatgtgtcgaggtggtaaatgcctaggctgctgccaccgctgagcaataactagcataaccccttggggcctctaaacgggtcttgaggggttttttgctgaaacctcaggcatttgagaagcacacggtcacactgcttccggtagtcaataaaccggtaaaccagcaatagacataagcggctatttaacgaccctgccctgaaccgacgacaagctgacgaccgggtctccgcaagtggcacttttcggggaaatgtgcgcggaacccctatttgtttatttttctaaatacattcaaatatgtatccgctcatgaattaattcttagaaaaactcatcgagcatcaaatgaaactgcaatttattcatatcaggattatcaataccatatttttgaaaaagccgtttctgtaatgaaggagaaaactcaccgaggcagttccataggatggcaagatcctggtatcggtctgcgattccgactcgtccaacatcaatacaacctattaatttcccctcgtcaaaaataaggttatcaagtgagaaatcaccatgagtgacgactgaatccggtgagaatggcaaaagtttatgcatttctttccagacttgttcaacaggccagccattacgctcgtcatcaaaatcactcgcatcaaccaaaccgttattcattcgtgattgcgcctgagcgagacgaaatacgcggtcgctgttaaaaggacaattacaaacaggaatcgaatgcaaccggcgcaggaacactgccagcgcatcaacaatattttcacctgaatcaggatattcttctaatacctggaatgctgttttcccggggatcgcagtggtgagtaaccatgcatcatcaggagtacggataaaatgcttgatggtcggaagaggcataaattccgtcagccagtttagtctgaccatctcatctgtaacatcattggcaacgctacctttgccatgtttcagaaacaactctggcgcatcgggcttcccatacaatcgatagattgtcgcacctgattgcccgacattatcgcgagcccatttatacccatataaatcagcatccatgttggaatttaatcgcggcctagagcaagacgtttcccgttgaatatggctcatactcttcctttttcaatattattgaagcatttatcagggttattgtctcatgagcggatacatatttgaatgtatttagaaaaataaacaaataggcatgctagcgcagaaacgtcctagaagatgccaggaggatacttagcagagagacaataaggccggagcgaagccgtttttccataggctccgcccccctgacgaacatcacgaaatctgacgctcaaatcagtggtggcgaaacccgacaggactataaagataccaggcgtttccccctgatggctccctcttgcgctctcctgttcccgtcctgcggcgtccgtgttgtggtggaggctttacccaaatcaccacgtcccgttccgtgtagacagttcgctccaagctgggctgtgtgcaagaaccccccgttcagcccgactgctgcgccttatccggtaactatcatcttgagtccaacccggaaagacacgacaaaacgccactggcagcagccattggtaactgagaattagtggatttagatatcgagagtcttgaagtggtggcctaacagaggctacactgaaaggacagtatttggtatctgcgctccactaaagccagttaccaggttaagcagttccccaactgacttaaccttcgatcaaaccgcctccccaggcggttttttcgtttacagagcaggagattacgacgatcgtaaaaggatctcaagaagatcctttacggattcccgacaccatcactctagatttcagtgcaatttatctcttcaaatgtagcacctgaagtcagccccatacgatataagttgtaattctcatgttagtcatgccccgcgcccaccggaaggagctgactgggttgaaggctctcaagggcatcggtcgagatcccggtgcctaatgagtgagctaacttacattaattgcgttgcgctcactgcccgctttccagtcgggaaacctgtcgtgccagctgcattaatgaatcggccaacgcgcggggagaggcggtttgcgtattgggcgccagggtggtttttcttttcaccagtgagacgggcaacagctgattgcccttcaccgcctggccctgagagagttgcagcaagcggtccacgctggtttgccccagcaggcgaaaatcctgtttgatggtggttaacggcgggatataacatgagctgtcttcggtatcgtcgtatcccactaccgagatgtccgcaccaacgcgcagcccggactcggtaatggcgcgcattgcgcccagcgccatctgatcgttggcaaccagcatcgcagtgggaacgatgccctcattcagcatttgcatggtttgttgaaaaccggacatggcactccagtcgccttcccgttccgctatcggctgaatttgattgcgagtgagatatttatgccagccagccagacgcagacgcgccgagacagaacttaatgggcccgctaacagcgcgatttgctggtgacccaatgcgaccagatgctccacgcccagtcgcgtaccgtcttcatgggagaaaataatactgttgatgggtgtctggtcagagacatcaagaaataacgccggaacattagtgcaggcagcttccacagcaatggcatcctggtcatccagcggatagttaatgatcagcccactgacgcgttgcgcgagaagattgtgcaccgccgctttacaggcttcgacgccgcttcgttctaccatcgacaccaccacgctggcacccagttgatcggcgcgagatttaatcgccgcgacaatttgcgacggcgcgtgcagggccagactggaggtggcaacgccaatcagcaacgactgtttgcccgccagttgttgtgccacgcggttgggaatgtaattcagctccgccatcgccgcttccactttttcccgcgttttcgcagaaacgtggctggcctggttcaccacgcgggaaacggtctgataagagacaccggcatactctgcgacatcgtataacgttactggtttcacattcaccaccctgaattgactctcttccgggcgctatcatgccataccgcgaaaggttttgcgccattcgatggtgtccgggatctcgacgctctcccttatgcgactcctgcattaggaaat

SEQ ID NO: 33 - DNA, 7897 bp, Synthetic construct
  source 1..7897: mol_type = other DNA
aaacgtggctggcctggttcaccacgcgggaaacggtctgataagagacaccggcatactctgcgacatcgtataacgttactggtttcacattcaccaccctgaattgactctcttccgggcgctatcatgccataccgcgaaaggttttgcgccattcgatggtgtccgggatctcgacgctctcccttatgcgactcctgcattaggaaattaatacgactcactatagggagaccagtctaggtctcggttttagagctagaaatagcaagttaaaataaggctagtccgttatcaacttgaaaaagtggcaccgagtcggtgctttttttggtagtgcagcgcgatcgtaatcaggatcccatggtacgcgtgctagaggcatcaaataaaacgaaaggctcagtcgaaagactgggcctttcgttttatctgttgtttgtcggtgaacgctctcctgagtaggacaaatggatccgaattcgagctcggcgcgcctgcaggtcgacaagcttgcggccgcataatgcttaagtcgaacagaaagtaatcgtattgtacacggccgcataatcgaaattaatacgactcactataggggaattgtgagcggataacaattccccatcttagtatattagttaagtataagaaggagatatacatatggataagaaatactcaataggcttagatatcggcacaaatagcgtcggatgggcggtgatcactgatgaatataaggttccgtctaaaaagttcaaggttctgggaaatacagaccgccacagtatcaaaaaaaatcttataggggctcttttatttgacagtggagagacagcggaagcgactcgtctcaaacggacagctcgtagaaggtatacacgtcggaagaatcgtatttgttatctacaggagattttttcaaatgagatggcgaaagtagatgatagtttctttcatcgacttgaagagtcttttttggtggaagaagacaagaagcatgaacgtcatcctatttttggaaatatagtagatgaagttgcttatcatgagaaatatccaactatctatcatctgcgaaaaaaattggtagattctactgataaagcggatttgcgcttaatctatttggccttagcgcatatgattaagtttcgtggtcattttttgattgagggagatttaaatcctgataatagtgatgtggacaaactatttatccagttggtacaaacctacaatcaattatttgaagaaaaccctattaacgcaagtggagtagatgctaaagcgattctttctgcacgattgagtaaatcaagacgattagaaaatctcattgctcagctccccggtgagaagaaaaatggcttatttgggaatctcattgctttgtcattgggtttgacccctaattttaaatcaaattttgatttggcagaagatgctaaattacagctttcaaaagatacttacgatgatgatttagataatttattggcgcaaattggagatcaatatgctgatttgtttttggcagctaagaatttatcagatgctattttactttcagatatcctaagagtaaatactgaaataactaaggctcccctatcagcttcaatgattaaacgctacgatgaacatcatcaagacttgactcttttaaaagctttagttcgacaacaacttccagaaaagtataaagaaatcttttttgatcaatcaaaaaacggatatgcaggttatattgatgggggagctagccaagaagaattttataaatttatcaaaccaattttagaaaaaatggatggtactgaggaattattggtgaaactaaatcgtgaagatttgctgcgcaagcaacggacctttgacaacggctctattccccatcaaattcacttgggtgagctgcatgctattttgagaagacaagaagacttttatccatttttaaaagacaatcgtgagaagattgaaaaaatcttgacttttcgaattccttattatgttggtccattggcgcgtggcaatagtcgttttgcatggatgactcggaagtctgaagaaacaattaccccatggaattttgaagaagttgtcgataaaggtgcttcagctcaatcatttattgaacgcatgacaaactttgataaaaatcttccaaatgaaaaagtactaccaaaacatagtttgctttatgagtattttacggtttataacgaattgacaaaggtcaaatatgttactgaaggaatgcgaaaaccagcatttctttcaggtgaacagaagaaagccattgttgatttactcttcaaaacaaatcgaaaagtaaccgttaagcaattaaaagaagattatttcaaaaaaatagaatgttttgatagtgttgaaatttcaggagttgaagatagatttaatgcttcattaggtacctaccatgatttgctaaaaattattaaagataaagattttttggataatgaagaaaatgaagatatcttagaggatattgttttaacattgaccttatttgaagatagggagatgattgaggaaagacttaaaacatatgctcacctctttgatgataaggtgatgaaacagcttaaacgtcgccgttatactggttggggacgtttgtctcgaaaattgattaatggtattagggataagcaatctggcaaaacaatattagattttttgaaatcagatggttttgccaatcgcaattttatgcagctgatccatgatgatagtttgacatttaaagaagacattcaaaaagcacaagtgtctggacaaggcgatagtttacatgaacatattgcaaatttagctggtagccctgctattaaaaaaggtattttacagactgtaaaagttgttgatgaattggtcaaagtaatggggcggcataagccagaaaatatcgttattgaaatggcacgtgaaaatcagacaactcaaaagggccagaaaaattcgcgagagcgtatgaaacgaatcgaagaaggtatcaaagaattaggaagtcagattcttaaagagcatcctgttgaaaatactcaattgcaaaatgaaaagctctatctctattatctccaaaatggaagagacatgtatgtggaccaagaattagatattaatcgtttaagtgattatgatgtcgatcacattgttccacaaagtttccttaaagacgattcaatagacaataaggtcttaacgcgttctgataaaaatcgtggtaaatcggataacgttccaagtgaagaagtagtcaaaaagatgaaaaactattggagacaacttctaaacgccaagttaatcactcaacgtaagtttgataatttaacgaaagctgaacgtggaggtttgagtgaacttgataaagctggttttatcaaacgccaattggttgaaactcgccaaatcactaagcatgtggcacaaattttggatagtcgcatgaatactaaatacgatgaaaatgataaacttattcgagaggttaaagtgattaccttaaaatctaaattagtttctgacttccgaaaagatttccaattctataaagtacgtgagattaacaattaccatcatgcccatgatgcgtatctaaatgccgtcgttggaactgctttgattaagaaatatccaaaacttgaatcggagtttgtctatggtgattataaagtttatgatgttcgtaaaatgattgctaagtctgagcaagaaataggcaaagcaaccgcaaaatatttcttttactctaatatcatgaacttcttcaaaacagaaattacacttgcaaatggagagattcgcaaacgccctctaatcgaaactaatggggaaactggagaaattgtctgggataaagggcgagattttgccacagtgcgcaaagtattgtccatgccccaagtcaatattgtcaagaaaacagaagtacagacaggcggattctccaaggagtcaattttaccaaaaagaaattcggacaagcttattgctcgtaaaaaagactgggatccaaaaaaatatggtggttttgatagtccaacggtagcttattcagtcctagtggttgctaaggtggaaaaagggaaatcgaagaagttaaaatccgttaaagagttactagggatcacaattatggaaagaagttcctttgaaaaaaatccgattgactttttagaagctaaaggatataaggaagttaaaaaagacttaatcattaaactacctaaatatagtctttttgagttagaaaacggtcgtaaacggatgctggctagtgccggagaattacaaaaaggaaatgagctggctctgccaagcaaatatgtgaattttttatatttagctagtcattatgaaaagttgaagggtagtccagaagataacgaacaaaaacaattgtttgtggagcagcataagcattatttagatgagattattgagcaaatcagtgaattttctaagcgtgttattttagcagatgccaatttagataaagttcttagtgcatataacaaacatagagacaaaccaatacgtgaacaagcagaaaatattattcatttatttacgttgacgaatcttggagctcccgctgcttttaaatattttgatacaacaattgatcgtaaacgatatacgtctacaaaagaagttttagatgccactcttatccatcaatccatcactggtctttatgaaacacgcattgatttgagtcagctaggaggtgactaatagcctaggctgctgccaccgctgagcaataactagcataaccccttggggcctctaaacgggtcttgaggggttttttgctgaaacctcaggcatttgagaagcacacggtcacactgcttccggtagtcaataaaccggtaaaccagcaatagacataagcggctatttaacgaccctgccctgaaccgacgaccgggtcatcgtggccggatcttgcggcccctcggcttgaacgaattgttagacattatttgccgactaccttggtgatctcgcctttcacgtagtggacaaattcttccaactgatctgcgcgcgaggccaagcgatcttcttcttgtccaagataagcctgtctagcttcaagtatgacgggctgatactgggccggcaggcgctccattgcccagtcggcagcgacatccttcggcgcgattttgccggttactgcgctgtaccaaatgcgggacaacgtaagcactacatttcgctcatcgccagcccagtcgggcggcgagttccatagcgttaaggtttcatttagcgcctcaaatagatcctgttcaggaaccggatcaaagagttcctccgccgctggacctaccaaggcaacgctatgttctcttgcttttgtcagcaagatagccagatcaatgtcgatcgtggctggctcgaagatacctgcaagaatgtcattgcgctgccattctccaaattgcagttcgcgcttagctggataacgccacggaatgatgtcgtcgtgcacaacaatggtgacttctacagcgcggagaatctcgctctctccaggggaagccgaagtttccaaaaggtcgttgatcaaagctcgccgcgttgtttcatcaagccttacggtcaccgtaaccagcaaatcaatatcactgtgtggcttcaggccgccatccactgcggagccgtacaaatgtacggccagcaacgtcggttcgagatggcgctcgatgacgccaactacctctgatagttgagtcgatacttcggcgatcaccgcttccctcatactcttcctttttcaatattattgaagcatttatcagggttattgtctcatgagcggatacatatttgaatgtatttagaaaaataaacaaatagctagctcactcggtcgctacgctccgggcgtgagactgcggcgggcgctgcggacacatacaaagttacccacagattccgtggataagcaggggactaacatgtgaggcaaaacagcagggccgcgccggtggcgtttttccataggctccgccctcctgccagagttcacataaacagacgcttttccggtgcatctgtgggagccgtgaggctcaaccatgaatctgacagtacgggcgaaacccgacaggacttaaagatccccaccgtttccggcgggtcgctccctcttgcgctctcctgttccgaccctgccgtttaccggatacctgttccgcctttctcccttacgggaagtgtggcgctttctcatagctcacacactggtatctcggctcggtgtaggtcgttcgctccaagctgggctgtaagcaagaactccccgttcagcccgactgctgcgccttatccggtaactgttcacttgagtccaacccggaaaagcacggtaaaacgccactggcagcagccattggtaactgggagttcgcagaggatttgtttagctaaacacgcggttgctcttgaagtgtgcgccaaagtccggctacactggaaggacagatttggttgctgtgctctgcgaaagccagttaccacggttaagcagttccccaactgacttaaccttcgatcaaaccacctccccaggtggttttttcgtttacagggcaaaagattacgcgcagaaaaaaaggatctcaagaagatcctttgatcttttctactgaaccgctctagatttcagtgcaatttatctcttcaaatgtagcacctgaagtcagccccatacgatataagttgtaattctcatgttagtcatgccccgcgcccaccggaaggagctgactgggttgaaggctctcaagggcatcggtcgagatcccggtgcctaatgagtgagctaacttacattaattgcgttgcgctcactgcccgctttccagtcgggaaacctgtcgtgccagctgcattaatgaatcggccaacgcgcggggagaggcggtttgcgtattgggcgccagggtggtttttcttttcaccagtgagacgggcaacagctgattgcccttcaccgcctggccctgagagagttgcagcaagcggtccacgctggtttgccccagcaggcgaaaatcctgtttgatggtggttaacggcgggatataacatgagctgtcttcggtatcgtcgtatcccactaccgagatgtccgcaccaacgcgcagcccggactcggtaatggcgcgcattgcgcccagcgccatctgatcgttggcaaccagcatcgcagtgggaacgatgccctcattcagcatttgcatggtttgttgaaaaccggacatggcactccagtcgccttcccgttccgctatcggctgaatttgattgcgagtgagatatttatgccagccagccagacgcagacgcgccgagacagaacttaatgggcccgctaacagcgcgatttgctggtgacccaatgcgaccagatgctccacgcccagtcgcgtaccgtcttcatgggagaaaataatactgttgatgggtgtctggtcagagacatcaagaaataacgccggaacattagtgcaggcagcttccacagcaatggcatcctggtcatccagcggatagttaatgatcagcccactgacgcgttgcgcgagaagattgtgcaccgccgctttacaggcttcgacgccgcttcgttctaccatcgacaccaccacgctggcacccagttgatcggcgcgagatttaatcgccgcgacaatttgcgacggcgcgtgcagggccagactggaggtggcaacgccaatcagcaacgactgtttgcccgccagttgttgtgccacgcggttgggaatgtaattcagctccgccatcgccgcttccactttttcccgcgttttcgcag

SEQ ID NO: 34 - DNA, 7897 bp, Synthetic construct
  source 1..7897: mol_type = other DNA
aaacgtggctggcctggttcaccacgcgggaaacggtctgataagagacaccggcatactctgcgacatcgtataacgttactggtttcacattcaccaccctgaattgactctcttccgggcgctatcatgccataccgcgaaaggttttgcgccattcgatggtgtccgggatctcgacgctctcccttatgcgactcctgcattaggaaattaatacgactcactatagcggattgaccgtaatgggatgttttagagctagaaatagcaagttaaaataaggctagtccgttatcaacttgaaaaagtggcaccgagtcggtgctttttttggtagtgcagcgcgatcgtaatcaggatcccatggtacgcgtgctagaggcatcaaataaaacgaaaggctcagtcgaaagactgggcctttcgttttatctgttgtttgtcggtgaacgctctcctgagtaggacaaatggatccgaattcgagctcggcgcgcctgcaggtcgacaagcttgcggccgcataatgcttaagtcgaacagaaagtaatcgtattgtacacggccgcataatcgaaattaatacgactcactataggggaattgtgagcggataacaattccccatcttagtatattagttaagtataagaaggagatatacatatggataagaaatactcaataggcttagatatcggcacaaatagcgtcggatgggcggtgatcactgatgaatataaggttccgtctaaaaagttcaaggttctgggaaatacagaccgccacagtatcaaaaaaaatcttataggggctcttttatttgacagtggagagacagcggaagcgactcgtctcaaacggacagctcgtagaaggtatacacgtcggaagaatcgtatttgttatctacaggagattttttcaaatgagatggcgaaagtagatgatagtttctttcatcgacttgaagagtcttttttggtggaagaagacaagaagcatgaacgtcatcctatttttggaaatatagtagatgaagttgcttatcatgagaaatatccaactatctatcatctgcgaaaaaaattggtagattctactgataaagcggatttgcgcttaatctatttggccttagcgcatatgattaagtttcgtggtcattttttgattgagggagatttaaatcctgataatagtgatgtggacaaactatttatccagttggtacaaacctacaatcaattatttgaagaaaaccctattaacgcaagtggagtagatgctaaagcgattctttctgcacgattgagtaaatcaagacgattagaaaatctcattgctcagctccccggtgagaagaaaaatggcttatttgggaatctcattgctttgtcattgggtttgacccctaattttaaatcaaattttgatttggcagaagatgctaaattacagctttcaaaagatacttacgatgatgatttagataatttattggcgcaaattggagatcaatatgctgatttgtttttggcagctaagaatttatcagatgctattttactttcagatatcctaagagtaaatactgaaataactaaggctcccctatcagcttcaatgattaaacgctacgatgaacatcatcaagacttgactcttttaaaagctttagttcgacaacaacttccagaaaagtataaagaaatcttttttgatcaatcaaaaaacggatatgcaggttatattgatgggggagctagccaagaagaattttataaatttatcaaaccaattttagaaaaaatggatggtactgaggaattattggtgaaactaaatcgtgaagatttgctgcgcaagcaacggacctttgacaacggctctattccccatcaaattcacttgggtgagctgcatgctattttgagaagacaagaagacttttatccatttttaaaagacaatcgtgagaagattgaaaaaatcttgacttttcgaattccttattatgttggtccattggcgcgtggcaatagtcgttttgcatggatgactcggaagtctgaagaaacaattaccccatggaattttgaagaagttgtcgataaaggtgcttcagctcaatcatttattgaacgcatgacaaactttgataaaaatcttccaaatgaaaaagtactaccaaaacatagtttgctttatgagtattttacggtttataacgaattgacaaaggtcaaatatgttactgaaggaatgcgaaaaccagcatttctttcaggtgaacagaagaaagccattgttgatttactcttcaaaacaaatcgaaaagtaaccgttaagcaattaaaagaagattatttcaaaaaaatagaatgttttgatagtgttgaaatttcaggagttgaagatagatttaatgcttcattaggtacctaccatgatttgctaaaaattattaaagataaagattttttggataatgaagaaaatgaagatatcttagaggatattgttttaacattgaccttatttgaagatagggagatgattgaggaaagacttaaaacatatgctcacctctttgatgataaggtgatgaaacagcttaaacgtcgccgttatactggttggggacgtttgtctcgaaaattgattaatggtattagggataagcaatctggcaaaacaatattagattttttgaaatcagatggttttgccaatcgcaattttatgcagctgatccatgatgatagtttgacatttaaagaagacattcaaaaagcacaagtgtctggacaaggcgatagtttacatgaacatattgcaaatttagctggtagccctgctattaaaaaaggtattttacagactgtaaaagttgttgatgaattggtcaaagtaatggggcggcataagccagaaaatatcgttattgaaatggcacgtgaaaatcagacaactcaaaagggccagaaaaattcgcgagagcgtatgaaacgaatcgaagaaggtatcaaagaattaggaagtcagattcttaaagagcatcctgttgaaaatactcaattgcaaaatgaaaagctctatctctattatctccaaaatggaagagacatgtatgtggaccaagaattagatattaatcgtttaagtgattatgatgtcgatcacattgttccacaaagtttccttaaagacgattcaatagacaataaggtcttaacgcgttctgataaaaatcgtggtaaatcggataacgttccaagtgaagaagtagtcaaaaagatgaaaaactattggagacaacttctaaacgccaagttaatcactcaacgtaagtttgataatttaacgaaagctgaacgtggaggtttgagtgaacttgataaagctggttttatcaaacgccaattggttgaaactcgccaaatcactaagcatgtggcacaaattttggatagtcgcatgaatactaaatacgatgaaaatgataaacttattcgagaggttaaagtgattaccttaaaatctaaattagtttctgacttccgaaaagatttccaattctataaagtacgtgagattaacaattaccatcatgcccatgatgcgtatctaaatgccgtcgttggaactgctttgattaagaaatatccaaaacttgaatcggagtttgtctatggtgattataaagtttatgatgttcgtaaaatgattgctaagtctgagcaagaaataggcaaagcaaccgcaaaatatttcttttactctaatatcatgaacttcttcaaaacagaaattacacttgcaaatggagagattcgcaaacgccctctaatcgaaactaatggggaaactggagaaattgtctgggataaagggcgagattttgccacagtgcgcaaagtattgtccatgccccaagtcaatattgtcaagaaaacagaagtacagacaggcggattctccaaggagtcaattttaccaaaaagaaattcggacaagcttattgctcgtaaaaaagactgggatccaaaaaaatatggtggttttgatagtccaacggtagcttattcagtcctagtggttgctaaggtggaaaaagggaaatcgaagaagttaaaatccgttaaagagttactagggatcacaattatggaaagaagttcctttgaaaaaaatccgattgactttttagaagctaaaggatataaggaagttaaaaaagacttaatcattaaactacctaaatatagtctttttgagttagaaaacggtcgtaaacggatgctggctagtgccggagaattacaaaaaggaaatgagctggctctgccaagcaaatatgtgaattttttatatttagctagtcattatgaaaagttgaagggtagtccagaagataacgaacaaaaacaattgtttgtggagcagcataagcattatttagatgagattattgagcaaatcagtgaattttctaagcgtgttattttagcagatgccaatttagataaagttcttagtgcatataacaaacatagagacaaaccaatacgtgaacaagcagaaaatattattcatttatttacgttgacgaatcttggagctcccgctgcttttaaatattttgatacaacaattgatcgtaaacgatatacgtctacaaaagaagttttagatgccactcttatccatcaatccatcactggtctttatgaaacacgcattgatttgagtcagctaggaggtgactaatagcctaggctgctgccaccgctgagcaataactagcataaccccttggggcctctaaacgggtcttgaggggttttttgctgaaacctcaggcatttgagaagcacacggtcacactgcttccggtagtcaataaaccggtaaaccagcaatagacataagcggctatttaacgaccctgccctgaaccgacgaccgggtcatcgtggccggatcttgcggcccctcggcttgaacgaattgttagacattatttgccgactaccttggtgatctcgcctttcacgtagtggacaaattcttccaactgatctgcgcgcgaggccaagcgatcttcttcttgtccaagataagcctgtctagcttcaagtatgacgggctgatactgggccggcaggcgctccattgcccagtcggcagcgacatccttcggcgcgattttgccggttactgcgctgtaccaaatgcgggacaacgtaagcactacatttcgctcatcgccagcccagtcgggcggcgagttccatagcgttaaggtttcatttagcgcctcaaatagatcctgttcaggaaccggatcaaagagttcctccgccgctggacctaccaaggcaacgctatgttctcttgcttttgtcagcaagatagccagatcaatgtcgatcgtggctggctcgaagatacctgcaagaatgtcattgcgctgccattctccaaattgcagttcgcgcttagctggataacgccacggaatgatgtcgtcgtgcacaacaatggtgacttctacagcgcggagaatctcgctctctccaggggaagccgaagtttccaaaaggtcgttgatcaaagctcgccgcgttgtttcatcaagccttacggtcaccgtaaccagcaaatcaatatcactgtgtggcttcaggccgccatccactgcggagccgtacaaatgtacggccagcaacgtcggttcgagatggcgctcgatgacgccaactacctctgatagttgagtcgatacttcggcgatcaccgcttccctcatactcttcctttttcaatattattgaagcatttatcagggttattgtctcatgagcggatacatatttgaatgtatttagaaaaataaacaaatagctagctcactcggtcgctacgctccgggcgtgagactgcggcgggcgctgcggacacatacaaagttacccacagattccgtggataagcaggggactaacatgtgaggcaaaacagcagggccgcgccggtggcgtttttccataggctccgccctcctgccagagttcacataaacagacgcttttccggtgcatctgtgggagccgtgaggctcaaccatgaatctgacagtacgggcgaaacccgacaggacttaaagatccccaccgtttccggcgggtcgctccctcttgcgctctcctgttccgaccctgccgtttaccggatacctgttccgcctttctcccttacgggaagtgtggcgctttctcatagctcacacactggtatctcggctcggtgtaggtcgttcgctccaagctgggctgtaagcaagaactccccgttcagcccgactgctgcgccttatccggtaactgttcacttgagtccaacccggaaaagcacggtaaaacgccactggcagcagccattggtaactgggagttcgcagaggatttgtttagctaaacacgcggttgctcttgaagtgtgcgccaaagtccggctacactggaaggacagatttggttgctgtgctctgcgaaagccagttaccacggttaagcagttccccaactgacttaaccttcgatcaaaccacctccccaggtggttttttcgtttacagggcaaaagattacgcgcagaaaaaaaggatctcaagaagatcctttgatcttttctactgaaccgctctagatttcagtgcaatttatctcttcaaatgtagcacctgaagtcagccccatacgatataagttgtaattctcatgttagtcatgccccgcgcccaccggaaggagctgactgggttgaaggctctcaagggcatcggtcgagatcccggtgcctaatgagtgagctaacttacattaattgcgttgcgctcactgcccgctttccagtcgggaaacctgtcgtgccagctgcattaatgaatcggccaacgcgcggggagaggcggtttgcgtattgggcgccagggtggtttttcttttcaccagtgagacgggcaacagctgattgcccttcaccgcctggccctgagagagttgcagcaagcggtccacgctggtttgccccagcaggcgaaaatcctgtttgatggtggttaacggcgggatataacatgagctgtcttcggtatcgtcgtatcccactaccgagatgtccgcaccaacgcgcagcccggactcggtaatggcgcgcattgcgcccagcgccatctgatcgttggcaaccagcatcgcagtgggaacgatgccctcattcagcatttgcatggtttgttgaaaaccggacatggcactccagtcgccttcccgttccgctatcggctgaatttgattgcgagtgagatatttatgccagccagccagacgcagacgcgccgagacagaacttaatgggcccgctaacagcgcgatttgctggtgacccaatgcgaccagatgctccacgcccagtcgcgtaccgtcttcatgggagaaaataatactgttgatgggtgtctggtcagagacatcaagaaataacgccggaacattagtgcaggcagcttccacagcaatggcatcctggtcatccagcggatagttaatgatcagcccactgacgcgttgcgcgagaagattgtgcaccgccgctttacaggcttcgacgccgcttcgttctaccatcgacaccaccacgctggcacccagttgatcggcgcgagatttaatcgccgcgacaatttgcgacggcgcgtgcagggccagactggaggtggcaacgccaatcagcaacgactgtttgcccgccagttgttgtgccacgcggttgggaatgtaattcagctccgccatcgccgcttccactttttcccgcgttttcgcag

SEQ ID NO: 35 - DNA, 7897 bp, Synthetic construct
  source 1..7897: mol_type = other DNA
aaacgtggctggcctggttcaccacgcgggaaacggtctgataagagacaccggcatactctgcgacatcgtataacgttactggtttcacattcaccaccctgaattgactctcttccgggcgctatcatgccataccgcgaaaggttttgcgccattcgatggtgtccgggatctcgacgctctcccttatgcgactcctgcattaggaaattaatacgactcactatagtgatttcagccgcgctgtacgttttagagctagaaatagcaagttaaaataaggctagtccgttatcaacttgaaaaagtggcaccgagtcggtgctttttttggtagtgcagcgcgatcgtaatcaggatcccatggtacgcgtgctagaggcatcaaataaaacgaaaggctcagtcgaaagactgggcctttcgttttatctgttgtttgtcggtgaacgctctcctgagtaggacaaatggatccgaattcgagctcggcgcgcctgcaggtcgacaagcttgcggccgcataatgcttaagtcgaacagaaagtaatcgtattgtacacggccgcataatcgaaattaatacgactcactataggggaattgtgagcggataacaattccccatcttagtatattagttaagtataagaaggagatatacatatggataagaaatactcaataggcttagatatcggcacaaatagcgtcggatgggcggtgatcactgatgaatataaggttccgtctaaaaagttcaaggttctgggaaatacagaccgccacagtatcaaaaaaaatcttataggggctcttttatttgacagtggagagacagcggaagcgactcgtctcaaacggacagctcgtagaaggtatacacgtcggaagaatcgtatttgttatctacaggagattttttcaaatgagatggcgaaagtagatgatagtttctttcatcgacttgaagagtcttttttggtggaagaagacaagaagcatgaacgtcatcctatttttggaaatatagtagatgaagttgcttatcatgagaaatatccaactatctatcatctgcgaaaaaaattggtagattctactgataaagcggatttgcgcttaatctatttggccttagcgcatatgattaagtttcgtggtcattttttgattgagggagatttaaatcctgataatagtgatgtggacaaactatttatccagttggtacaaacctacaatcaattatttgaagaaaaccctattaacgcaagtggagtagatgctaaagcgattctttctgcacgattgagtaaatcaagacgattagaaaatctcattgctcagctccccggtgagaagaaaaatggcttatttgggaatctcattgctttgtcattgggtttgacccctaattttaaatcaaattttgatttggcagaagatgctaaattacagctttcaaaagatacttacgatgatgatttagataatttattggcgcaaattggagatcaatatgctgatttgtttttggcagctaagaatttatcagatgctattttactttcagatatcctaagagtaaatactgaaataactaaggctcccctatcagcttcaatgattaaacgctacgatgaacatcatcaagacttgactcttttaaaagctttagttcgacaacaacttccagaaaagtataaagaaatcttttttgatcaatcaaaaaacggatatgcaggttatattgatgggggagctagccaagaagaattttataaatttatcaaaccaattttagaaaaaatggatggtactgaggaattattggtgaaactaaatcgtgaagatttgctgcgcaagcaacggacctttgacaacggctctattccccatcaaattcacttgggtgagctgcatgctattttgagaagacaagaagacttttatccatttttaaaagacaatcgtgagaagattgaaaaaatcttgacttttcgaattccttattatgttggtccattggcgcgtggcaatagtcgttttgcatggatgactcggaagtctgaagaaacaattaccccatggaattttgaagaagttgtcgataaaggtgcttcagctcaatcatttattgaacgcatgacaaactttgataaaaatcttccaaatgaaaaagtactaccaaaacatagtttgctttatgagtattttacggtttataacgaattgacaaaggtcaaatatgttactgaaggaatgcgaaaaccagcatttctttcaggtgaacagaagaaagccattgttgatttactcttcaaaacaaatcgaaaagtaaccgttaagcaattaaaagaagattatttcaaaaaaatagaatgttttgatagtgttgaaatttcaggagttgaagatagatttaatgcttcattaggtacctaccatgatttgctaaaaattattaaagataaagattttttggataatgaagaaaatgaagatatcttagaggatattgttttaacattgaccttatttgaagatagggagatgattgaggaaagacttaaaacatatgctcacctctttgatgataaggtgatgaaacagcttaaacgtcgccgttatactggttggggacgtttgtctcgaaaattgattaatggtattagggataagcaatctggcaaaacaatattagattttttgaaatcagatggttttgccaatcgcaattttatgcagctgatccatgatgatagtttgacatttaaagaagacattcaaaaagcacaagtgtctggacaaggcgatagtttacatgaacatattgcaaatttagctggtagccctgctattaaaaaaggtattttacagactgtaaaagttgttgatgaattggtcaaagtaatggggcggcataagccagaaaatatcgttattgaaatggcacgtgaaaatcagacaactcaaaagggccagaaaaattcgcgagagcgtatgaaacgaatcgaagaaggtatcaaagaattaggaagtcagattcttaaagagcatcctgttgaaaatactcaattgcaaaatgaaaagctctatctctattatctccaaaatggaagagacatgtatgtggaccaagaattagatattaatcgtttaagtgattatgatgtcgatcacattgttccacaaagtttccttaaagacgattcaatagacaataaggtcttaacgcgttctgataaaaatcgtggtaaatcggataacgttccaagtgaagaagtagtcaaaaagatgaaaaactattggagacaacttctaaacgccaagttaatcactcaacgtaagtttgataatttaacgaaagctgaacgtggaggtttgagtgaacttgataaagctggttttatcaaacgccaattggttgaaactcgccaaatcactaagcatgtggcacaaattttggatagtcgcatgaatactaaatacgatgaaaatgataaacttattcgagaggttaaagtgattaccttaaaatctaaattagtttctgacttccgaaaagatttccaattctataaagtacgtgagattaacaattaccatcatgcccatgatgcgtatctaaatgccgtcgttggaactgctttgattaagaaatatccaaaacttgaatcggagtttgtctatggtgattataaagtttatgatgttcgtaaaatgattgctaagtctgagcaagaaataggcaaagcaaccgcaaaatatttcttttactctaatatcatgaacttcttcaaaacagaaattacacttgcaaatggagagattcgcaaacgccctctaatcgaaactaatggggaaactggagaaattgtctgggataaagggcgagattttgccacagtgcgcaaagtattgtccatgccccaagtcaatattgtcaagaaaacagaagtacagacaggcggattctccaaggagtcaattttaccaaaaagaaattcggacaagcttattgctcgtaaaaaagactgggatccaaaaaaatatggtggttttgatagtccaacggtagcttattcagtcctagtggttgctaaggtggaaaaagggaaatcgaagaagttaaaatccgttaaagagttactagggatcacaattatggaaagaagttcctttgaaaaaaatccgattgactttttagaagctaaaggatataaggaagttaaaaaagacttaatcattaaactacctaaatatagtctttttgagttagaaaacggtcgtaaacggatgctggctagtgccggagaattacaaaaaggaaatgagctggctctgccaagcaaatatgtgaattttttatatttagctagtcattatgaaaagttgaagggtagtccagaagataacgaacaaaaacaattgtttgtggagcagcataagcattatttagatgagattattgagcaaatcagtgaattttctaagcgtgttattttagcagatgccaatttagataaagttcttagtgcatataacaaacatagagacaaaccaatacgtgaacaagcagaaaatattattcatttatttacgttgacgaatcttggagctcccgctgcttttaaatattttgatacaacaattgatcgtaaacgatatacgtctacaaaagaagttttagatgccactcttatccatcaatccatcactggtctttatgaaacacgcattgatttgagtcagctaggaggtgactaatagcctaggctgctgccaccgctgagcaataactagcataaccccttggggcctctaaacgggtcttgaggggttttttgctgaaacctcaggcatttgagaagcacacggtcacactgcttccggtagtcaataaaccggtaaaccagcaatagacataagcggctatttaacgaccctgccctgaaccgacgaccgggtcatcgtggccggatcttgcggcccctcggcttgaacgaattgttagacattatttgccgactaccttggtgatctcgcctttcacgtagtggacaaattcttccaactgatctgcgcgcgaggccaagcgatcttcttcttgtccaagataagcctgtctagcttcaagtatgacgggctgatactgggccggcaggcgctccattgcccagtcggcagcgacatccttcggcgcgattttgccggttactgcgctgtaccaaatgcgggacaacgtaagcactacatttcgctcatcgccagcccagtcgggcggcgagttccatagcgttaaggtttcatttagcgcctcaaatagatcctgttcaggaaccggatcaaagagttcctccgccgctggacctaccaaggcaacgctatgttctcttgcttttgtcagcaagatagccagatcaatgtcgatcgtggctggctcgaagatacctgcaagaatgtcattgcgctgccattctccaaattgcagttcgcgcttagctggataacgccacggaatgatgtcgtcgtgcacaacaatggtgacttctacagcgcggagaatctcgctctctccaggggaagccgaagtttccaaaaggtcgttgatcaaagctcgccgcgttgtttcatcaagccttacggtcaccgtaaccagcaaatcaatatcactgtgtggcttcaggccgccatccactgcggagccgtacaaatgtacggccagcaacgtcggttcgagatggcgctcgatgacgccaactacctctgatagttgagtcgatacttcggcgatcaccgcttccctcatactcttcctttttcaatattattgaagcatttatcagggttattgtctcatgagcggatacatatttgaatgtatttagaaaaataaacaaatagctagctcactcggtcgctacgctccgggcgtgagactgcggcgggcgctgcggacacatacaaagttacccacagattccgtggataagcaggggactaacatgtgaggcaaaacagcagggccgcgccggtggcgtttttccataggctccgccctcctgccagagttcacataaacagacgcttttccggtgcatctgtgggagccgtgaggctcaaccatgaatctgacagtacgggcgaaacccgacaggacttaaagatccccaccgtttccggcgggtcgctccctcttgcgctctcctgttccgaccctgccgtttaccggatacctgttccgcctttctcccttacgggaagtgtggcgctttctcatagctcacacactggtatctcggctcggtgtaggtcgttcgctccaagctgggctgtaagcaagaactccccgttcagcccgactgctgcgccttatccggtaactgttcacttgagtccaacccggaaaagcacggtaaaacgccactggcagcagccattggtaactgggagttcgcagaggatttgtttagctaaacacgcggttgctcttgaagtgtgcgccaaagtccggctacactggaaggacagatttggttgctgtgctctgcgaaagccagttaccacggttaagcagttccccaactgacttaaccttcgatcaaaccacctccccaggtggttttttcgtttacagggcaaaagattacgcgcagaaaaaaaggatctcaagaagatcctttgatcttttctactgaaccgctctagatttcagtgcaatttatctcttcaaatgtagcacctgaagtcagccccatacgatataagttgtaattctcatgttagtcatgccccgcgcccaccggaaggagctgactgggttgaaggctctcaagggcatcggtcgagatcccggtgcctaatgagtgagctaacttacattaattgcgttgcgctcactgcccgctttccagtcgggaaacctgtcgtgccagctgcattaatgaatcggccaacgcgcggggagaggcggtttgcgtattgggcgccagggtggtttttcttttcaccagtgagacgggcaacagctgattgcccttcaccgcctggccctgagagagttgcagcaagcggtccacgctggtttgccccagcaggcgaaaatcctgtttgatggtggttaacggcgggatataacatgagctgtcttcggtatcgtcgtatcccactaccgagatgtccgcaccaacgcgcagcccggactcggtaatggcgcgcattgcgcccagcgccatctgatcgttggcaaccagcatcgcagtgggaacgatgccctcattcagcatttgcatggtttgttgaaaaccggacatggcactccagtcgccttcccgttccgctatcggctgaatttgattgcgagtgagatatttatgccagccagccagacgcagacgcgccgagacagaacttaatgggcccgctaacagcgcgatttgctggtgacccaatgcgaccagatgctccacgcccagtcgcgtaccgtcttcatgggagaaaataatactgttgatgggtgtctggtcagagacatcaagaaataacgccggaacattagtgcaggcagcttccacagcaatggcatcctggtcatccagcggatagttaatgatcagcccactgacgcgttgcgcgagaagattgtgcaccgccgctttacaggcttcgacgccgcttcgttctaccatcgacaccaccacgctggcacccagttgatcggcgcgagatttaatcgccgcgacaatttgcgacggcgcgtgcagggccagactggaggtggcaacgccaatcagcaacgactgtttgcccgccagttgttgtgccacgcggttgggaatgtaattcagctccgccatcgccgcttccactttttcccgcgttttcgcag

SEQ ID NO: 36 - DNA, 7897 bp, Synthetic construct
  source 1..7897: mol_type = other DNA
ttcgacgccgcttcgttctaccatcgacaccaccacgctggcacccagttgatcggcgcgagatttaatcgccgcgacaatttgcgacggcgcgtgcagggccagactggaggtggcaacgccaatcagcaacgactgtttgcccgccagttgttgtgccacgcggttgggaatgtaattcagctccgccatcgccgcttccactttttcccgcgttttcgcagaaacgtggctggcctggttcaccacgcgggaaacggtctgataagagacaccggcatactctgcgacatcgtataacgttactggtttcacattcaccaccctgaattgactctcttccgggcgctatcatgccataccgcgaaaggttttgcgccattcgatggtgtccgggatctcgacgctctcccttatgcgactcctgcattaggaaattaatacgactcactatagtgatttcagccgcgctgtacgttttagagctagaaatagcaagttaaaataaggctagtccgttatcaacttgaaaaagtggcaccgagtcggtgctttttttggtagtgcagcgcgatcgtaatcaggatcccatggtacgcgtgctagaggcatcaaataaaacgaaaggctcagtcgaaagactgggcctttcgttttatctgttgtttgtcggtgaacgctctcctgagtaggacaaatggatccgaattcgagctcggcgcgcctgcaggtcgacaagcttgcggccgcataatgcttaagtcgaacagaaagtaatcgtattgtacacggccgcataatcgaaattaatacgactcactataggggaattgtgagcggataacaattccccatcttagtatattagttaagtataagaaggagatatacatatggataagaaatactcaataggcttagctatcggcacaaatagcgtcggatgggcggtgatcactgatgaatataaggttccgtctaaaaagttcaaggttctgggaaatacagaccgccacagtatcaaaaaaaatcttataggggctcttttatttgacagtggagagacagcggaagcgactcgtctcaaacggacagctcgtagaaggtatacacgtcggaagaatcgtatttgttatctacaggagattttttcaaatgagatggcgaaagtagatgatagtttctttcatcgacttgaagagtcttttttggtggaagaagacaagaagcatgaacgtcatcctatttttggaaatatagtagatgaagttgcttatcatgagaaatatccaactatctatcatctgcgaaaaaaattggtagattctactgataaagcggatttgcgcttaatctatttggccttagcgcatatgattaagtttcgtggtcattttttgattgagggagatttaaatcctgataatagtgatgtggacaaactatttatccagttggtacaaacctacaatcaattatttgaagaaaaccctattaacgcaagtggagtagatgctaaagcgattctttctgcacgattgagtaaatcaagacgattagaaaatctcattgctcagctccccggtgagaagaaaaatggcttatttgggaatctcattgctttgtcattgggtttgacccctaattttaaatcaaattttgatttggcagaagatgctaaattacagctttcaaaagatacttacgatgatgatttagataatttattggcgcaaattggagatcaatatgctgatttgtttttggcagctaagaatttatcagatgctattttactttcagatatcctaagagtaaatactgaaataactaaggctcccctatcagcttcaatgattaaacgctacgatgaacatcatcaagacttgactcttttaaaagctttagttcgacaacaacttccagaaaagtataaagaaatcttttttgatcaatcaaaaaacggatatgcaggttatattgatgggggagctagccaagaagaattttataaatttatcaaaccaattttagaaaaaatggatggtactgaggaattattggtgaaactaaatcgtgaagatttgctgcgcaagcaacggacctttgacaacggctctattccccatcaaattcacttgggtgagctgcatgctattttgagaagacaagaagacttttatccatttttaaaagacaatcgtgagaagattgaaaaaatcttgacttttcgaattccttattatgttggtccattggcgcgtggcaatagtcgttttgcatggatgactcggaagtctgaagaaacaattaccccatggaattttgaagaagttgtcgataaaggtgcttcagctcaatcatttattgaacgcatgacaaactttgataaaaatcttccaaatgaaaaagtactaccaaaacatagtttgctttatgagtattttacggtttataacgaattgacaaaggtcaaatatgttactgaaggaatgcgaaaaccagcatttctttcaggtgaacagaagaaagccattgttgatttactcttcaaaacaaatcgaaaagtaaccgttaagcaattaaaagaagattatttcaaaaaaatagaatgttttgatagtgttgaaatttcaggagttgaagatagatttaatgcttcattaggtacctaccatgatttgctaaaaattattaaagataaagattttttggataatgaagaaaatgaagatatcttagaggatattgttttaacattgaccttatttgaagatagggagatgattgaggaaagacttaaaacatatgctcacctctttgatgataaggtgatgaaacagcttaaacgtcgccgttatactggttggggacgtttgtctcgaaaattgattaatggtattagggataagcaatctggcaaaacaatattagattttttgaaatcagatggttttgccaatcgcaattttatgcagctgatccatgatgatagtttgacatttaaagaagacattcaaaaagcacaagtgtctggacaaggcgatagtttacatgaacatattgcaaatttagctggtagccctgctattaaaaaaggtattttacagactgtaaaagttgttgatgaattggtcaaagtaatggggcggcataagccagaaaatatcgttattgaaatggcacgtgaaaatcagacaactcaaaagggccagaaaaattcgcgagagcgtatgaaacgaatcgaagaaggtatcaaagaattaggaagtcagattcttaaagagcatcctgttgaaaatactcaattgcaaaatgaaaagctctatctctattatctccaaaatggaagagacatgtatgtggaccaagaattagatattaatcgtttaagtgattatgatgtcgatgccattgttccacaaagtttccttaaagacgattcaatagacaataaggtcttaacgcgttctgataaaaatcgtggtaaatcggataacgttccaagtgaagaagtagtcaaaaagatgaaaaactattggagacaacttctaaacgccaagttaatcactcaacgtaagtttgataatttaacgaaagctgaacgtggaggtttgagtgaacttgataaagctggttttatcaaacgccaattggttgaaactcgccaaatcactaagcatgtggcacaaattttggatagtcgcatgaatactaaatacgatgaaaatgataaacttattcgagaggttaaagtgattaccttaaaatctaaattagtttctgacttccgaaaagatttccaattctataaagtacgtgagattaacaattaccatcatgcccatgatgcgtatctaaatgccgtcgttggaactgctttgattaagaaatatccaaaacttgaatcggagtttgtctatggtgattataaagtttatgatgttcgtaaaatgattgctaagtctgagcaagaaataggcaaagcaaccgcaaaatatttcttttactctaatatcatgaacttcttcaaaacagaaattacacttgcaaatggagagattcgcaaacgccctctaatcgaaactaatggggaaactggagaaattgtctgggataaagggcgagattttgccacagtgcgcaaagtattgtccatgccccaagtcaatattgtcaagaaaacagaagtacagacaggcggattctccaaggagtcaattttaccaaaaagaaattcggacaagcttattgctcgtaaaaaagactgggatccaaaaaaatatggtggttttgatagtccaacggtagcttattcagtcctagtggttgctaaggtggaaaaagggaaatcgaagaagttaaaatccgttaaagagttactagggatcacaattatggaaagaagttcctttgaaaaaaatccgattgactttttagaagctaaaggatataaggaagttaaaaaagacttaatcattaaactacctaaatatagtctttttgagttagaaaacggtcgtaaacggatgctggctagtgccggagaattacaaaaaggaaatgagctggctctgccaagcaaatatgtgaattttttatatttagctagtcattatgaaaagttgaagggtagtccagaagataacgaacaaaaacaattgtttgtggagcagcataagcattatttagatgagattattgagcaaatcagtgaattttctaagcgtgttattttagcagatgccaatttagataaagttcttagtgcatataacaaacatagagacaaaccaatacgtgaacaagcagaaaatattattcatttatttacgttgacgaatcttggagctcccgctgcttttaaatattttgatacaacaattgatcgtaaacgatatacgtctacaaaagaagttttagatgccactcttatccatcaatccatcactggtctttatgaaacacgcattgatttgagtcagctaggaggtgactaatagcctaggctgctgccaccgctgagcaataactagcataaccccttggggcctctaaacgggtcttgaggggttttttgctgaaacctcaggcatttgagaagcacacggtcacactgcttccggtagtcaataaaccggtaaaccagcaatagacataagcggctatttaacgaccctgccctgaaccgacgaccgggtcatcgtggccggatcttgcggcccctcggcttgaacgaattgttagacattatttgccgactaccttggtgatctcgcctttcacgtagtggacaaattcttccaactgatctgcgcgcgaggccaagcgatcttcttcttgtccaagataagcctgtctagcttcaagtatgacgggctgatactgggccggcaggcgctccattgcccagtcggcagcgacatccttcggcgcgattttgccggttactgcgctgtaccaaatgcgggacaacgtaagcactacatttcgctcatcgccagcccagtcgggcggcgagttccatagcgttaaggtttcatttagcgcctcaaatagatcctgttcaggaaccggatcaaagagttcctccgccgctggacctaccaaggcaacgctatgttctcttgcttttgtcagcaagatagccagatcaatgtcgatcgtggctggctcgaagatacctgcaagaatgtcattgcgctgccattctccaaattgcagttcgcgcttagctggataacgccacggaatgatgtcgtcgtgcacaacaatggtgacttctacagcgcggagaatctcgctctctccaggggaagccgaagtttccaaaaggtcgttgatcaaagctcgccgcgttgtttcatcaagccttacggtcaccgtaaccagcaaatcaatatcactgtgtggcttcaggccgccatccactgcggagccgtacaaatgtacggccagcaacgtcggttcgagatggcgctcgatgacgccaactacctctgatagttgagtcgatacttcggcgatcaccgcttccctcatactcttcctttttcaatattattgaagcatttatcagggttattgtctcatgagcggatacatatttgaatgtatttagaaaaataaacaaatagctagctcactcggtcgctacgctccgggcgtgagactgcggcgggcgctgcggacacatacaaagttacccacagattccgtggataagcaggggactaacatgtgaggcaaaacagcagggccgcgccggtggcgtttttccataggctccgccctcctgccagagttcacataaacagacgcttttccggtgcatctgtgggagccgtgaggctcaaccatgaatctgacagtacgggcgaaacccgacaggacttaaagatccccaccgtttccggcgggtcgctccctcttgcgctctcctgttccgaccctgccgtttaccggatacctgttccgcctttctcccttacgggaagtgtggcgctttctcatagctcacacactggtatctcggctcggtgtaggtcgttcgctccaagctgggctgtaagcaagaactccccgttcagcccgactgctgcgccttatccggtaactgttcacttgagtccaacccggaaaagcacggtaaaacgccactggcagcagccattggtaactgggagttcgcagaggatttgtttagctaaacacgcggttgctcttgaagtgtgcgccaaagtccggctacactggaaggacagatttggttgctgtgctctgcgaaagccagttaccacggttaagcagttccccaactgacttaaccttcgatcaaaccacctccccaggtggttttttcgtttacagggcaaaagattacgcgcagaaaaaaaggatctcaagaagatcctttgatcttttctactgaaccgctctagatttcagtgcaatttatctcttcaaatgtagcacctgaagtcagccccatacgatataagttgtaattctcatgttagtcatgccccgcgcccaccggaaggagctgactgggttgaaggctctcaagggcatcggtcgagatcccggtgcctaatgagtgagctaacttacattaattgcgttgcgctcactgcccgctttccagtcgggaaacctgtcgtgccagctgcattaatgaatcggccaacgcgcggggagaggcggtttgcgtattgggcgccagggtggtttttcttttcaccagtgagacgggcaacagctgattgcccttcaccgcctggccctgagagagttgcagcaagcggtccacgctggtttgccccagcaggcgaaaatcctgtttgatggtggttaacggcgggatataacatgagctgtcttcggtatcgtcgtatcccactaccgagatgtccgcaccaacgcgcagcccggactcggtaatggcgcgcattgcgcccagcgccatctgatcgttggcaaccagcatcgcagtgggaacgatgccctcattcagcatttgcatggtttgttgaaaaccggacatggcactccagtcgccttcccgttccgctatcggctgaatttgattgcgagtgagatatttatgccagccagccagacgcagacgcgccgagacagaacttaatgggcccgctaacagcgcgatttgctggtgacccaatgcgaccagatgctccacgcccagtcgcgtaccgtcttcatgggagaaaataatactgttgatgggtgtctggtcagagacatcaagaaataacgccggaacattagtgcaggcagcttccacagcaatggcatcctggtcatccagcggatagttaatgatcagcccactgacgcgttgcgcgagaagattgtgcaccgccgctttacaggc

SEQ ID NO: 37 - DNA, 7945 bp, Synthetic construct
  source 1..7945: mol_type = other DNA
acaccggcatactctgcgacatcgtataacgttactggtttcacattcaccaccctgaattgactctcttccgggcgctatcatgccataccgcgaaaggttttgcgccattcgatggtgtccgggatctcgacgctctcccttatgcgactcctgcattaggaaattaatacgactcactataggggaattgtgagcggataacaattcccctgtagaaataattttgtttaactttaataaggagatataccatgggttcactgccgtataggcagctaagaaacgagacctcaattggtctccgttcactgccgtataggcagctaagaaaggatccgaattcgagctcggcgcgcctgcaggtcgacaagcttgcggccgcataatgcttaagtcgaacagaaagtaatcgtattgtacacggccgcataatcgaaattaatacgactcactataggggaattgtgagcggataacaattccccatcttagtatattagttaagtataagaaggagatatacatatgacctctcccctcccaacgcctacgtggcaggagcttcgccagttcatcgaatccttcatccaggagcgcctccagggcaagctggacaaactccaacccgacgaagacgacaagcgccagacattgctggccacccaccggcgggaggcctggctggccgatgccgcccggcgggttggccagttgcagttggtgacccacacgctcaagccgatccatcccgacgcccgcggcagcaacctgcacagcctgccgcaagcacccggccaaccgggcctcgccggttcccatgagctaggtgacaggctggtcagcgatgtggtgggcaatgccgcggcgctggacgtattcaagtttctcagtctccagtatcagggtaaaaatcttctgaactggctgacagaagacagtgccgaggcattacaggcgctgtccgataacgccgaacaggctcgcgaatggcggcaagcgttcatcggcatcacgaccgtcaaaggcgctcccgcgtcccacagcctggccaagcagttgtactttcccctgcccggttccggctaccacctgctagcaccgctgtttcccaccagtctggtgcatcacgtccacgctctgctccgcgaagcgcgcttcggcgacgcggccaaggcggcacgcgaagcgcgcagccgccaggagtcatggccccacggattcagcgagtaccccaacctggcgatccagaagttcggcggtaccaagccgcagaacatcagtcagttgaacaacgagcgccgtggcgagaactggttgctgccatcgcttccgccgaactggcaaaggcagaatgtaaacgcgccgatgcggcactcttcggtcttcgagcatgacttcggaagaactcctgaagtatcccgcctaacccgtaccctgcagcgttttcttgccaagacagtccataacaacctcgccatccgccagcggcgtgcccaattggtggcgcaaatctgcgacgaagccctgcaatacgccgcccgtctgcgcgaactggagcccggctggagcgcaacccccgggtgccaactgcatgacgcggagcagctctggctcgatccgttgcgcgcacagaccgatgagacgttcttgcagcgccgactacgaggtgactggcctgccgaggtcggaaatcgcttcgccaactggctgaaccgggcggtcagcagcgacagtcagatactgggtagcccggaagccgcccaatggagccaggagctgagcaaggaactgacgatgttcaaggagatactcgaagatgagcgtgactgataataacattggaagtggataacggatccgggccctgtacaagatcctgtaaaacgacggccagtgaattcactcgagttctagaaataattttgtttaactttaagaaggagatatagatcatgagcgtgactgatcccgaggcgctgctgttgctgccacgcctgtccatccagaacgccaacgccatttccagccccttgacctggggtttcccttcgcccggcgctttcaccggattcgtccatgccttgcagcgtcgagtcggaatctccctcgatatcgaactggacggtgtcggcatcgtctgtcaccgcttcgaagcgcagatatcgcaaccggccggcaagcgcaccaaggtcttcaacctgacccgcaatccgctgaaccgcgacggctccaccgcagccatcgtcgaagaaggtcgcgcccatctggaggtcagtctgctgctcggagtgcatggcgatggtctggacgatcaccccgcacaggaaatcgccaggcaggtacaggagcaggctggcgccatgcgcctcgccggtggcagcatcctgccctggtgcaatgagcgcttcccggctccgaacgccgaactgctgatgctgggtggcagcgacgaacagcggcgcaagaaccagcgccggcttacccgccgcctgctccccggcttcgccctggtgagtcgcgaggcgttgttgcaacaacatctggaaaccttgcgcaccacgctccccgaagccaccacgctcgatgcactgctcgatctttgtcgaatcaacttcgagcctcctgcaacctcgtccgaagaagaagcatcgccgcccgatgcagcctggcaagtgcgcgacaagcccggctggctggtgccgatcccggctggctacaacgccctgtcacccctgtacctccccggcgaagtgcgaaatgcccgtgatagagaaacaccgctgcgcttcgtcgaaaacctcttcggtctgggcgaatggctcagcccccatcgcgtcgccgcgttatcggacctgctttggtatcaccacgccgagcctgacaaagggctctaccgctggagcacaccccgtttcgtcgaacacgccatcgcataataataagatcccaactccataaggatccgcgatcgcagcggataacaatttcacatcctgcaggactcgagttctagaaataattttgtttaactttaagaaggagatatagatcatgtccaagccaatactgagcaccgcttccgtcctcgccttcgaacgtaagctcgacccttccgacgcccttatgagcgctggcgcctgggcgcaacgcgacgcctcgcaggaatggccggccgtgaccgtgcgcgagaagtccgtacgcggcaccatctccaaccgcctcaagaccaaggaccgtgacccggccaagctggacgcctcgatccagtcgcccaacctgcagacggtggacgtggccaacctgccgagcgacgccgacaccctcaaggtccgcttcaccctccgtgtgctcggcggcgccggaacaccgtctgcctgcaacgacgcggcctaccgtgacaagctgctgcaaacggtcgccacctacgtgaacgatcagggcttcgccgagctggctcgtcgttatgcgcacaacctggccaacgcccgcttcctgtggcgcaaccgggtgggcgcggaagcggtggaagtccgtatcaaccatatccgccagggcgaggtggctcgcgcctggcgcttcgacgccctggccatcggcttgcgcgacttcaaggccgacgccgaactggacgcgctcgccgaactgatcgccagcggcctctcaggcagtgggcatgtcctgctcgaagtggtcgccttcgcccgtatcggcgacggccaggaagtcttcccctcccaggaactgatcctcgacaaaggcgacaagaaaggccagaagagcaagaccctgtacagcgtacgcgatgccgcggccatccactcgcagaagatcggcaatgccctgcgcaccatcgatacgtggtatcccgacgaagatggcctcggccccatcgccgtggagccctacggctccgtcacatcccagggcaaagcctatcgccagcccaagcagaagctggacttctatacgctgctcgacaactgggtactgcgcgacgaggcgcccgccgtggagcaacagcattatgtgatcgccaacctgatccgtggcggcgtgttcggtgaagccgaagagaagtaataataagatcccaactccataaggatccgcgatcgcggcgcgcccgccagggttttcccagtcgcggccgccctgcaggactcgagttctagaaataattttgtttaactttaagaaggagatatagatcatggaccactacctcgacattcgcttgcgaccggacccggaatttcccccggcgcaactcatgagcgtgctcttcggcaagctccaccaggccctggtggcacagggcggggacaggatcggcgtgagcttccccgacctcgacgaaagccgctcccggctgggcgagcgcctgcgcattcatgcctcggcggacgaccttcgtgccctgctcgcccggccctggctggaagggttgcgggaccatctgcaattcggagaaccggcagtcgtgcctcaccccacaccgtaccgtcaggtcagtcgggttcaggcgaaaagcaatccggaacgcctgcggcggcggctcatgcgccggcacgatctgagtgaggaggaggctcggaaacgcattcccgatacggtcgcgagagccttggacctgcccttcgtcacgctacgcagccagagcaccggacagcacttccgtctcttcatccgccacgggccgttgcaggtgacggcagaggaaggaggattcacctgttacgggttgagcaaaggaggtttcgttccctggttctgataacctaggctgctgccaccgctgagcaataactagcataaccccttggggcctctaaacgggtcttgaggggttttttgctgaaacctcaggcatttgagaagcacacggtcacactgcttccggtagtcaataaaccggtaaaccagcaatagacataagcggctatttaacgaccctgccctgaaccgacgaccgggtcatcgtggccggatcttgcggcccctcggcttgaacgaattgttagacattatttgccgactaccttggtgatctcgcctttcacgtagtggacaaattcttccaactgatctgcgcgcgaggccaagcgatcttcttcttgtccaagataagcctgtctagcttcaagtatgacgggctgatactgggccggcaggcgctccattgcccagtcggcagcgacatccttcggcgcgattttgccggttactgcgctgtaccaaatgcgggacaacgtaagcactacatttcgctcatcgccagcccagtcgggcggcgagttccatagcgttaaggtttcatttagcgcctcaaatagatcctgttcaggaaccggatcaaagagttcctccgccgctggacctaccaaggcaacgctatgttctcttgcttttgtcagcaagatagccagatcaatgtcgatcgtggctggctcgaagatacctgcaagaatgtcattgcgctgccattctccaaattgcagttcgcgcttagctggataacgccacggaatgatgtcgtcgtgcacaacaatggtgacttctacagcgcggagaatctcgctctctccaggggaagccgaagtttccaaaaggtcgttgatcaaagctcgccgcgttgtttcatcaagccttacggtcaccgtaaccagcaaatcaatatcactgtgtggcttcaggccgccatccactgcggagccgtacaaatgtacggccagcaacgtcggttcgagatggcgctcgatgacgccaactacctctgatagttgagtcgatacttcggcgatcaccgcttccctcatactcttcctttttcaatattattgaagcatttatcagggttattgtctcatgagcggatacatatttgaatgtatttagaaaaataaacaaatagctagctcactcggtcgctacgctccgggcgtgagactgcggcgggcgctgcggacacatacaaagttacccacagattccgtggataagcaggggactaacatgtgaggcaaaacagcagggccgcgccggtggcgtttttccataggctccgccctcctgccagagttcacataaacagacgcttttccggtgcatctgtgggagccgtgaggctcaaccatgaatctgacagtacgggcgaaacccgacaggacttaaagatccccaccgtttccggcgggtcgctccctcttgcgctctcctgttccgaccctgccgtttaccggatacctgttccgcctttctcccttacgggaagtgtggcgctttctcatagctcacacactggtatctcggctcggtgtaggtcgttcgctccaagctgggctgtaagcaagaactccccgttcagcccgactgctgcgccttatccggtaactgttcacttgagtccaacccggaaaagcacggtaaaacgccactggcagcagccattggtaactgggagttcgcagaggatttgtttagctaaacacgcggttgctcttgaagtgtgcgccaaagtccggctacactggaaggacagatttggttgctgtgctctgcgaaagccagttaccacggttaagcagttccccaactgacttaaccttcgatcaaaccacctccccaggtggttttttcgtttacagggcaaaagattacgcgcagaaaaaaaggatctcaagaagatcctttgatcttttctactgaaccgctctagatttcagtgcaatttatctcttcaaatgtagcacctgaagtcagccccatacgatataagttgtaattctcatgttagtcatgccccgcgcccaccggaaggagctgactgggttgaaggctctcaagggcatcggtcgagatcccggtgcctaatgagtgagctaacttacattaattgcgttgcgctcactgcccgctttccagtcgggaaacctgtcgtgccagctgcattaatgaatcggccaacgcgcggggagaggcggtttgcgtattgggcgccagggtggtttttcttttcaccagtgagacgggcaacagctgattgcccttcaccgcctggccctgagagagttgcagcaagcggtccacgctggtttgccccagcaggcgaaaatcctgtttgatggtggttaacggcgggatataacatgagctgtcttcggtatcgtcgtatcccactaccgagatgtccgcaccaacgcgcagcccggactcggtaatggcgcgcattgcgcccagcgccatctgatcgttggcaaccagcatcgcagtgggaacgatgccctcattcagcatttgcatggtttgttgaaaaccggacatggcactccagtcgccttcccgttccgctatcggctgaatttgattgcgagtgagatatttatgccagccagccagacgcagacgcgccgagacagaacttaatgggcccgctaacagcgcgatttgctggtgacccaatgcgaccagatgctccacgcccagtcgcgtaccgtcttcatgggagaaaataatactgttgatgggtgtctggtcagagacatcaagaaataacgccggaacattagtgcaggcagcttccacagcaatggcatcctggtcatccagcggatagttaatgatcagcccactgacgcgttgcgcgagaagattgtgcaccgccgctttacaggcttcgacgccgcttcgttctaccatcgacaccaccacgctggcacccagttgatcggcgcgagatttaatcgccgcgacaatttgcgacggcgcgtgcagggccagactggaggtggcaacgccaatcagcaacgactgtttgcccgccagttgttgtgccacgcggttgggaatgtaattcagctccgccatcgccgcttccactttttcccgcgttttcgcagaaacgtggctggcctggttcaccacgcgggaaacggtctgataagag

SEQ ID NO: 38 - DNA, 7957 bp, Synthetic construct
  source 1..7957: mol_type = other DNA
acaccggcatactctgcgacatcgtataacgttactggtttcacattcaccaccctgaattgactctcttccgggcgctatcatgccataccgcgaaaggttttgcgccattcgatggtgtccgggatctcgacgctctcccttatgcgactcctgcattaggaaattaatacgactcactataggggaattgtgagcggataacaattcccctgtagaaataattttgtttaactttaataaggagatataccatgggttcactgccgtataggcagctaagaaatatcccattacggtcaatccgccgtttgttccgttcactgccgtataggcagctaagaaaggatccgaattcgagctcggcgcgcctgcaggtcgacaagcttgcggccgcataatgcttaagtcgaacagaaagtaatcgtattgtacacggccgcataatcgaaattaatacgactcactataggggaattgtgagcggataacaattccccatcttagtatattagttaagtataagaaggagatatacatatgacctctcccctcccaacgcctacgtggcaggagcttcgccagttcatcgaatccttcatccaggagcgcctccagggcaagctggacaaactccaacccgacgaagacgacaagcgccagacattgctggccacccaccggcgggaggcctggctggccgatgccgcccggcgggttggccagttgcagttggtgacccacacgctcaagccgatccatcccgacgcccgcggcagcaacctgcacagcctgccgcaagcacccggccaaccgggcctcgccggttcccatgagctaggtgacaggctggtcagcgatgtggtgggcaatgccgcggcgctggacgtattcaagtttctcagtctccagtatcagggtaaaaatcttctgaactggctgacagaagacagtgccgaggcattacaggcgctgtccgataacgccgaacaggctcgcgaatggcggcaagcgttcatcggcatcacgaccgtcaaaggcgctcccgcgtcccacagcctggccaagcagttgtactttcccctgcccggttccggctaccacctgctagcaccgctgtttcccaccagtctggtgcatcacgtccacgctctgctccgcgaagcgcgcttcggcgacgcggccaaggcggcacgcgaagcgcgcagccgccaggagtcatggccccacggattcagcgagtaccccaacctggcgatccagaagttcggcggtaccaagccgcagaacatcagtcagttgaacaacgagcgccgtggcgagaactggttgctgccatcgcttccgccgaactggcaaaggcagaatgtaaacgcgccgatgcggcactcttcggtcttcgagcatgacttcggaagaactcctgaagtatcccgcctaacccgtaccctgcagcgttttcttgccaagacagtccataacaacctcgccatccgccagcggcgtgcccaattggtggcgcaaatctgcgacgaagccctgcaatacgccgcccgtctgcgcgaactggagcccggctggagcgcaacccccgggtgccaactgcatgacgcggagcagctctggctcgatccgttgcgcgcacagaccgatgagacgttcttgcagcgccgactacgaggtgactggcctgccgaggtcggaaatcgcttcgccaactggctgaaccgggcggtcagcagcgacagtcagatactgggtagcccggaagccgcccaatggagccaggagctgagcaaggaactgacgatgttcaaggagatactcgaagatgagcgtgactgataataacattggaagtggataacggatccgggccctgtacaagatcctgtaaaacgacggccagtgaattcactcgagttctagaaataattttgtttaactttaagaaggagatatagatcatgagcgtgactgatcccgaggcgctgctgttgctgccacgcctgtccatccagaacgccaacgccatttccagccccttgacctggggtttcccttcgcccggcgctttcaccggattcgtccatgccttgcagcgtcgagtcggaatctccctcgatatcgaactggacggtgtcggcatcgtctgtcaccgcttcgaagcgcagatatcgcaaccggccggcaagcgcaccaaggtcttcaacctgacccgcaatccgctgaaccgcgacggctccaccgcagccatcgtcgaagaaggtcgcgcccatctggaggtcagtctgctgctcggagtgcatggcgatggtctggacgatcaccccgcacaggaaatcgccaggcaggtacaggagcaggctggcgccatgcgcctcgccggtggcagcatcctgccctggtgcaatgagcgcttcccggctccgaacgccgaactgctgatgctgggtggcagcgacgaacagcggcgcaagaaccagcgccggcttacccgccgcctgctccccggcttcgccctggtgagtcgcgaggcgttgttgcaacaacatctggaaaccttgcgcaccacgctccccgaagccaccacgctcgatgcactgctcgatctttgtcgaatcaacttcgagcctcctgcaacctcgtccgaagaagaagcatcgccgcccgatgcagcctggcaagtgcgcgacaagcccggctggctggtgccgatcccggctggctacaacgccctgtcacccctgtacctccccggcgaagtgcgaaatgcccgtgatagagaaacaccgctgcgcttcgtcgaaaacctcttcggtctgggcgaatggctcagcccccatcgcgtcgccgcgttatcggacctgctttggtatcaccacgccgagcctgacaaagggctctaccgctggagcacaccccgtttcgtcgaacacgccatcgcataataataagatcccaactccataaggatccgcgatcgcagcggataacaatttcacatcctgcaggactcgagttctagaaataattttgtttaactttaagaaggagatatagatcatgtccaagccaatactgagcaccgcttccgtcctcgccttcgaacgtaagctcgacccttccgacgcccttatgagcgctggcgcctgggcgcaacgcgacgcctcgcaggaatggccggccgtgaccgtgcgcgagaagtccgtacgcggcaccatctccaaccgcctcaagaccaaggaccgtgacccggccaagctggacgcctcgatccagtcgcccaacctgcagacggtggacgtggccaacctgccgagcgacgccgacaccctcaaggtccgcttcaccctccgtgtgctcggcggcgccggaacaccgtctgcctgcaacgacgcggcctaccgtgacaagctgctgcaaacggtcgccacctacgtgaacgatcagggcttcgccgagctggctcgtcgttatgcgcacaacctggccaacgcccgcttcctgtggcgcaaccgggtgggcgcggaagcggtggaagtccgtatcaaccatatccgccagggcgaggtggctcgcgcctggcgcttcgacgccctggccatcggcttgcgcgacttcaaggccgacgccgaactggacgcgctcgccgaactgatcgccagcggcctctcaggcagtgggcatgtcctgctcgaagtggtcgccttcgcccgtatcggcgacggccaggaagtcttcccctcccaggaactgatcctcgacaaaggcgacaagaaaggccagaagagcaagaccctgtacagcgtacgcgatgccgcggccatccactcgcagaagatcggcaatgccctgcgcaccatcgatacgtggtatcccgacgaagatggcctcggccccatcgccgtggagccctacggctccgtcacatcccagggcaaagcctatcgccagcccaagcagaagctggacttctatacgctgctcgacaactgggtactgcgcgacgaggcgcccgccgtggagcaacagcattatgtgatcgccaacctgatccgtggcggcgtgttcggtgaagccgaagagaagtaataataagatcccaactccataaggatccgcgatcgcggcgcgcccgccagggttttcccagtcgcggccgccctgcaggactcgagttctagaaataattttgtttaactttaagaaggagatatagatcatggaccactacctcgacattcgcttgcgaccggacccggaatttcccccggcgcaactcatgagcgtgctcttcggcaagctccaccaggccctggtggcacagggcggggacaggatcggcgtgagcttccccgacctcgacgaaagccgctcccggctgggcgagcgcctgcgcattcatgcctcggcggacgaccttcgtgccctgctcgcccggccctggctggaagggttgcgggaccatctgcaattcggagaaccggcagtcgtgcctcaccccacaccgtaccgtcaggtcagtcgggttcaggcgaaaagcaatccggaacgcctgcggcggcggctcatgcgccggcacgatctgagtgaggaggaggctcggaaacgcattcccgatacggtcgcgagagccttggacctgcccttcgtcacgctacgcagccagagcaccggacagcacttccgtctcttcatccgccacgggccgttgcaggtgacggcagaggaaggaggattcacctgttacgggttgagcaaaggaggtttcgttccctggttctgataacctaggctgctgccaccgctgagcaataactagcataaccccttggggcctctaaacgggtcttgaggggttttttgctgaaacctcaggcatttgagaagcacacggtcacactgcttccggtagtcaataaaccggtaaaccagcaatagacataagcggctatttaacgaccctgccctgaaccgacgaccgggtcatcgtggccggatcttgcggcccctcggcttgaacgaattgttagacattatttgccgactaccttggtgatctcgcctttcacgtagtggacaaattcttccaactgatctgcgcgcgaggccaagcgatcttcttcttgtccaagataagcctgtctagcttcaagtatgacgggctgatactgggccggcaggcgctccattgcccagtcggcagcgacatccttcggcgcgattttgccggttactgcgctgtaccaaatgcgggacaacgtaagcactacatttcgctcatcgccagcccagtcgggcggcgagttccatagcgttaaggtttcatttagcgcctcaaatagatcctgttcaggaaccggatcaaagagttcctccgccgctggacctaccaaggcaacgctatgttctcttgcttttgtcagcaagatagccagatcaatgtcgatcgtggctggctcgaagatacctgcaagaatgtcattgcgctgccattctccaaattgcagttcgcgcttagctggataacgccacggaatgatgtcgtcgtgcacaacaatggtgacttctacagcgcggagaatctcgctctctccaggggaagccgaagtttccaaaaggtcgttgatcaaagctcgccgcgttgtttcatcaagccttacggtcaccgtaaccagcaaatcaatatcactgtgtggcttcaggccgccatccactgcggagccgtacaaatgtacggccagcaacgtcggttcgagatggcgctcgatgacgccaactacctctgatagttgagtcgatacttcggcgatcaccgcttccctcatactcttcctttttcaatattattgaagcatttatcagggttattgtctcatgagcggatacatatttgaatgtatttagaaaaataaacaaatagctagctcactcggtcgctacgctccgggcgtgagactgcggcgggcgctgcggacacatacaaagttacccacagattccgtggataagcaggggactaacatgtgaggcaaaacagcagggccgcgccggtggcgtttttccataggctccgccctcctgccagagttcacataaacagacgcttttccggtgcatctgtgggagccgtgaggctcaaccatgaatctgacagtacgggcgaaacccgacaggacttaaagatccccaccgtttccggcgggtcgctccctcttgcgctctcctgttccgaccctgccgtttaccggatacctgttccgcctttctcccttacgggaagtgtggcgctttctcatagctcacacactggtatctcggctcggtgtaggtcgttcgctccaagctgggctgtaagcaagaactccccgttcagcccgactgctgcgccttatccggtaactgttcacttgagtccaacccggaaaagcacggtaaaacgccactggcagcagccattggtaactgggagttcgcagaggatttgtttagctaaacacgcggttgctcttgaagtgtgcgccaaagtccggctacactggaaggacagatttggttgctgtgctctgcgaaagccagttaccacggttaagcagttccccaactgacttaaccttcgatcaaaccacctccccaggtggttttttcgtttacagggcaaaagattacgcgcagaaaaaaaggatctcaagaagatcctttgatcttttctactgaaccgctctagatttcagtgcaatttatctcttcaaatgtagcacctgaagtcagccccatacgatataagttgtaattctcatgttagtcatgccccgcgcccaccggaaggagctgactgggttgaaggctctcaagggcatcggtcgagatcccggtgcctaatgagtgagctaacttacattaattgcgttgcgctcactgcccgctttccagtcgggaaacctgtcgtgccagctgcattaatgaatcggccaacgcgcggggagaggcggtttgcgtattgggcgccagggtggtttttcttttcaccagtgagacgggcaacagctgattgcccttcaccgcctggccctgagagagttgcagcaagcggtccacgctggtttgccccagcaggcgaaaatcctgtttgatggtggttaacggcgggatataacatgagctgtcttcggtatcgtcgtatcccactaccgagatgtccgcaccaacgcgcagcccggactcggtaatggcgcgcattgcgcccagcgccatctgatcgttggcaaccagcatcgcagtgggaacgatgccctcattcagcatttgcatggtttgttgaaaaccggacatggcactccagtcgccttcccgttccgctatcggctgaatttgattgcgagtgagatatttatgccagccagccagacgcagacgcgccgagacagaacttaatgggcccgctaacagcgcgatttgctggtgacccaatgcgaccagatgctccacgcccagtcgcgtaccgtcttcatgggagaaaataatactgttgatgggtgtctggtcagagacatcaagaaataacgccggaacattagtgcaggcagcttccacagcaatggcatcctggtcatccagcggatagttaatgatcagcccactgacgcgttgcgcgagaagattgtgcaccgccgctttacaggcttcgacgccgcttcgttctaccatcgacaccaccacgctggcacccagttgatcggcgcgagatttaatcgccgcgacaatttgcgacggcgcgtgcagggccagactggaggtggcaacgccaatcagcaacgactgtttgcccgccagttgttgtgccacgcggttgggaatgtaattcagctccgccatcgccgcttccactttttcccgcgttttcgcagaaacgtggctggcctggttcaccacgcgggaaacggtctgataagag

SEQ ID NO: 39 - DNA, 7957 bp, Synthetic construct
  source 1..7957: mol_type = other DNA
acaccggcatactctgcgacatcgtataacgttactggtttcacattcaccaccctgaattgactctcttccgggcgctatcatgccataccgcgaaaggttttgcgccattcgatggtgtccgggatctcgacgctctcccttatgcgactcctgcattaggaaattaatacgactcactataggggaattgtgagcggataacaattcccctgtagaaataattttgtttaactttaataaggagatataccatgggttcactgccgtataggcagctaagaaaagtacagcgcggctgaaatcatcattaaagcggttcactgccgtataggcagctaagaaaggatccgaattcgagctcggcgcgcctgcaggtcgacaagcttgcggccgcataatgcttaagtcgaacagaaagtaatcgtattgtacacggccgcataatcgaaattaatacgactcactataggggaattgtgagcggataacaattccccatcttagtatattagttaagtataagaaggagatatacatatgacctctcccctcccaacgcctacgtggcaggagcttcgccagttcatcgaatccttcatccaggagcgcctccagggcaagctggacaaactccaacccgacgaagacgacaagcgccagacattgctggccacccaccggcgggaggcctggctggccgatgccgcccggcgggttggccagttgcagttggtgacccacacgctcaagccgatccatcccgacgcccgcggcagcaacctgcacagcctgccgcaagcacccggccaaccgggcctcgccggttcccatgagctaggtgacaggctggtcagcgatgtggtgggcaatgccgcggcgctggacgtattcaagtttctcagtctccagtatcagggtaaaaatcttctgaactggctgacagaagacagtgccgaggcattacaggcgctgtccgataacgccgaacaggctcgcgaatggcggcaagcgttcatcggcatcacgaccgtcaaaggcgctcccgcgtcccacagcctggccaagcagttgtactttcccctgcccggttccggctaccacctgctagcaccgctgtttcccaccagtctggtgcatcacgtccacgctctgctccgcgaagcgcgcttcggcgacgcggccaaggcggcacgcgaagcgcgcagccgccaggagtcatggccccacggattcagcgagtaccccaacctggcgatccagaagttcggcggtaccaagccgcagaacatcagtcagttgaacaacgagcgccgtggcgagaactggttgctgccatcgcttccgccgaactggcaaaggcagaatgtaaacgcgccgatgcggcactcttcggtcttcgagcatgacttcggaagaactcctgaagtatcccgcctaacccgtaccctgcagcgttttcttgccaagacagtccataacaacctcgccatccgccagcggcgtgcccaattggtggcgcaaatctgcgacgaagccctgcaatacgccgcccgtctgcgcgaactggagcccggctggagcgcaacccccgggtgccaactgcatgacgcggagcagctctggctcgatccgttgcgcgcacagaccgatgagacgttcttgcagcgccgactacgaggtgactggcctgccgaggtcggaaatcgcttcgccaactggctgaaccgggcggtcagcagcgacagtcagatactgggtagcccggaagccgcccaatggagccaggagctgagcaaggaactgacgatgttcaaggagatactcgaagatgagcgtgactgataataacattggaagtggataacggatccgggccctgtacaagatcctgtaaaacgacggccagtgaattcactcgagttctagaaataattttgtttaactttaagaaggagatatagatcatgagcgtgactgatcccgaggcgctgctgttgctgccacgcctgtccatccagaacgccaacgccatttccagccccttgacctggggtttcccttcgcccggcgctttcaccggattcgtccatgccttgcagcgtcgagtcggaatctccctcgatatcgaactggacggtgtcggcatcgtctgtcaccgcttcgaagcgcagatatcgcaaccggccggcaagcgcaccaaggtcttcaacctgacccgcaatccgctgaaccgcgacggctccaccgcagccatcgtcgaagaaggtcgcgcccatctggaggtcagtctgctgctcggagtgcatggcgatggtctggacgatcaccccgcacaggaaatcgccaggcaggtacaggagcaggctggcgccatgcgcctcgccggtggcagcatcctgccctggtgcaatgagcgcttcccggctccgaacgccgaactgctgatgctgggtggcagcgacgaacagcggcgcaagaaccagcgccggcttacccgccgcctgctccccggcttcgccctggtgagtcgcgaggcgttgttgcaacaacatctggaaaccttgcgcaccacgctccccgaagccaccacgctcgatgcactgctcgatctttgtcgaatcaacttcgagcctcctgcaacctcgtccgaagaagaagcatcgccgcccgatgcagcctggcaagtgcgcgacaagcccggctggctggtgccgatcccggctggctacaacgccctgtcacccctgtacctccccggcgaagtgcgaaatgcccgtgatagagaaacaccgctgcgcttcgtcgaaaacctcttcggtctgggcgaatggctcagcccccatcgcgtcgccgcgttatcggacctgctttggtatcaccacgccgagcctgacaaagggctctaccgctggagcacaccccgtttcgtcgaacacgccatcgcataataataagatcccaactccataaggatccgcgatcgcagcggataacaatttcacatcctgcaggactcgagttctagaaataattttgtttaactttaagaaggagatatagatcatgtccaagccaatactgagcaccgcttccgtcctcgccttcgaacgtaagctcgacccttccgacgcccttatgagcgctggcgcctgggcgcaacgcgacgcctcgcaggaatggccggccgtgaccgtgcgcgagaagtccgtacgcggcaccatctccaaccgcctcaagaccaaggaccgtgacccggccaagctggacgcctcgatccagtcgcccaacctgcagacggtggacgtggccaacctgccgagcgacgccgacaccctcaaggtccgcttcaccctccgtgtgctcggcggcgccggaacaccgtctgcctgcaacgacgcggcctaccgtgacaagctgctgcaaacggtcgccacctacgtgaacgatcagggcttcgccgagctggctcgtcgttatgcgcacaacctggccaacgcccgcttcctgtggcgcaaccgggtgggcgcggaagcggtggaagtccgtatcaaccatatccgccagggcgaggtggctcgcgcctggcgcttcgacgccctggccatcggcttgcgcgacttcaaggccgacgccgaactggacgcgctcgccgaactgatcgccagcggcctctcaggcagtgggcatgtcctgctcgaagtggtcgccttcgcccgtatcggcgacggccaggaagtcttcccctcccaggaactgatcctcgacaaaggcgacaagaaaggccagaagagcaagaccctgtacagcgtacgcgatgccgcggccatccactcgcagaagatcggcaatgccctgcgcaccatcgatacgtggtatcccgacgaagatggcctcggccccatcgccgtggagccctacggctccgtcacatcccagggcaaagcctatcgccagcccaagcagaagctggacttctatacgctgctcgacaactgggtactgcgcgacgaggcgcccgccgtggagcaacagcattatgtgatcgccaacctgatccgtggcggcgtgttcggtgaagccgaagagaagtaataataagatcccaactccataaggatccgcgatcgcggcgcgcccgccagggttttcccagtcgcggccgccctgcaggactcgagttctagaaataattttgtttaactttaagaaggagatatagatcatggaccactacctcgacattcgcttgcgaccggacccggaatttcccccggcgcaactcatgagcgtgctcttcggcaagctccaccaggccctggtggcacagggcggggacaggatcggcgtgagcttccccgacctcgacgaaagccgctcccggctgggcgagcgcctgcgcattcatgcctcggcggacgaccttcgtgccctgctcgcccggccctggctggaagggttgcgggaccatctgcaattcggagaaccggcagtcgtgcctcaccccacaccgtaccgtcaggtcagtcgggttcaggcgaaaagcaatccggaacgcctgcggcggcggctcatgcgccggcacgatctgagtgaggaggaggctcggaaacgcattcccgatacggtcgcgagagccttggacctgcccttcgtcacgctacgcagccagagcaccggacagcacttccgtctcttcatccgccacgggccgttgcaggtgacggcagaggaaggaggattcacctgttacgggttgagcaaaggaggtttcgttccctggttctgataacctaggctgctgccaccgctgagcaataactagcataaccccttggggcctctaaacgggtcttgaggggttttttgctgaaacctcaggcatttgagaagcacacggtcacactgcttccggtagtcaataaaccggtaaaccagcaatagacataagcggctatttaacgaccctgccctgaaccgacgaccgggtcatcgtggccggatcttgcggcccctcggcttgaacgaattgttagacattatttgccgactaccttggtgatctcgcctttcacgtagtggacaaattcttccaactgatctgcgcgcgaggccaagcgatcttcttcttgtccaagataagcctgtctagcttcaagtatgacgggctgatactgggccggcaggcgctccattgcccagtcggcagcgacatccttcggcgcgattttgccggttactgcgctgtaccaaatgcgggacaacgtaagcactacatttcgctcatcgccagcccagtcgggcggcgagttccatagcgttaaggtttcatttagcgcctcaaatagatcctgttcaggaaccggatcaaagagttcctccgccgctggacctaccaaggcaacgctatgttctcttgcttttgtcagcaagatagccagatcaatgtcgatcgtggctggctcgaagatacctgcaagaatgtcattgcgctgccattctccaaattgcagttcgcgcttagctggataacgccacggaatgatgtcgtcgtgcacaacaatggtgacttctacagcgcggagaatctcgctctctccaggggaagccgaagtttccaaaaggtcgttgatcaaagctcgccgcgttgtttcatcaagccttacggtcaccgtaaccagcaaatcaatatcactgtgtggcttcaggccgccatccactgcggagccgtacaaatgtacggccagcaacgtcggttcgagatggcgctcgatgacgccaactacctctgatagttgagtcgatacttcggcgatcaccgcttccctcatactcttcctttttcaatattattgaagcatttatcagggttattgtctcatgagcggatacatatttgaatgtatttagaaaaataaacaaatagctagctcactcggtcgctacgctccgggcgtgagactgcggcgggcgctgcggacacatacaaagttacccacagattccgtggataagcaggggactaacatgtgaggcaaaacagcagggccgcgccggtggcgtttttccataggctccgccctcctgccagagttcacataaacagacgcttttccggtgcatctgtgggagccgtgaggctcaaccatgaatctgacagtacgggcgaaacccgacaggacttaaagatccccaccgtttccggcgggtcgctccctcttgcgctctcctgttccgaccctgccgtttaccggatacctgttccgcctttctcccttacgggaagtgtggcgctttctcatagctcacacactggtatctcggctcggtgtaggtcgttcgctccaagctgggctgtaagcaagaactccccgttcagcccgactgctgcgccttatccggtaactgttcacttgagtccaacccggaaaagcacggtaaaacgccactggcagcagccattggtaactgggagttcgcagaggatttgtttagctaaacacgcggttgctcttgaagtgtgcgccaaagtccggctacactggaaggacagatttggttgctgtgctctgcgaaagccagttaccacggttaagcagttccccaactgacttaaccttcgatcaaaccacctccccaggtggttttttcgtttacagggcaaaagattacgcgcagaaaaaaaggatctcaagaagatcctttgatcttttctactgaaccgctctagatttcagtgcaatttatctcttcaaatgtagcacctgaagtcagccccatacgatataagttgtaattctcatgttagtcatgccccgcgcccaccggaaggagctgactgggttgaaggctctcaagggcatcggtcgagatcccggtgcctaatgagtgagctaacttacattaattgcgttgcgctcactgcccgctttccagtcgggaaacctgtcgtgccagctgcattaatgaatcggccaacgcgcggggagaggcggtttgcgtattgggcgccagggtggtttttcttttcaccagtgagacgggcaacagctgattgcccttcaccgcctggccctgagagagttgcagcaagcggtccacgctggtttgccccagcaggcgaaaatcctgtttgatggtggttaacggcgggatataacatgagctgtcttcggtatcgtcgtatcccactaccgagatgtccgcaccaacgcgcagcccggactcggtaatggcgcgcattgcgcccagcgccatctgatcgttggcaaccagcatcgcagtgggaacgatgccctcattcagcatttgcatggtttgttgaaaaccggacatggcactccagtcgccttcccgttccgctatcggctgaatttgattgcgagtgagatatttatgccagccagccagacgcagacgcgccgagacagaacttaatgggcccgctaacagcgcgatttgctggtgacccaatgcgaccagatgctccacgcccagtcgcgtaccgtcttcatgggagaaaataatactgttgatgggtgtctggtcagagacatcaagaaataacgccggaacattagtgcaggcagcttccacagcaatggcatcctggtcatccagcggatagttaatgatcagcccactgacgcgttgcgcgagaagattgtgcaccgccgctttacaggcttcgacgccgcttcgttctaccatcgacaccaccacgctggcacccagttgatcggcgcgagatttaatcgccgcgacaatttgcgacggcgcgtgcagggccagactggaggtggcaacgccaatcagcaacgactgtttgcccgccagttgttgtgccacgcggttgggaatgtaattcagctccgccatcgccgcttccactttttcccgcgttttcgcagaaacgtggctggcctggttcaccacgcgggaaacggtctgataagag

SEQ ID NO: 40 - DNA, 6591 bp, Synthetic construct
  source 1..6591: mol_type = other DNA
ttcgcagaaacgtggctggcctggttcaccacgcgggaaacggtctgataagagacaccggcatactctgcgacatcgtataacgttactggtttcacattcaccaccctgaattgactctcttccgggcgctatcatgccataccgcgaaaggttttgcgccattcgatggtgtccgggatctcgacgctctcccttatgcgactcctgcattaggaaattaatacgactcactataggggaattgtgagcggataacaattcccctgtagaaataattttgtttaactttaataaggagatataccatgaacatcctgctggtgtcgcaatgcgaaaagcgcgccctgagcgaaacccgccgcattctcgaccagttcgccgagcgccgcggcgaacggacctggcaaacgcccatcactcaagccggactggataccctgcgacgcctgctgaagaaaagcgcacggcgcaacaccgccgtagcctgtcactggatccgcggccgcgaccacagcgaactgctgtggatcgtcggtgatgccagccgcttcaacgcccagggtgcggtgccgaccaacaggacctgccgcgacatcctgcgcaaggaagacgagaacgactggcacagcgccgaggacatccgcctgctgacggtgatggcagcgctgttccacgatatcggcaaggccagccaggccttccaggccaaactgcggaaccgcggcaaaccgatggccgatgcctatcgtcacgaatgggtatcactgcgcctgttcgaagccttcgttggcccaggcagcagcgacgaggactggctgaggcgcctggcggacaagcgagagacgggcgatgcctggctgtcgcaactggccagggacgaccggcaatccgcgccacccggcccgttccagaaaagccggctaccgccgctcgcccaggcggtcggctggttgatcgtcagccatcatcgcctgcccaacggggaccatcgcggcagcgcctcgctggcacgcttgccggcccccatccagagccaatggtgcggcgcacgcgacgcagacgcaaaagaaaaggccgcctgctggcagttcccccacggcctgcccttcgccagcgcccattggcgcgccaggacagcgctatgcgcgcagagcatgctcgagcgtcccggcctgctggctcggggaccggccttgttgcatgattcctacgtcatgcatgtgtcccgactgatcctgatgctcgcggaccaccactattccagtctccctgccgactcccggctgggcgacccgaacttccccttgcacgccaacaccgaccgggacagcggcaaactaaagcagcgcctggacgaacacctgctcggcgtcgccctgcacagtcgcaagctcgccggcaccctgccacgcctggagcgacaactaccgcgccttgcccggcacaagggcttcacccgccgggtcgagcagccgcgcttccgctggcaggacaaggcctacgactgcgcgatggcctgccgcgagcaggctatggagcatggattcttcggcctcaacctggcgtcgaccggttgcggtaagaccctcgccaacggccgtatcctgtatgcgctggccgatccgcaacgcggcgcgcgtttcagcatcgctctcggcctgcgcagcttgaccctgcaaaccgggcaggcctaccgcgagcggctcggcctgggcgacgacgacctcgctatcctggtcggcggcagcgccgcccgcgaactgttcgaaaagcagcaggagcgcctggagcgcagcggtagcgagtcagcccaggagctgctggcggaaaacagccatgtacacttcgccggcacgctcgaggacggccctctacgcgagtggctcggcaggaacagcgcgggaaaccgcctactccaggcgcccatcctggcctgcaccatcgaccacctgatgcccgccagcgaaagcctgcgcggcggacaccagatagcgccactgctccgcctgatgacttccgacctggtgctcgacgaggtcgacgacttcgatatcgacgacctgcccgccctgtcgcggctggtgcactgggccggcctgttcggcagccgcgtgctgctctcctccgcgaccctgccgccggccttggtgcagggcctgttcgaggcctatcgcagcggccgggaaatcttccagcgccatcgtggcgctcccggacgcgctacggaaatccgctgtgcctggttcgacgagttctccagccaatccagcgcccacggcgccgtaacctccttcagcgaagcgcatgcgaccttcgtcgcccagcgtctggcgaagctcgagcaactgccgccacgtcgccaggcgcagctatgcaccgtgcatgccgctggcgaggcccgtcccgcgctgtgccgcgagttggccgggcagatgaatacctggatggctgacctgcatcgctgccatcacaccgaacaccaaggacgtcgcatcagtttcggcctgctacggctggccaacatcgaacccctgatcgaactggcccaggccatcctcgcccagggtgcgcccgaggggttgcatgtccatctgtgtgtctaccattcgcggcatccccttctggtccgctcggccatcgagcgacaactcgatgaactgctgaagcgttcggacgacgacgccgccgcgctgttcgctcgtccgacgctggccaaggcgctccaggccagcacggagcgggatcatctgttcgtcgtactcgcctcgccggtggcggaggtcggtcgcgaccacgattacgactgggccatcgtcgaaccctcctccatgcgctcgatcatccagttggccgggcgaatccgccgccatcgctccggcttcagcggcgaggccaacctatacctgctatcgcgcaatatccgctcgctggaagggcagaatccggcgttccagcggcccggcttcgagacccccgacttccctcttgacagccacgacctgcacgacctgctcgaccccgccctactcgcccgcatcgacgccagcccacgaatcgtcgaaccgttcccactgttcccacgcagccggttggtcgacctggaacaccgacgcctgcgcgcgctgatgcttgccgacgacccaccgtcgtccctgctcggcgtaccgctctggtggcaaaccccggcatcgctcagcggcgccctgcaaaccagccaaccatttcgcgcaggcgccaaggagcgatgctacgccctgctgccggacgaggacgacgaggagcgcttgcatttcagccgctacgaagaagggacctggagcaaccaggacaacctgttgcgcaacctcgacctcacctatggcccgcgcatccagacatggggcacggtcaactatcgggaggagctagtcgcaatggccggccgcgaggacctcgacctgcgtcaatgcgccatgcgctacggcgaggtgagattgcgagaaaacacccagggatggagctaccacccttatttggggttcaagaaatacaactgataacctaggctgctgccaccgctgagcaataactagcataaccccttggggcctctaaacgggtcttgaggggttttttgctgaaacctcaggcatttgagaagcacacggtcacactgcttccggtagtcaataaaccggtaaaccagcaatagacataagcggctatttaacgaccctgccctgaaccgacgacaagctgacgaccgggtctccgcaagtggcacttttcggggaaatgtgcgcggaacccctatttgtttatttttctaaatacattcaaatatgtatccgctcatgaattaattcttagaaaaactcatcgagcatcaaatgaaactgcaatttattcatatcaggattatcaataccatatttttgaaaaagccgtttctgtaatgaaggagaaaactcaccgaggcagttccataggatggcaagatcctggtatcggtctgcgattccgactcgtccaacatcaatacaacctattaatttcccctcgtcaaaaataaggttatcaagtgagaaatcaccatgagtgacgactgaatccggtgagaatggcaaaagtttatgcatttctttccagacttgttcaacaggccagccattacgctcgtcatcaaaatcactcgcatcaaccaaaccgttattcattcgtgattgcgcctgagcgagacgaaatacgcggtcgctgttaaaaggacaattacaaacaggaatcgaatgcaaccggcgcaggaacactgccagcgcatcaacaatattttcacctgaatcaggatattcttctaatacctggaatgctgttttcccggggatcgcagtggtgagtaaccatgcatcatcaggagtacggataaaatgcttgatggtcggaagaggcataaattccgtcagccagtttagtctgaccatctcatctgtaacatcattggcaacgctacctttgccatgtttcagaaacaactctggcgcatcgggcttcccatacaatcgatagattgtcgcacctgattgcccgacattatcgcgagcccatttatacccatataaatcagcatccatgttggaatttaatcgcggcctagagcaagacgtttcccgttgaatatggctcatactcttcctttttcaatattattgaagcatttatcagggttattgtctcatgagcggatacatatttgaatgtatttagaaaaataaacaaataggcatgctagcgcagaaacgtcctagaagatgccaggaggatacttagcagagagacaataaggccggagcgaagccgtttttccataggctccgcccccctgacgaacatcacgaaatctgacgctcaaatcagtggtggcgaaacccgacaggactataaagataccaggcgtttccccctgatggctccctcttgcgctctcctgttcccgtcctgcggcgtccgtgttgtggtggaggctttacccaaatcaccacgtcccgttccgtgtagacagttcgctccaagctgggctgtgtgcaagaaccccccgttcagcccgactgctgcgccttatccggtaactatcatcttgagtccaacccggaaagacacgacaaaacgccactggcagcagccattggtaactgagaattagtggatttagatatcgagagtcttgaagtggtggcctaacagaggctacactgaaaggacagtatttggtatctgcgctccactaaagccagttaccaggttaagcagttccccaactgacttaaccttcgatcaaaccgcctccccaggcggttttttcgtttacagagcaggagattacgacgatcgtaaaaggatctcaagaagatcctttacggattcccgacaccatcactctagatttcagtgcaatttatctcttcaaatgtagcacctgaagtcagccccatacgatataagttgtaattctcatgttagtcatgccccgcgcccaccggaaggagctgactgggttgaaggctctcaagggcatcggtcgagatcccggtgcctaatgagtgagctaacttacattaattgcgttgcgctcactgcccgctttccagtcgggaaacctgtcgtgccagctgcattaatgaatcggccaacgcgcggggagaggcggtttgcgtattgggcgccagggtggtttttcttttcaccagtgagacgggcaacagctgattgcccttcaccgcctggccctgagagagttgcagcaagcggtccacgctggtttgccccagcaggcgaaaatcctgtttgatggtggttaacggcgggatataacatgagctgtcttcggtatcgtcgtatcccactaccgagatgtccgcaccaacgcgcagcccggactcggtaatggcgcgcattgcgcccagcgccatctgatcgttggcaaccagcatcgcagtgggaacgatgccctcattcagcatttgcatggtttgttgaaaaccggacatggcactccagtcgccttcccgttccgctatcggctgaatttgattgcgagtgagatatttatgccagccagccagacgcagacgcgccgagacagaacttaatgggcccgctaacagcgcgatttgctggtgacccaatgcgaccagatgctccacgcccagtcgcgtaccgtcttcatgggagaaaataatactgttgatgggtgtctggtcagagacatcaagaaataacgccggaacattagtgcaggcagcttccacagcaatggcatcctggtcatccagcggatagttaatgatcagcccactgacgcgttgcgcgagaagattgtgcaccgccgctttacaggcttcgacgccgcttcgttctaccatcgacaccaccacgctggcacccagttgatcggcgcgagatttaatcgccgcgacaatttgcgacggcgcgtgcagggccagactggaggtggcaacgccaatcagcaacgactgtttgcccgccagttgttgtgccacgcggttgggaatgtaattcagctccgccatcgccgcttccactttttcccgcgtt

SEQ ID NO: 41 - DNA, 9169 bp, Synthetic construct
  source 1..9169: mol_type = other DNA
gttgggaatgtaattcagctccgccatcgccgcttccactttttcccgcgttttcgcagaaacgtggctggcctggttcaccacgcgggaaacggtctgataagagacaccggcatactctgcgacatcgtataacgttactggtttcacattcaccaccctgaattgactctcttccgggcgctatcatgccataccgcgaaaggttttgcgccattcgatggtgtccgggatctcgacgctctcccttatgcgactcctgcattaggaaattaatacgactcactatagtgatttcagccgcgctgtacgttttagagctagaaatagcaagttaaaataaggctagtccgttatcaacttgaaaaagtggcaccgagtcggtgctttttttggtagtgcagcgcgatcgtaatcaggatcccatggtacgcgtgctagaggcatcaaataaaacgaaaggctcagtcgaaagactgggcctttcgttttatctgttgtttgtcggtgaacgctctcctgagtaggacaaatggatccgaattcgagctcggcgcgcctgcaggtcgacaagcttgcggccgcataatgcttaagtcgaacagaaagtaatcgtattgtacacggccgcataatcgaaattaatacgactcactataggggaattgtgagcggataacaattccccatcttagtatattagttaagtataagaaggagatatacatatgtttttgcaaagacctaaaccttacagcgatgaaagtttagaaagtttctttatccgagtggctaacaaaaatggctacggtgatgtccatcgcttcctagaagccactaaacgattccttcaagacattgaccataatggctatcaaacctttccgactgatataactcggataaacccatactcagctaaaaacagttccagcgcacgaactgcgtcattcctgaaacttgcacaattgacatttaatgaaccgccagagctacttgggttggcaattaacagaacaaacatgaaatactcgccgtcaactagcgcggttgttagaggtgcagaagtctttcctcgcagtttactacggacgcactccatcccctgctgtcctttgtgtctgcgagaaaatggctacgcctcctacctttggcactttcaggggtacgaatactgccacagccataacgtacctttaattaccacttgtagctgtggtaaggagtttgactaccgagtatctgggttaaagggcatttgctgcaaatgcaaggagcctatcaccttaaccagcagggagaacggtcatgaggcagcgtgtactgtttcaaactggcttgctggccatgaatctaaacctctgccaaatcttcctaaaagctaccgatggggtttagttcattggtggatgggtattaaagatagcgagttcgatcacttttcgttcgttcaatttttctcaaactggccaaggtcattccactcgataatcgaagatgaagtagagttcaaccttgagcatgctgttgtcagcacgtctgaattacgactaaaagatcttcttggtcgattgtttttcggttcaattcggttacctgagcggaatcttcaacacaatatcatccttggtgagcttctctgctatttagaaaatcgtttatggcaagacaagggattaatcgccaacctcaaaatgaacgcgttagaggcgactgtaatgttaaattgtagcctcgatcagattgcatcaatggttgaacaacgcatcttgaagccaaatcgaaaaagcaagcccaacagccctcttgatgttaccgattatctatttcatttcggcgatattttctgtctttggttagctgagttccaaagcgatgagtttaaccgttcgttttatgtgtcgaggtggtccggtagcgaaacgccggggacttctgaatctgctactccggaaagcggaggctctggctcgtcaggaggttcaggaagttcaggcggtatggataagaaatactcaataggcttagctatcggcacaaatagcgtcggatgggcggtgatcactgatgaatataaggttccgtctaaaaagttcaaggttctgggaaatacagaccgccacagtatcaaaaaaaatcttataggggctcttttatttgacagtggagagacagcggaagcgactcgtctcaaacggacagctcgtagaaggtatacacgtcggaagaatcgtatttgttatctacaggagattttttcaaatgagatggcgaaagtagatgatagtttctttcatcgacttgaagagtcttttttggtggaagaagacaagaagcatgaacgtcatcctatttttggaaatatagtagatgaagttgcttatcatgagaaatatccaactatctatcatctgcgaaaaaaattggtagattctactgataaagcggatttgcgcttaatctatttggccttagcgcatatgattaagtttcgtggtcattttttgattgagggagatttaaatcctgataatagtgatgtggacaaactatttatccagttggtacaaacctacaatcaattatttgaagaaaaccctattaacgcaagtggagtagatgctaaagcgattctttctgcacgattgagtaaatcaagacgattagaaaatctcattgctcagctccccggtgagaagaaaaatggcttatttgggaatctcattgctttgtcattgggtttgacccctaattttaaatcaaattttgatttggcagaagatgctaaattacagctttcaaaagatacttacgatgatgatttagataatttattggcgcaaattggagatcaatatgctgatttgtttttggcagctaagaatttatcagatgctattttactttcagatatcctaagagtaaatactgaaataactaaggctcccctatcagcttcaatgattaaacgctacgatgaacatcatcaagacttgactcttttaaaagctttagttcgacaacaacttccagaaaagtataaagaaatcttttttgatcaatcaaaaaacggatatgcaggttatattgatgggggagctagccaagaagaattttataaatttatcaaaccaattttagaaaaaatggatggtactgaggaattattggtgaaactaaatcgtgaagatttgctgcgcaagcaacggacctttgacaacggctctattccccatcaaattcacttgggtgagctgcatgctattttgagaagacaagaagacttttatccatttttaaaagacaatcgtgagaagattgaaaaaatcttgacttttcgaattccttattatgttggtccattggcgcgtggcaatagtcgttttgcatggatgactcggaagtctgaagaaacaattaccccatggaattttgaagaagttgtcgataaaggtgcttcagctcaatcatttattgaacgcatgacaaactttgataaaaatcttccaaatgaaaaagtactaccaaaacatagtttgctttatgagtattttacggtttataacgaattgacaaaggtcaaatatgttactgaaggaatgcgaaaaccagcatttctttcaggtgaacagaagaaagccattgttgatttactcttcaaaacaaatcgaaaagtaaccgttaagcaattaaaagaagattatttcaaaaaaatagaatgttttgatagtgttgaaatttcaggagttgaagatagatttaatgcttcattaggtacctaccatgatttgctaaaaattattaaagataaagattttttggataatgaagaaaatgaagatatcttagaggatattgttttaacattgaccttatttgaagatagggagatgattgaggaaagacttaaaacatatgctcacctctttgatgataaggtgatgaaacagcttaaacgtcgccgttatactggttggggacgtttgtctcgaaaattgattaatggtattagggataagcaatctggcaaaacaatattagattttttgaaatcagatggttttgccaatcgcaattttatgcagctgatccatgatgatagtttgacatttaaagaagacattcaaaaagcacaagtgtctggacaaggcgatagtttacatgaacatattgcaaatttagctggtagccctgctattaaaaaaggtattttacagactgtaaaagttgttgatgaattggtcaaagtaatggggcggcataagccagaaaatatcgttattgaaatggcacgtgaaaatcagacaactcaaaagggccagaaaaattcgcgagagcgtatgaaacgaatcgaagaaggtatcaaagaattaggaagtcagattcttaaagagcatcctgttgaaaatactcaattgcaaaatgaaaagctctatctctattatctccaaaatggaagagacatgtatgtggaccaagaattagatattaatcgtttaagtgattatgatgtcgatgccattgttccacaaagtttccttaaagacgattcaatagacaataaggtcttaacgcgttctgataaaaatcgtggtaaatcggataacgttccaagtgaagaagtagtcaaaaagatgaaaaactattggagacaacttctaaacgccaagttaatcactcaacgtaagtttgataatttaacgaaagctgaacgtggaggtttgagtgaacttgataaagctggttttatcaaacgccaattggttgaaactcgccaaatcactaagcatgtggcacaaattttggatagtcgcatgaatactaaatacgatgaaaatgataaacttattcgagaggttaaagtgattaccttaaaatctaaattagtttctgacttccgaaaagatttccaattctataaagtacgtgagattaacaattaccatcatgcccatgatgcgtatctaaatgccgtcgttggaactgctttgattaagaaatatccaaaacttgaatcggagtttgtctatggtgattataaagtttatgatgttcgtaaaatgattgctaagtctgagcaagaaataggcaaagcaaccgcaaaatatttcttttactctaatatcatgaacttcttcaaaacagaaattacacttgcaaatggagagattcgcaaacgccctctaatcgaaactaatggggaaactggagaaattgtctgggataaagggcgagattttgccacagtgcgcaaagtattgtccatgccccaagtcaatattgtcaagaaaacagaagtacagacaggcggattctccaaggagtcaattttaccaaaaagaaattcggacaagcttattgctcgtaaaaaagactgggatccaaaaaaatatggtggttttgatagtccaacggtagcttattcagtcctagtggttgctaaggtggaaaaagggaaatcgaagaagttaaaatccgttaaagagttactagggatcacaattatggaaagaagttcctttgaaaaaaatccgattgactttttagaagctaaaggatataaggaagttaaaaaagacttaatcattaaactacctaaatatagtctttttgagttagaaaacggtcgtaaacggatgctggctagtgccggagaattacaaaaaggaaatgagctggctctgccaagcaaatatgtgaattttttatatttagctagtcattatgaaaagttgaagggtagtccagaagataacgaacaaaaacaattgtttgtggagcagcataagcattatttagatgagattattgagcaaatcagtgaattttctaagcgtgttattttagcagatgccaatttagataaagttcttagtgcatataacaaacatagagacaaaccaatacgtgaacaagcagaaaatattattcatttatttacgttgacgaatcttggagctcccgctgcttttaaatattttgatacaacaattgatcgtaaacgatatacgtctacaaaagaagttttagatgccactcttatccatcaatccatcactggtctttatgaaacacgcattgatttgagtcagctaggaggtgactaatagcctaggctgctgccaccgctgagcaataactagcataaccccttggggcctctaaacgggtcttgaggggttttttgctgaaacctcaggcatttgagaagcacacggtcacactgcttccggtagtcaataaaccggtaaaccagcaatagacataagcggctatttaacgaccctgccctgaaccgacgaccgggtcatcgtggccggatcttgcggcccctcggcttgaacgaattgttagacattatttgccgactaccttggtgatctcgcctttcacgtagtggacaaattcttccaactgatctgcgcgcgaggccaagcgatcttcttcttgtccaagataagcctgtctagcttcaagtatgacgggctgatactgggccggcaggcgctccattgcccagtcggcagcgacatccttcggcgcgattttgccggttactgcgctgtaccaaatgcgggacaacgtaagcactacatttcgctcatcgccagcccagtcgggcggcgagttccatagcgttaaggtttcatttagcgcctcaaatagatcctgttcaggaaccggatcaaagagttcctccgccgctggacctaccaaggcaacgctatgttctcttgcttttgtcagcaagatagccagatcaatgtcgatcgtggctggctcgaagatacctgcaagaatgtcattgcgctgccattctccaaattgcagttcgcgcttagctggataacgccacggaatgatgtcgtcgtgcacaacaatggtgacttctacagcgcggagaatctcgctctctccaggggaagccgaagtttccaaaaggtcgttgatcaaagctcgccgcgttgtttcatcaagccttacggtcaccgtaaccagcaaatcaatatcactgtgtggcttcaggccgccatccactgcggagccgtacaaatgtacggccagcaacgtcggttcgagatggcgctcgatgacgccaactacctctgatagttgagtcgatacttcggcgatcaccgcttccctcatactcttcctttttcaatattattgaagcatttatcagggttattgtctcatgagcggatacatatttgaatgtatttagaaaaataaacaaatagctagctcactcggtcgctacgctccgggcgtgagactgcggcgggcgctgcggacacatacaaagttacccacagattccgtggataagcaggggactaacatgtgaggcaaaacagcagggccgcgccggtggcgtttttccataggctccgccctcctgccagagttcacataaacagacgcttttccggtgcatctgtgggagccgtgaggctcaaccatgaatctgacagtacgggcgaaacccgacaggacttaaagatccccaccgtttccggcgggtcgctccctcttgcgctctcctgttccgaccctgccgtttaccggatacctgttccgcctttctcccttacgggaagtgtggcgctttctcatagctcacacactggtatctcggctcggtgtaggtcgttcgctccaagctgggctgtaagcaagaactccccgttcagcccgactgctgcgccttatccggtaactgttcacttgagtccaacccggaaaagcacggtaaaacgccactggcagcagccattggtaactgggagttcgcagaggatttgtttagctaaacacgcggttgctcttgaagtgtgcgccaaagtccggctacactggaaggacagatttggttgctgtgctctgcgaaagccagttaccacggttaagcagttccccaactgacttaaccttcgatcaaaccacctccccaggtggttttttcgtttacagggcaaaagattacgcgcagaaaaaaaggatctcaagaagatcctttgatcttttctactgaaccgctctagatttcagtgcaatttatctcttcaaatgtagcacctgaagtcagccccatacgatataagttgtaattctcatgttagtcatgccccgcgcccaccggaaggagctgactgggttgaaggctctcaagggcatcggtcgagatcccggtgcctaatgagtgagctaacttacattaattgcgttgcgctcactgcccgctttccagtcgggaaacctgtcgtgccagctgcattaatgaatcggccaacgcgcggggagaggcggtttgcgtattgggcgccagggtggtttttcttttcaccagtgagacgggcaacagctgattgcccttcaccgcctggccctgagagagttgcagcaagcggtccacgctggtttgccccagcaggcgaaaatcctgtttgatggtggttaacggcgggatataacatgagctgtcttcggtatcgtcgtatcccactaccgagatgtccgcaccaacgcgcagcccggactcggtaatggcgcgcattgcgcccagcgccatctgatcgttggcaaccagcatcgcagtgggaacgatgccctcattcagcatttgcatggtttgttgaaaaccggacatggcactccagtcgccttcccgttccgctatcggctgaatttgattgcgagtgagatatttatgccagccagccagacgcagacgcgccgagacagaacttaatgggcccgctaacagcgcgatttgctggtgacccaatgcgaccagatgctccacgcccagtcgcgtaccgtcttcatgggagaaaataatactgttgatgggtgtctggtcagagacatcaagaaataacgccggaacattagtgcaggcagcttccacagcaatggcatcctggtcatccagcggatagttaatgatcagcccactgacgcgttgcgcgagaagattgtgcaccgccgctttacaggcttcgacgccgcttcgttctaccatcgacaccaccacgctggcacccagttgatcggcgcgagatttaatcgccgcgacaatttgcgacggcgcgtgcagggccagactggaggtggcaacgccaatcagcaacgactgtttgcccgccagttgttgtgccacgcg

SEQ ID NO: 42 - DNA, 9169 bp, Synthetic construct
  source 1..9169: mol_type = other DNA
tttcccgcgttttcgcagaaacgtggctggcctggttcaccacgcgggaaacggtctgataagagacaccggcatactctgcgacatcgtataacgttactggtttcacattcaccaccctgaattgactctcttccgggcgctatcatgccataccgcgaaaggttttgcgccattcgatggtgtccgggatctcgacgctctcccttatgcgactcctgcattaggaaattaatacgactcactatagtgatttcagccgcgctgtacgttttagagctagaaatagcaagttaaaataaggctagtccgttatcaacttgaaaaagtggcaccgagtcggtgctttttttggtagtgcagcgcgatcgtaatcaggatcccatggtacgcgtgctagaggcatcaaataaaacgaaaggctcagtcgaaagactgggcctttcgttttatctgttgtttgtcggtgaacgctctcctgagtaggacaaatggatccgaattcgagctcggcgcgcctgcaggtcgacaagcttgcggccgcataatgcttaagtcgaacagaaagtaatcgtattgtacacggccgcataatcgaaattaatacgactcactataggggaattgtgagcggataacaattccccatcttagtatattagttaagtataagaaggagatatacatatggataagaaatactcaataggcttagctatcggcacaaatagcgtcggatgggcggtgatcactgatgaatataaggttccgtctaaaaagttcaaggttctgggaaatacagaccgccacagtatcaaaaaaaatcttataggggctcttttatttgacagtggagagacagcggaagcgactcgtctcaaacggacagctcgtagaaggtatacacgtcggaagaatcgtatttgttatctacaggagattttttcaaatgagatggcgaaagtagatgatagtttctttcatcgacttgaagagtcttttttggtggaagaagacaagaagcatgaacgtcatcctatttttggaaatatagtagatgaagttgcttatcatgagaaatatccaactatctatcatctgcgaaaaaaattggtagattctactgataaagcggatttgcgcttaatctatttggccttagcgcatatgattaagtttcgtggtcattttttgattgagggagatttaaatcctgataatagtgatgtggacaaactatttatccagttggtacaaacctacaatcaattatttgaagaaaaccctattaacgcaagtggagtagatgctaaagcgattctttctgcacgattgagtaaatcaagacgattagaaaatctcattgctcagctccccggtgagaagaaaaatggcttatttgggaatctcattgctttgtcattgggtttgacccctaattttaaatcaaattttgatttggcagaagatgctaaattacagctttcaaaagatacttacgatgatgatttagataatttattggcgcaaattggagatcaatatgctgatttgtttttggcagctaagaatttatcagatgctattttactttcagatatcctaagagtaaatactgaaataactaaggctcccctatcagcttcaatgattaaacgctacgatgaacatcatcaagacttgactcttttaaaagctttagttcgacaacaacttccagaaaagtataaagaaatcttttttgatcaatcaaaaaacggatatgcaggttatattgatgggggagctagccaagaagaattttataaatttatcaaaccaattttagaaaaaatggatggtactgaggaattattggtgaaactaaatcgtgaagatttgctgcgcaagcaacggacctttgacaacggctctattccccatcaaattcacttgggtgagctgcatgctattttgagaagacaagaagacttttatccatttttaaaagacaatcgtgagaagattgaaaaaatcttgacttttcgaattccttattatgttggtccattggcgcgtggcaatagtcgttttgcatggatgactcggaagtctgaagaaacaattaccccatggaattttgaagaagttgtcgataaaggtgcttcagctcaatcatttattgaacgcatgacaaactttgataaaaatcttccaaatgaaaaagtactaccaaaacatagtttgctttatgagtattttacggtttataacgaattgacaaaggtcaaatatgttactgaaggaatgcgaaaaccagcatttctttcaggtgaacagaagaaagccattgttgatttactcttcaaaacaaatcgaaaagtaaccgttaagcaattaaaagaagattatttcaaaaaaatagaatgttttgatagtgttgaaatttcaggagttgaagatagatttaatgcttcattaggtacctaccatgatttgctaaaaattattaaagataaagattttttggataatgaagaaaatgaagatatcttagaggatattgttttaacattgaccttatttgaagatagggagatgattgaggaaagacttaaaacatatgctcacctctttgatgataaggtgatgaaacagcttaaacgtcgccgttatactggttggggacgtttgtctcgaaaattgattaatggtattagggataagcaatctggcaaaacaatattagattttttgaaatcagatggttttgccaatcgcaattttatgcagctgatccatgatgatagtttgacatttaaagaagacattcaaaaagcacaagtgtctggacaaggcgatagtttacatgaacatattgcaaatttagctggtagccctgctattaaaaaaggtattttacagactgtaaaagttgttgatgaattggtcaaagtaatggggcggcataagccagaaaatatcgttattgaaatggcacgtgaaaatcagacaactcaaaagggccagaaaaattcgcgagagcgtatgaaacgaatcgaagaaggtatcaaagaattaggaagtcagattcttaaagagcatcctgttgaaaatactcaattgcaaaatgaaaagctctatctctattatctccaaaatggaagagacatgtatgtggaccaagaattagatattaatcgtttaagtgattatgatgtcgatgccattgttccacaaagtttccttaaagacgattcaatagacaataaggtcttaacgcgttctgataaaaatcgtggtaaatcggataacgttccaagtgaagaagtagtcaaaaagatgaaaaactattggagacaacttctaaacgccaagttaatcactcaacgtaagtttgataatttaacgaaagctgaacgtggaggtttgagtgaacttgataaagctggttttatcaaacgccaattggttgaaactcgccaaatcactaagcatgtggcacaaattttggatagtcgcatgaatactaaatacgatgaaaatgataaacttattcgagaggttaaagtgattaccttaaaatctaaattagtttctgacttccgaaaagatttccaattctataaagtacgtgagattaacaattaccatcatgcccatgatgcgtatctaaatgccgtcgttggaactgctttgattaagaaatatccaaaacttgaatcggagtttgtctatggtgattataaagtttatgatgttcgtaaaatgattgctaagtctgagcaagaaataggcaaagcaaccgcaaaatatttcttttactctaatatcatgaacttcttcaaaacagaaattacacttgcaaatggagagattcgcaaacgccctctaatcgaaactaatggggaaactggagaaattgtctgggataaagggcgagattttgccacagtgcgcaaagtattgtccatgccccaagtcaatattgtcaagaaaacagaagtacagacaggcggattctccaaggagtcaattttaccaaaaagaaattcggacaagcttattgctcgtaaaaaagactgggatccaaaaaaatatggtggttttgatagtccaacggtagcttattcagtcctagtggttgctaaggtggaaaaagggaaatcgaagaagttaaaatccgttaaagagttactagggatcacaattatggaaagaagttcctttgaaaaaaatccgattgactttttagaagctaaaggatataaggaagttaaaaaagacttaatcattaaactacctaaatatagtctttttgagttagaaaacggtcgtaaacggatgctggctagtgccggagaattacaaaaaggaaatgagctggctctgccaagcaaatatgtgaattttttatatttagctagtcattatgaaaagttgaagggtagtccagaagataacgaacaaaaacaattgtttgtggagcagcataagcattatttagatgagattattgagcaaatcagtgaattttctaagcgtgttattttagcagatgccaatttagataaagttcttagtgcatataacaaacatagagacaaaccaatacgtgaacaagcagaaaatattattcatttatttacgttgacgaatcttggagctcccgctgcttttaaatattttgatacaacaattgatcgtaaacgatatacgtctacaaaagaagttttagatgccactcttatccatcaatccatcactggtctttatgaaacacgcattgatttgagtcagctaggaggtgactccggtagcgaaacgccggggacttctgaatctgctactccggaaagcggaggctctggctcgtcaggaggttcaggaagttcaggcggtatgtttttgcaaagacctaaaccttacagcgatgaaagtttagaaagtttctttatccgagtggctaacaaaaatggctacggtgatgtccatcgcttcctagaagccactaaacgattccttcaagacattgaccataatggctatcaaacctttccgactgatataactcggataaacccatactcagctaaaaacagttccagcgcacgaactgcgtcattcctgaaacttgcacaattgacatttaatgaaccgccagagctacttgggttggcaattaacagaacaaacatgaaatactcgccgtcaactagcgcggttgttagaggtgcagaagtctttcctcgcagtttactacggacgcactccatcccctgctgtcctttgtgtctgcgagaaaatggctacgcctcctacctttggcactttcaggggtacgaatactgccacagccataacgtacctttaattaccacttgtagctgtggtaaggagtttgactaccgagtatctgggttaaagggcatttgctgcaaatgcaaggagcctatcaccttaaccagcagggagaacggtcatgaggcagcgtgtactgtttcaaactggcttgctggccatgaatctaaacctctgccaaatcttcctaaaagctaccgatggggtttagttcattggtggatgggtattaaagatagcgagttcgatcacttttcgttcgttcaatttttctcaaactggccaaggtcattccactcgataatcgaagatgaagtagagttcaaccttgagcatgctgttgtcagcacgtctgaattacgactaaaagatcttcttggtcgattgtttttcggttcaattcggttacctgagcggaatcttcaacacaatatcatccttggtgagcttctctgctatttagaaaatcgtttatggcaagacaagggattaatcgccaacctcaaaatgaacgcgttagaggcgactgtaatgttaaattgtagcctcgatcagattgcatcaatggttgaacaacgcatcttgaagccaaatcgaaaaagcaagcccaacagccctcttgatgttaccgattatctatttcatttcggcgatattttctgtctttggttagctgagttccaaagcgatgagtttaaccgttcgttttatgtgtcgaggtggtaatagcctaggctgctgccaccgctgagcaataactagcataaccccttggggcctctaaacgggtcttgaggggttttttgctgaaacctcaggcatttgagaagcacacggtcacactgcttccggtagtcaataaaccggtaaaccagcaatagacataagcggctatttaacgaccctgccctgaaccgacgaccgggtcatcgtggccggatcttgcggcccctcggcttgaacgaattgttagacattatttgccgactaccttggtgatctcgcctttcacgtagtggacaaattcttccaactgatctgcgcgcgaggccaagcgatcttcttcttgtccaagataagcctgtctagcttcaagtatgacgggctgatactgggccggcaggcgctccattgcccagtcggcagcgacatccttcggcgcgattttgccggttactgcgctgtaccaaatgcgggacaacgtaagcactacatttcgctcatcgccagcccagtcgggcggcgagttccatagcgttaaggtttcatttagcgcctcaaatagatcctgttcaggaaccggatcaaagagttcctccgccgctggacctaccaaggcaacgctatgttctcttgcttttgtcagcaagatagccagatcaatgtcgatcgtggctggctcgaagatacctgcaagaatgtcattgcgctgccattctccaaattgcagttcgcgcttagctggataacgccacggaatgatgtcgtcgtgcacaacaatggtgacttctacagcgcggagaatctcgctctctccaggggaagccgaagtttccaaaaggtcgttgatcaaagctcgccgcgttgtttcatcaagccttacggtcaccgtaaccagcaaatcaatatcactgtgtggcttcaggccgccatccactgcggagccgtacaaatgtacggccagcaacgtcggttcgagatggcgctcgatgacgccaactacctctgatagttgagtcgatacttcggcgatcaccgcttccctcatactcttcctttttcaatattattgaagcatttatcagggttattgtctcatgagcggatacatatttgaatgtatttagaaaaataaacaaatagctagctcactcggtcgctacgctccgggcgtgagactgcggcgggcgctgcggacacatacaaagttacccacagattccgtggataagcaggggactaacatgtgaggcaaaacagcagggccgcgccggtggcgtttttccataggctccgccctcctgccagagttcacataaacagacgcttttccggtgcatctgtgggagccgtgaggctcaaccatgaatctgacagtacgggcgaaacccgacaggacttaaagatccccaccgtttccggcgggtcgctccctcttgcgctctcctgttccgaccctgccgtttaccggatacctgttccgcctttctcccttacgggaagtgtggcgctttctcatagctcacacactggtatctcggctcggtgtaggtcgttcgctccaagctgggctgtaagcaagaactccccgttcagcccgactgctgcgccttatccggtaactgttcacttgagtccaacccggaaaagcacggtaaaacgccactggcagcagccattggtaactgggagttcgcagaggatttgtttagctaaacacgcggttgctcttgaagtgtgcgccaaagtccggctacactggaaggacagatttggttgctgtgctctgcgaaagccagttaccacggttaagcagttccccaactgacttaaccttcgatcaaaccacctccccaggtggttttttcgtttacagggcaaaagattacgcgcagaaaaaaaggatctcaagaagatcctttgatcttttctactgaaccgctctagatttcagtgcaatttatctcttcaaatgtagcacctgaagtcagccccatacgatataagttgtaattctcatgttagtcatgccccgcgcccaccggaaggagctgactgggttgaaggctctcaagggcatcggtcgagatcccggtgcctaatgagtgagctaacttacattaattgcgttgcgctcactgcccgctttccagtcgggaaacctgtcgtgccagctgcattaatgaatcggccaacgcgcggggagaggcggtttgcgtattgggcgccagggtggtttttcttttcaccagtgagacgggcaacagctgattgcccttcaccgcctggccctgagagagttgcagcaagcggtccacgctggtttgccccagcaggcgaaaatcctgtttgatggtggttaacggcgggatataacatgagctgtcttcggtatcgtcgtatcccactaccgagatgtccgcaccaacgcgcagcccggactcggtaatggcgcgcattgcgcccagcgccatctgatcgttggcaaccagcatcgcagtgggaacgatgccctcattcagcatttgcatggtttgttgaaaaccggacatggcactccagtcgccttcccgttccgctatcggctgaatttgattgcgagtgagatatttatgccagccagccagacgcagacgcgccgagacagaacttaatgggcccgctaacagcgcgatttgctggtgacccaatgcgaccagatgctccacgcccagtcgcgtaccgtcttcatgggagaaaataatactgttgatgggtgtctggtcagagacatcaagaaataacgccggaacattagtgcaggcagcttccacagcaatggcatcctggtcatccagcggatagttaatgatcagcccactgacgcgttgcgcgagaagattgtgcaccgccgctttacaggcttcgacgccgcttcgttctaccatcgacaccaccacgctggcacccagttgatcggcgcgagatttaatcgccgcgacaatttgcgacggcgcgtgcagggccagactggaggtggcaacgccaatcagcaacgactgtttgcccgccagttgttgtgccacgcggttgggaatgtaattcagctccgccatcgccgcttccactt

SEQ ID NO: 43 - DNA, 9229 bp, Synthetic construct
  source 1..9229: mol_type = other DNA
attcagctccgccatcgccgcttccactttttcccgcgttttcgcagaaacgtggctggcctggttcaccacgcgggaaacggtctgataagagacaccggcatactctgcgacatcgtataacgttactggtttcacattcaccaccctgaattgactctcttccgggcgctatcatgccataccgcgaaaggttttgcgccattcgatggtgtccgggatctcgacgctctcccttatgcgactcctgcattaggaaattaatacgactcactataggggaattgtgagcggataacaattcccctgtagaaataattttgtttaactttaataaggagatataccatgggttcactgccgtataggcagctaagaaaagtacagcgcggctgaaatcatcattaaagcggttcactgccgtataggcagctaagaaaggatccgaattcgagctcggcgcgcctgcaggtcgacaagcttgcggccgcataatgcttaagtcgaacagaaagtaatcgtattgtacacggccgcataatcgaaattaatacgactcactataggggaattgtgagcggataacaattccccatcttagtatattagttaagtataagaaggagatatacatatgtttttgcaaagacctaaaccttacagcgatgaaagtttagaaagtttctttatccgagtggctaacaaaaatggctacggtgatgtccatcgcttcctagaagccactaaacgattccttcaagacattgaccataatggctatcaaacctttccgactgatataactcggataaacccatactcagctaaaaacagttccagcgcacgaactgcgtcattcctgaaacttgcacaattgacatttaatgaaccgccagagctacttgggttggcaattaacagaacaaacatgaaatactcgccgtcaactagcgcggttgttagaggtgcagaagtctttcctcgcagtttactacggacgcactccatcccctgctgtcctttgtgtctgcgagaaaatggctacgcctcctacctttggcactttcaggggtacgaatactgccacagccataacgtacctttaattaccacttgtagctgtggtaaggagtttgactaccgagtatctgggttaaagggcatttgctgcaaatgcaaggagcctatcaccttaaccagcagggagaacggtcatgaggcagcgtgtactgtttcaaactggcttgctggccatgaatctaaacctctgccaaatcttcctaaaagctaccgatggggtttagttcattggtggatgggtattaaagatagcgagttcgatcacttttcgttcgttcaatttttctcaaactggccaaggtcattccactcgataatcgaagatgaagtagagttcaaccttgagcatgctgttgtcagcacgtctgaattacgactaaaagatcttcttggtcgattgtttttcggttcaattcggttacctgagcggaatcttcaacacaatatcatccttggtgagcttctctgctatttagaaaatcgtttatggcaagacaagggattaatcgccaacctcaaaatgaacgcgttagaggcgactgtaatgttaaattgtagcctcgatcagattgcatcaatggttgaacaacgcatcttgaagccaaatcgaaaaagcaagcccaacagccctcttgatgttaccgattatctatttcatttcggcgatattttctgtctttggttagctgagttccaaagcgatgagtttaaccgttcgttttatgtgtcgaggtggtccggtagcgaaacgccggggacttctgaatctgctactccggaaagcggaggctctggctcgtcaggaggttcaggaagttcaggcggtatgacctctcccctcccaacgcctacgtggcaggagcttcgccagttcatcgaatccttcatccaggagcgcctccagggcaagctggacaaactccaacccgacgaagacgacaagcgccagacattgctggccacccaccggcgggaggcctggctggccgatgccgcccggcgggttggccagttgcagttggtgacccacacgctcaagccgatccatcccgacgcccgcggcagcaacctgcacagcctgccgcaagcacccggccaaccgggcctcgccggttcccatgagctaggtgacaggctggtcagcgatgtggtgggcaatgccgcggcgctggacgtattcaagtttctcagtctccagtatcagggtaaaaatcttctgaactggctgacagaagacagtgccgaggcattacaggcgctgtccgataacgccgaacaggctcgcgaatggcggcaagcgttcatcggcatcacgaccgtcaaaggcgctcccgcgtcccacagcctggccaagcagttgtactttcccctgcccggttccggctaccacctgctagcaccgctgtttcccaccagtctggtgcatcacgtccacgctctgctccgcgaagcgcgcttcggcgacgcggccaaggcggcacgcgaagcgcgcagccgccaggagtcatggccccacggattcagcgagtaccccaacctggcgatccagaagttcggcggtaccaagccgcagaacatcagtcagttgaacaacgagcgccgtggcgagaactggttgctgccatcgcttccgccgaactggcaaaggcagaatgtaaacgcgccgatgcggcactcttcggtcttcgagcatgacttcggaagaactcctgaagtatcccgcctaacccgtaccctgcagcgttttcttgccaagacagtccataacaacctcgccatccgccagcggcgtgcccaattggtggcgcaaatctgcgacgaagccctgcaatacgccgcccgtctgcgcgaactggagcccggctggagcgcaacccccgggtgccaactgcatgacgcggagcagctctggctcgatccgttgcgcgcacagaccgatgagacgttcttgcagcgccgactacgaggtgactggcctgccgaggtcggaaatcgcttcgccaactggctgaaccgggcggtcagcagcgacagtcagatactgggtagcccggaagccgcccaatggagccaggagctgagcaaggaactgacgatgttcaaggagatactcgaagatgagcgtgactgataataacattggaagtggataacggatccgggccctgtacaagatcctgtaaaacgacggccagtgaattcactcgagttctagaaataattttgtttaactttaagaaggagatatagatcatgagcgtgactgatcccgaggcgctgctgttgctgccacgcctgtccatccagaacgccaacgccatttccagccccttgacctggggtttcccttcgcccggcgctttcaccggattcgtccatgccttgcagcgtcgagtcggaatctccctcgatatcgaactggacggtgtcggcatcgtctgtcaccgcttcgaagcgcagatatcgcaaccggccggcaagcgcaccaaggtcttcaacctgacccgcaatccgctgaaccgcgacggctccaccgcagccatcgtcgaagaaggtcgcgcccatctggaggtcagtctgctgctcggagtgcatggcgatggtctggacgatcaccccgcacaggaaatcgccaggcaggtacaggagcaggctggcgccatgcgcctcgccggtggcagcatcctgccctggtgcaatgagcgcttcccggctccgaacgccgaactgctgatgctgggtggcagcgacgaacagcggcgcaagaaccagcgccggcttacccgccgcctgctccccggcttcgccctggtgagtcgcgaggcgttgttgcaacaacatctggaaaccttgcgcaccacgctccccgaagccaccacgctcgatgcactgctcgatctttgtcgaatcaacttcgagcctcctgcaacctcgtccgaagaagaagcatcgccgcccgatgcagcctggcaagtgcgcgacaagcccggctggctggtgccgatcccggctggctacaacgccctgtcacccctgtacctccccggcgaagtgcgaaatgcccgtgatagagaaacaccgctgcgcttcgtcgaaaacctcttcggtctgggcgaatggctcagcccccatcgcgtcgccgcgttatcggacctgctttggtatcaccacgccgagcctgacaaagggctctaccgctggagcacaccccgtttcgtcgaacacgccatcgcataataataagatcccaactccataaggatccgcgatcgcagcggataacaatttcacatcctgcaggactcgagttctagaaataattttgtttaactttaagaaggagatatagatcatgtccaagccaatactgagcaccgcttccgtcctcgccttcgaacgtaagctcgacccttccgacgcccttatgagcgctggcgcctgggcgcaacgcgacgcctcgcaggaatggccggccgtgaccgtgcgcgagaagtccgtacgcggcaccatctccaaccgcctcaagaccaaggaccgtgacccggccaagctggacgcctcgatccagtcgcccaacctgcagacggtggacgtggccaacctgccgagcgacgccgacaccctcaaggtccgcttcaccctccgtgtgctcggcggcgccggaacaccgtctgcctgcaacgacgcggcctaccgtgacaagctgctgcaaacggtcgccacctacgtgaacgatcagggcttcgccgagctggctcgtcgttatgcgcacaacctggccaacgcccgcttcctgtggcgcaaccgggtgggcgcggaagcggtggaagtccgtatcaaccatatccgccagggcgaggtggctcgcgcctggcgcttcgacgccctggccatcggcttgcgcgacttcaaggccgacgccgaactggacgcgctcgccgaactgatcgccagcggcctctcaggcagtgggcatgtcctgctcgaagtggtcgccttcgcccgtatcggcgacggccaggaagtcttcccctcccaggaactgatcctcgacaaaggcgacaagaaaggccagaagagcaagaccctgtacagcgtacgcgatgccgcggccatccactcgcagaagatcggcaatgccctgcgcaccatcgatacgtggtatcccgacgaagatggcctcggccccatcgccgtggagccctacggctccgtcacatcccagggcaaagcctatcgccagcccaagcagaagctggacttctatacgctgctcgacaactgggtactgcgcgacgaggcgcccgccgtggagcaacagcattatgtgatcgccaacctgatccgtggcggcgtgttcggtgaagccgaagagaagtaataataagatcccaactccataaggatccgcgatcgcggcgcgcccgccagggttttcccagtcgcggccgccctgcaggactcgagttctagaaataattttgtttaactttaagaaggagatatagatcatggaccactacctcgacattcgcttgcgaccggacccggaatttcccccggcgcaactcatgagcgtgctcttcggcaagctccaccaggccctggtggcacagggcggggacaggatcggcgtgagcttccccgacctcgacgaaagccgctcccggctgggcgagcgcctgcgcattcatgcctcggcggacgaccttcgtgccctgctcgcccggccctggctggaagggttgcgggaccatctgcaattcggagaaccggcagtcgtgcctcaccccacaccgtaccgtcaggtcagtcgggttcaggcgaaaagcaatccggaacgcctgcggcggcggctcatgcgccggcacgatctgagtgaggaggaggctcggaaacgcattcccgatacggtcgcgagagccttggacctgcccttcgtcacgctacgcagccagagcaccggacagcacttccgtctcttcatccgccacgggccgttgcaggtgacggcagaggaaggaggattcacctgttacgggttgagcaaaggaggtttcgttccctggttctgataacctaggctgctgccaccgctgagcaataactagcataaccccttggggcctctaaacgggtcttgaggggttttttgctgaaacctcaggcatttgagaagcacacggtcacactgcttccggtagtcaataaaccggtaaaccagcaatagacataagcggctatttaacgaccctgccctgaaccgacgaccgggtcatcgtggccggatcttgcggcccctcggcttgaacgaattgttagacattatttgccgactaccttggtgatctcgcctttcacgtagtggacaaattcttccaactgatctgcgcgcgaggccaagcgatcttcttcttgtccaagataagcctgtctagcttcaagtatgacgggctgatactgggccggcaggcgctccattgcccagtcggcagcgacatccttcggcgcgattttgccggttactgcgctgtaccaaatgcgggacaacgtaagcactacatttcgctcatcgccagcccagtcgggcggcgagttccatagcgttaaggtttcatttagcgcctcaaatagatcctgttcaggaaccggatcaaagagttcctccgccgctggacctaccaaggcaacgctatgttctcttgcttttgtcagcaagatagccagatcaatgtcgatcgtggctggctcgaagatacctgcaagaatgtcattgcgctgccattctccaaattgcagttcgcgcttagctggataacgccacggaatgatgtcgtcgtgcacaacaatggtgacttctacagcgcggagaatctcgctctctccaggggaagccgaagtttccaaaaggtcgttgatcaaagctcgccgcgttgtttcatcaagccttacggtcaccgtaaccagcaaatcaatatcactgtgtggcttcaggccgccatccactgcggagccgtacaaatgtacggccagcaacgtcggttcgagatggcgctcgatgacgccaactacctctgatagttgagtcgatacttcggcgatcaccgcttccctcatactcttcctttttcaatattattgaagcatttatcagggttattgtctcatgagcggatacatatttgaatgtatttagaaaaataaacaaatagctagctcactcggtcgctacgctccgggcgtgagactgcggcgggcgctgcggacacatacaaagttacccacagattccgtggataagcaggggactaacatgtgaggcaaaacagcagggccgcgccggtggcgtttttccataggctccgccctcctgccagagttcacataaacagacgcttttccggtgcatctgtgggagccgtgaggctcaaccatgaatctgacagtacgggcgaaacccgacaggacttaaagatccccaccgtttccggcgggtcgctccctcttgcgctctcctgttccgaccctgccgtttaccggatacctgttccgcctttctcccttacgggaagtgtggcgctttctcatagctcacacactggtatctcggctcggtgtaggtcgttcgctccaagctgggctgtaagcaagaactccccgttcagcccgactgctgcgccttatccggtaactgttcacttgagtccaacccggaaaagcacggtaaaacgccactggcagcagccattggtaactgggagttcgcagaggatttgtttagctaaacacgcggttgctcttgaagtgtgcgccaaagtccggctacactggaaggacagatttggttgctgtgctctgcgaaagccagttaccacggttaagcagttccccaactgacttaaccttcgatcaaaccacctccccaggtggttttttcgtttacagggcaaaagattacgcgcagaaaaaaaggatctcaagaagatcctttgatcttttctactgaaccgctctagatttcagtgcaatttatctcttcaaatgtagcacctgaagtcagccccatacgatataagttgtaattctcatgttagtcatgccccgcgcccaccggaaggagctgactgggttgaaggctctcaagggcatcggtcgagatcccggtgcctaatgagtgagctaacttacattaattgcgttgcgctcactgcccgctttccagtcgggaaacctgtcgtgccagctgcattaatgaatcggccaacgcgcggggagaggcggtttgcgtattgggcgccagggtggtttttcttttcaccagtgagacgggcaacagctgattgcccttcaccgcctggccctgagagagttgcagcaagcggtccacgctggtttgccccagcaggcgaaaatcctgtttgatggtggttaacggcgggatataacatgagctgtcttcggtatcgtcgtatcccactaccgagatgtccgcaccaacgcgcagcccggactcggtaatggcgcgcattgcgcccagcgccatctgatcgttggcaaccagcatcgcagtgggaacgatgccctcattcagcatttgcatggtttgttgaaaaccggacatggcactccagtcgccttcccgttccgctatcggctgaatttgattgcgagtgagatatttatgccagccagccagacgcagacgcgccgagacagaacttaatgggcccgctaacagcgcgatttgctggtgacccaatgcgaccagatgctccacgcccagtcgcgtaccgtcttcatgggagaaaataatactgttgatgggtgtctggtcagagacatcaagaaataacgccggaacattagtgcaggcagcttccacagcaatggcatcctggtcatccagcggatagttaatgatcagcccactgacgcgttgcgcgagaagattgtgcaccgccgctttacaggcttcgacgccgcttcgttctaccatcgacaccaccacgctggcacccagttgatcggcgcgagatttaatcgccgcgacaatttgcgacggcgcgtgcagggccagactggaggtggcaacgccaatcagcaacgactgtttgcccgccagttgttgtgccacgcggttgggaatgta

SEQ ID NO: 44 - DNA, 9229 bp, Synthetic construct
  source 1..9229: mol_type = other DNA
acaccggcatactctgcgacatcgtataacgttactggtttcacattcaccaccctgaattgactctcttccgggcgctatcatgccataccgcgaaaggttttgcgccattcgatggtgtccgggatctcgacgctctcccttatgcgactcctgcattaggaaattaatacgactcactataggggaattgtgagcggataacaattcccctgtagaaataattttgtttaactttaataaggagatataccatgggttcactgccgtataggcagctaagaaaagtacagcgcggctgaaatcatcattaaagcggttcactgccgtataggcagctaagaaaggatccgaattcgagctcggcgcgcctgcaggtcgacaagcttgcggccgcataatgcttaagtcgaacagaaagtaatcgtattgtacacggccgcataatcgaaattaatacgactcactataggggaattgtgagcggataacaattccccatcttagtatattagttaagtataagaaggagatatacatatgacctctcccctcccaacgcctacgtggcaggagcttcgccagttcatcgaatccttcatccaggagcgcctccagggcaagctggacaaactccaacccgacgaagacgacaagcgccagacattgctggccacccaccggcgggaggcctggctggccgatgccgcccggcgggttggccagttgcagttggtgacccacacgctcaagccgatccatcccgacgcccgcggcagcaacctgcacagcctgccgcaagcacccggccaaccgggcctcgccggttcccatgagctaggtgacaggctggtcagcgatgtggtgggcaatgccgcggcgctggacgtattcaagtttctcagtctccagtatcagggtaaaaatcttctgaactggctgacagaagacagtgccgaggcattacaggcgctgtccgataacgccgaacaggctcgcgaatggcggcaagcgttcatcggcatcacgaccgtcaaaggcgctcccgcgtcccacagcctggccaagcagttgtactttcccctgcccggttccggctaccacctgctagcaccgctgtttcccaccagtctggtgcatcacgtccacgctctgctccgcgaagcgcgcttcggcgacgcggccaaggcggcacgcgaagcgcgcagccgccaggagtcatggccccacggattcagcgagtaccccaacctggcgatccagaagttcggcggtaccaagccgcagaacatcagtcagttgaacaacgagcgccgtggcgagaactggttgctgccatcgcttccgccgaactggcaaaggcagaatgtaaacgcgccgatgcggcactcttcggtcttcgagcatgacttcggaagaactcctgaagtatcccgcctaacccgtaccctgcagcgttttcttgccaagacagtccataacaacctcgccatccgccagcggcgtgcccaattggtggcgcaaatctgcgacgaagccctgcaatacgccgcccgtctgcgcgaactggagcccggctggagcgcaacccccgggtgccaactgcatgacgcggagcagctctggctcgatccgttgcgcgcacagaccgatgagacgttcttgcagcgccgactacgaggtgactggcctgccgaggtcggaaatcgcttcgccaactggctgaaccgggcggtcagcagcgacagtcagatactgggtagcccggaagccgcccaatggagccaggagctgagcaaggaactgacgatgttcaaggagatactcgaagatgagcgtgactgataataacattggaagtggataacggatccgggccctgtacaagatcctgtaaaacgacggccagtgaattcactcgagttctagaaataattttgtttaactttaagaaggagatatagatcatgagcgtgactgatcccgaggcgctgctgttgctgccacgcctgtccatccagaacgccaacgccatttccagccccttgacctggggtttcccttcgcccggcgctttcaccggattcgtccatgccttgcagcgtcgagtcggaatctccctcgatatcgaactggacggtgtcggcatcgtctgtcaccgcttcgaagcgcagatatcgcaaccggccggcaagcgcaccaaggtcttcaacctgacccgcaatccgctgaaccgcgacggctccaccgcagccatcgtcgaagaaggtcgcgcccatctggaggtcagtctgctgctcggagtgcatggcgatggtctggacgatcaccccgcacaggaaatcgccaggcaggtacaggagcaggctggcgccatgcgcctcgccggtggcagcatcctgccctggtgcaatgagcgcttcccggctccgaacgccgaactgctgatgctgggtggcagcgacgaacagcggcgcaagaaccagcgccggcttacccgccgcctgctccccggcttcgccctggtgagtcgcgaggcgttgttgcaacaacatctggaaaccttgcgcaccacgctccccgaagccaccacgctcgatgcactgctcgatctttgtcgaatcaacttcgagcctcctgcaacctcgtccgaagaagaagcatcgccgcccgatgcagcctggcaagtgcgcgacaagcccggctggctggtgccgatcccggctggctacaacgccctgtcacccctgtacctccccggcgaagtgcgaaatgcccgtgatagagaaacaccgctgcgcttcgtcgaaaacctcttcggtctgggcgaatggctcagcccccatcgcgtcgccgcgttatcggacctgctttggtatcaccacgccgagcctgacaaagggctctaccgctggagcacaccccgtttcgtcgaacacgccatcgcataataataagatcccaactccataaggatccgcgatcgcagcggataacaatttcacatcctgcaggactcgagttctagaaataattttgtttaactttaagaaggagatatagatcatgtccaagccaatactgagcaccgcttccgtcctcgccttcgaacgtaagctcgacccttccgacgcccttatgagcgctggcgcctgggcgcaacgcgacgcctcgcaggaatggccggccgtgaccgtgcgcgagaagtccgtacgcggcaccatctccaaccgcctcaagaccaaggaccgtgacccggccaagctggacgcctcgatccagtcgcccaacctgcagacggtggacgtggccaacctgccgagcgacgccgacaccctcaaggtccgcttcaccctccgtgtgctcggcggcgccggaacaccgtctgcctgcaacgacgcggcctaccgtgacaagctgctgcaaacggtcgccacctacgtgaacgatcagggcttcgccgagctggctcgtcgttatgcgcacaacctggccaacgcccgcttcctgtggcgcaaccgggtgggcgcggaagcggtggaagtccgtatcaaccatatccgccagggcgaggtggctcgcgcctggcgcttcgacgccctggccatcggcttgcgcgacttcaaggccgacgccgaactggacgcgctcgccgaactgatcgccagcggcctctcaggcagtgggcatgtcctgctcgaagtggtcgccttcgcccgtatcggcgacggccaggaagtcttcccctcccaggaactgatcctcgacaaaggcgacaagaaaggccagaagagcaagaccctgtacagcgtacgcgatgccgcggccatccactcgcagaagatcggcaatgccctgcgcaccatcgatacgtggtatcccgacgaagatggcctcggccccatcgccgtggagccctacggctccgtcacatcccagggcaaagcctatcgccagcccaagcagaagctggacttctatacgctgctcgacaactgggtactgcgcgacgaggcgcccgccgtggagcaacagcattatgtgatcgccaacctgatccgtggcggcgtgttcggtgaagccgaagagaagtaataataagatcccaactccataaggatccgcgatcgcggcgcgcccgccagggttttcccagtcgcggccgccctgcaggactcgagttctagaaataattttgtttaactttaagaaggagatatagatcatggaccactacctcgacattcgcttgcgaccggacccggaatttcccccggcgcaactcatgagcgtgctcttcggcaagctccaccaggccctggtggcacagggcggggacaggatcggcgtgagcttccccgacctcgacgaaagccgctcccggctgggcgagcgcctgcgcattcatgcctcggcggacgaccttcgtgccctgctcgcccggccctggctggaagggttgcgggaccatctgcaattcggagaaccggcagtcgtgcctcaccccacaccgtaccgtcaggtcagtcgggttcaggcgaaaagcaatccggaacgcctgcggcggcggctcatgcgccggcacgatctgagtgaggaggaggctcggaaacgcattcccgatacggtcgcgagagccttggacctgcccttcgtcacgctacgcagccagagcaccggacagcacttccgtctcttcatccgccacgggccgttgcaggtgacggcagaggaaggaggattcacctgttacgggttgagcaaaggaggtttcgttccctggttctccggtagcgaaacgccggggacttctgaatctgctactccggaaagcggaggctctggctcgtcaggaggttcaggaagttcaggcggtatgtttttgcaaagacctaaaccttacagcgatgaaagtttagaaagtttctttatccgagtggctaacaaaaatggctacggtgatgtccatcgcttcctagaagccactaaacgattccttcaagacattgaccataatggctatcaaacctttccgactgatataactcggataaacccatactcagctaaaaacagttccagcgcacgaactgcgtcattcctgaaacttgcacaattgacatttaatgaaccgccagagctacttgggttggcaattaacagaacaaacatgaaatactcgccgtcaactagcgcggttgttagaggtgcagaagtctttcctcgcagtttactacggacgcactccatcccctgctgtcctttgtgtctgcgagaaaatggctacgcctcctacctttggcactttcaggggtacgaatactgccacagccataacgtacctttaattaccacttgtagctgtggtaaggagtttgactaccgagtatctgggttaaagggcatttgctgcaaatgcaaggagcctatcaccttaaccagcagggagaacggtcatgaggcagcgtgtactgtttcaaactggcttgctggccatgaatctaaacctctgccaaatcttcctaaaagctaccgatggggtttagttcattggtggatgggtattaaagatagcgagttcgatcacttttcgttcgttcaatttttctcaaactggccaaggtcattccactcgataatcgaagatgaagtagagttcaaccttgagcatgctgttgtcagcacgtctgaattacgactaaaagatcttcttggtcgattgtttttcggttcaattcggttacctgagcggaatcttcaacacaatatcatccttggtgagcttctctgctatttagaaaatcgtttatggcaagacaagggattaatcgccaacctcaaaatgaacgcgttagaggcgactgtaatgttaaattgtagcctcgatcagattgcatcaatggttgaacaacgcatcttgaagccaaatcgaaaaagcaagcccaacagccctcttgatgttaccgattatctatttcatttcggcgatattttctgtctttggttagctgagttccaaagcgatgagtttaaccgttcgttttatgtgtcgaggtggtgataacctaggctgctgccaccgctgagcaataactagcataaccccttggggcctctaaacgggtcttgaggggttttttgctgaaacctcaggcatttgagaagcacacggtcacactgcttccggtagtcaataaaccggtaaaccagcaatagacataagcggctatttaacgaccctgccctgaaccgacgaccgggtcatcgtggccggatcttgcggcccctcggcttgaacgaattgttagacattatttgccgactaccttggtgatctcgcctttcacgtagtggacaaattcttccaactgatctgcgcgcgaggccaagcgatcttcttcttgtccaagataagcctgtctagcttcaagtatgacgggctgatactgggccggcaggcgctccattgcccagtcggcagcgacatccttcggcgcgattttgccggttactgcgctgtaccaaatgcgggacaacgtaagcactacatttcgctcatcgccagcccagtcgggcggcgagttccatagcgttaaggtttcatttagcgcctcaaatagatcctgttcaggaaccggatcaaagagttcctccgccgctggacctaccaaggcaacgctatgttctcttgcttttgtcagcaagatagccagatcaatgtcgatcgtggctggctcgaagatacctgcaagaatgtcattgcgctgccattctccaaattgcagttcgcgcttagctggataacgccacggaatgatgtcgtcgtgcacaacaatggtgacttctacagcgcggagaatctcgctctctccaggggaagccgaagtttccaaaaggtcgttgatcaaagctcgccgcgttgtttcatcaagccttacggtcaccgtaaccagcaaatcaatatcactgtgtggcttcaggccgccatccactgcggagccgtacaaatgtacggccagcaacgtcggttcgagatggcgctcgatgacgccaactacctctgatagttgagtcgatacttcggcgatcaccgcttccctcatactcttcctttttcaatattattgaagcatttatcagggttattgtctcatgagcggatacatatttgaatgtatttagaaaaataaacaaatagctagctcactcggtcgctacgctccgggcgtgagactgcggcgggcgctgcggacacatacaaagttacccacagattccgtggataagcaggggactaacatgtgaggcaaaacagcagggccgcgccggtggcgtttttccataggctccgccctcctgccagagttcacataaacagacgcttttccggtgcatctgtgggagccgtgaggctcaaccatgaatctgacagtacgggcgaaacccgacaggacttaaagatccccaccgtttccggcgggtcgctccctcttgcgctctcctgttccgaccctgccgtttaccggatacctgttccgcctttctcccttacgggaagtgtggcgctttctcatagctcacacactggtatctcggctcggtgtaggtcgttcgctccaagctgggctgtaagcaagaactccccgttcagcccgactgctgcgccttatccggtaactgttcacttgagtccaacccggaaaagcacggtaaaacgccactggcagcagccattggtaactgggagttcgcagaggatttgtttagctaaacacgcggttgctcttgaagtgtgcgccaaagtccggctacactggaaggacagatttggttgctgtgctctgcgaaagccagttaccacggttaagcagttccccaactgacttaaccttcgatcaaaccacctccccaggtggttttttcgtttacagggcaaaagattacgcgcagaaaaaaaggatctcaagaagatcctttgatcttttctactgaaccgctctagatttcagtgcaatttatctcttcaaatgtagcacctgaagtcagccccatacgatataagttgtaattctcatgttagtcatgccccgcgcccaccggaaggagctgactgggttgaaggctctcaagggcatcggtcgagatcccggtgcctaatgagtgagctaacttacattaattgcgttgcgctcactgcccgctttccagtcgggaaacctgtcgtgccagctgcattaatgaatcggccaacgcgcggggagaggcggtttgcgtattgggcgccagggtggtttttcttttcaccagtgagacgggcaacagctgattgcccttcaccgcctggccctgagagagttgcagcaagcggtccacgctggtttgccccagcaggcgaaaatcctgtttgatggtggttaacggcgggatataacatgagctgtcttcggtatcgtcgtatcccactaccgagatgtccgcaccaacgcgcagcccggactcggtaatggcgcgcattgcgcccagcgccatctgatcgttggcaaccagcatcgcagtgggaacgatgccctcattcagcatttgcatggtttgttgaaaaccggacatggcactccagtcgccttcccgttccgctatcggctgaatttgattgcgagtgagatatttatgccagccagccagacgcagacgcgccgagacagaacttaatgggcccgctaacagcgcgatttgctggtgacccaatgcgaccagatgctccacgcccagtcgcgtaccgtcttcatgggagaaaataatactgttgatgggtgtctggtcagagacatcaagaaataacgccggaacattagtgcaggcagcttccacagcaatggcatcctggtcatccagcggatagttaatgatcagcccactgacgcgttgcgcgagaagattgtgcaccgccgctttacaggcttcgacgccgcttcgttctaccatcgacaccaccacgctggcacccagttgatcggcgcgagatttaatcgccgcgacaatttgcgacggcgcgtgcagggccagactggaggtggcaacgccaatcagcaacgactgtttgcccgccagttgttgtgccacgcggttgggaatgtaattcagctccgccatcgccgcttccactttttcccgcgttttcgcagaaacgtggctggcctggttcaccacgcgggaaacggtctgataagag

SEQ ID NO: 45 - DNA, 8532 bp, Synthetic construct
  source 1..8532: mol_type = other DNA
attcaccaccctgaattgactctcttccgggcgctatcatgccataccgcgaaaggttttgcgccattcgatggtgtccgggatctcgacgctctcccttatgcgactcctgcattaggaaattaatacgactcactataggggaattgtgagcggataacaattcccctgtagaaataattttgtttaactttaataaggagatataccatgggtgaactgccgagtaggtagctgataacagtacagcgcggctgaaatcatcattaaagcggtgaactgccgagtaggtagctgataacggatccgaattcgagctcggcgcgcctgcaggtcgacaagcttgcggccgcataatgcttaagtcgaacagaaagtaatcgtattgtacacggccgcataatcgaaattaatacgactcactataggggaattgtgagcggataacaattccccatcttagtatattagttaagtataagaaggagatatacatatgtttttgcaaagacctaaaccttacagcgatgaaagtttagaaagtttctttatccgagtggctaacaaaaatggctacggtgatgtccatcgcttcctagaagccactaaacgattccttcaagacattgaccataatggctatcaaacctttccgactgatataactcggataaacccatactcagctaaaaacagttccagcgcacgaactgcgtcattcctgaaacttgcacaattgacatttaatgaaccgccagagctacttgggttggcaattaacagaacaaacatgaaatactcgccgtcaactagcgcggttgttagaggtgcagaagtctttcctcgcagtttactacggacgcactccatcccctgctgtcctttgtgtctgcgagaaaatggctacgcctcctacctttggcactttcaggggtacgaatactgccacagccataacgtacctttaattaccacttgtagctgtggtaaggagtttgactaccgagtatctgggttaaagggcatttgctgcaaatgcaaggagcctatcaccttaaccagcagggagaacggtcatgaggcagcgtgtactgtttcaaactggcttgctggccatgaatctaaacctctgccaaatcttcctaaaagctaccgatggggtttagttcattggtggatgggtattaaagatagcgagttcgatcacttttcgttcgttcaatttttctcaaactggccaaggtcattccactcgataatcgaagatgaagtagagttcaaccttgagcatgctgttgtcagcacgtctgaattacgactaaaagatcttcttggtcgattgtttttcggttcaattcggttacctgagcggaatcttcaacacaatatcatccttggtgagcttctctgctatttagaaaatcgtttatggcaagacaagggattaatcgccaacctcaaaatgaacgcgttagaggcgactgtaatgttaaattgtagcctcgatcagattgcatcaatggttgaacaacgcatcttgaagccaaatcgaaaaagcaagcccaacagccctcttgatgttaccgattatctatttcatttcggcgatattttctgtctttggttagctgagttccaaagcgatgagtttaaccgttcgttttatgtgtcgaggtggtccggtagcgaaacgccggggacttctgaatctgctactccggaaagcggaggctctggctcgtcaggaggttcaggaagttcaggcggtatgcaaactctgaaagaactaatcgcatccaatcctgacgacttaacaactgaacttaagagagcatttcgtccactcacaccgcatattgcaattgatggtaatgaacttgacgcactgacgatattagtcaatttaaccgataagactgatgatcagaaagacctgctcgatcgagccaaatgcaagcaaaaacttcgagatgaaaaatggtgggctagctgcataaattgcgttaattacagacaaagccataacccaaaattcccggatatacgttctgaaggcgtgattcgaacccaagccctgggtgaattaccgagtttcctactctcgtcctcaaaaatcccaccataccattggtcatatagccatgattcaaaatacgtcaacaaaagcgcattcctcaccaatgagttttgttgggatggtgagatctcatgtttgggtgagcttcttaaagatgcagatcacccactttggaatactttgaaaaagttaggttgttctcaaaaaacttgcaaagcaatggcaaaacaactagctgatattactctcacgactatcaatgtcacactcgcaccaaattacctgactcaaatatctctccccgatagtgatacatcctacatttcactctctcctgttgcatcgctatcgatgcaaagccactttcatcagaggctccaagatgaaaatcggcatagcgcgataacgcggtttagccgaactaccaacatgggggtcactgcgatgacatgtggcggcgcatttagaatgttaaagtctggcgctaagttttccagcccccctcatcaccgattaaacagtaaacgaagttggttgacgtcagagcatgttcagtcattaaaacagtaccagcgcctcaacaaaagcctcatacctgaaaactctcggattgcactccgtagaaaatacaaaatcgagcttcaaaatatggtcagatcttggtttgcaatgcaagaccatacccttgattcgaacatacttatccaacatttgaatcatgacctatcttacttaggagccacaaaacgttttgcatacgatccagcgatgaccaagctctttactgagcttttgaaacgagagttatcaaattcaatcaataatggtgagcaacacactaatggatcgtttttagtcctaccgaatatcagggtttgtggcgcaacagctttaagctccccggtaacggtggggattccatcacttacagctttctttggcttcgttcacgcatttgaacggaatataaatcgcaccacctcatcgtttcgtgttgaatcctttgcgatatgcgtccatcaactacatgtcgagaagcgaggtttgacagcagagtttgtggaaaaaggcgacgggactatatccgctcccgcgacccgggatgactggcagtgtgatgtcgtatttagccttattttgaacaccaactttgctcaacatattgaccaagatacgttagttacatcactaccaaagcgattggctcggggttcagcaaaaattgcgattgatgactttaaacatatcaactcattctcgacattagaaacagcgatcgaatctctgccaatagaagctggtaggtggttatcactttacgcacagtcaaacaataatctaagtgatctattagcagccatgacagaggaccatcagctcatggcaagctgcgtcggttaccacttgttagaagagcccaaagataaaccaaactccctcagaggttacaaacacgctatcgccgagtgcatcattggactcattaactcaatcacctttagctcagagactgatcccaacacaatcttttggtcgctaaagaactatcaaaactacctagtggtacagccaaggagtatcaacgatgaaactaccgacaaatctagcctatgagcgctctatcgacccatcagatgtctgtttttttgtcgtctggcccgatgatagaaaaacacctttaacctacaattctcgtactctgctcgggcaaatggaagcggcatcattagcctatgatgtctcaggtcaaccaataaaaagtgccaccgctgaggcgttagctcaagggaaccctcatcaagttgatttctgccacgttccatacggtgcgagtcatattgaatgcagtttctccgtctcgttttcttctgaactacgtcaaccatataagtgtaactcaagcaaagttaaacaaacgctagtgcaattagtcgagctctacgaaacgaaaatcggctggactgagctagcaacccgatatttgatgaacatttgcaacggtaaatggctgtggaaaaatacccgtaaagcctattgctggaacattgtacttacaccttggccttggaacggggaaaaggttggatttgaagatattcgtactaactacacctcacggcaagactttaaaaataataaaaattggtctgctatagttgaaatgatcaaaaccgcattttctagtactgatgggctggcgatatttgaagtcagggccaccttgcacttgccaacgaatgctatggtgcggccaagccaagttttcacagaaaaagaaagtggcagtaaaagtaaatctaaaactcaaaacagtcgagtttttcagagtacaactattgatggtgaacgatcgccaatactaggggcctttaaaacgggagcagctattgcaaccattgacgactggtatcctgaagccactgagccactaagggtcggacggtttggggttcatcgcgaagatgtcacttgctaccgtcatccgtctaccggaaaagattttttctcgatattacaacaagcagagcactatattgaagtgttgagcgccaacaaaactcccgctcaagaaactatcaacgacatgcactttttaatggctaacctgattaagggtgggatgttccagcataaaggagactgactgtgaaatggtattataagacaatcacctttctgccagagttgtgcaacaacgagtcactggctgcaaagtgtctccgcgttctgcatggatttaactatcagtatgagacacgaaatatcggcgtttcatttccgctttggtgtgatgcaacggttggaaaaaagatttcatttgtcagcaagaacaagatagaactcgacttactacttaaacaacactatttcgtccaaatggaacaacttcaatactttcatatatccaacactgttctcgtcccagaagattgtacatacgtttcctttagacgctgtcaatctatagataagctcacagcagcagggctggcaaggaaaatcagacgcctggagaaacgtgctctatctagaggcgagcaatttgacccatcatcttttgctcaaaaagagcatactgcaatagcgcactaccactcacttggggagtccagcaaacagacgaaccgcaactttcgactcaatatcaggatgctctcggagcaaccccgtgaggggaactcgatttttagtagctatggcttatcaaattcagaaaactcgtttcagcctgtacccttaatctgacctaggctgctgccaccgctgagcaataactagcataaccccttggggcctctaaacgggtcttgaggggttttttgctgaaacctcaggcatttgagaagcacacggtcacactgcttccggtagtcaataaaccggtaaaccagcaatagacataagcggctatttaacgaccctgccctgaaccgacgaccgggtcatcgtggccggatcttgcggcccctcggcttgaacgaattgttagacattatttgccgactaccttggtgatctcgcctttcacgtagtggacaaattcttccaactgatctgcgcgcgaggccaagcgatcttcttcttgtccaagataagcctgtctagcttcaagtatgacgggctgatactgggccggcaggcgctccattgcccagtcggcagcgacatccttcggcgcgattttgccggttactgcgctgtaccaaatgcgggacaacgtaagcactacatttcgctcatcgccagcccagtcgggcggcgagttccatagcgttaaggtttcatttagcgcctcaaatagatcctgttcaggaaccggatcaaagagttcctccgccgctggacctaccaaggcaacgctatgttctcttgcttttgtcagcaagatagccagatcaatgtcgatcgtggctggctcgaagatacctgcaagaatgtcattgcgctgccattctccaaattgcagttcgcgcttagctggataacgccacggaatgatgtcgtcgtgcacaacaatggtgacttctacagcgcggagaatctcgctctctccaggggaagccgaagtttccaaaaggtcgttgatcaaagctcgccgcgttgtttcatcaagccttacggtcaccgtaaccagcaaatcaatatcactgtgtggcttcaggccgccatccactgcggagccgtacaaatgtacggccagcaacgtcggttcgagatggcgctcgatgacgccaactacctctgatagttgagtcgatacttcggcgatcaccgcttccctcatactcttcctttttcaatattattgaagcatttatcagggttattgtctcatgagcggatacatatttgaatgtatttagaaaaataaacaaatagctagctcactcggtcgctacgctccgggcgtgagactgcggcgggcgctgcggacacatacaaagttacccacagattccgtggataagcaggggactaacatgtgaggcaaaacagcagggccgcgccggtggcgtttttccataggctccgccctcctgccagagttcacataaacagacgcttttccggtgcatctgtgggagccgtgaggctcaaccatgaatctgacagtacgggcgaaacccgacaggacttaaagatccccaccgtttccggcgggtcgctccctcttgcgctctcctgttccgaccctgccgtttaccggatacctgttccgcctttctcccttacgggaagtgtggcgctttctcatagctcacacactggtatctcggctcggtgtaggtcgttcgctccaagctgggctgtaagcaagaactccccgttcagcccgactgctgcgccttatccggtaactgttcacttgagtccaacccggaaaagcacggtaaaacgccactggcagcagccattggtaactgggagttcgcagaggatttgtttagctaaacacgcggttgctcttgaagtgtgcgccaaagtccggctacactggaaggacagatttggttgctgtgctctgcgaaagccagttaccacggttaagcagttccccaactgacttaaccttcgatcaaaccacctccccaggtggttttttcgtttacagggcaaaagattacgcgcagaaaaaaaggatctcaagaagatcctttgatcttttctactgaaccgctctagatttcagtgcaatttatctcttcaaatgtagcacctgaagtcagccccatacgatataagttgtaattctcatgttagtcatgccccgcgcccaccggaaggagctgactgggttgaaggctctcaagggcatcggtcgagatcccggtgcctaatgagtgagctaacttacattaattgcgttgcgctcactgcccgctttccagtcgggaaacctgtcgtgccagctgcattaatgaatcggccaacgcgcggggagaggcggtttgcgtattgggcgccagggtggtttttcttttcaccagtgagacgggcaacagctgattgcccttcaccgcctggccctgagagagttgcagcaagcggtccacgctggtttgccccagcaggcgaaaatcctgtttgatggtggttaacggcgggatataacatgagctgtcttcggtatcgtcgtatcccactaccgagatgtccgcaccaacgcgcagcccggactcggtaatggcgcgcattgcgcccagcgccatctgatcgttggcaaccagcatcgcagtgggaacgatgccctcattcagcatttgcatggtttgttgaaaaccggacatggcactccagtcgccttcccgttccgctatcggctgaatttgattgcgagtgagatatttatgccagccagccagacgcagacgcgccgagacagaacttaatgggcccgctaacagcgcgatttgctggtgacccaatgcgaccagatgctccacgcccagtcgcgtaccgtcttcatgggagaaaataatactgttgatgggtgtctggtcagagacatcaagaaataacgccggaacattagtgcaggcagcttccacagcaatggcatcctggtcatccagcggatagttaatgatcagcccactgacgcgttgcgcgagaagattgtgcaccgccgctttacaggcttcgacgccgcttcgttctaccatcgacaccaccacgctggcacccagttgatcggcgcgagatttaatcgccgcgacaatttgcgacggcgcgtgcagggccagactggaggtggcaacgccaatcagcaacgactgtttgcccgccagttgttgtgccacgcggttgggaatgtaattcagctccgccatcgccgcttccactttttcccgcgttttcgcagaaacgtggctggcctggttcaccacgcgggaaacggtctgataagagacaccggcatactctgcgacatcgtataacgttactggtttcac

SEQ ID NO: 46 - DNA, 8535 bp, Synthetic construct
  source 1..8535: mol_type = other DNA
attcaccaccctgaattgactctcttccgggcgctatcatgccataccgcgaaaggttttgcgccattcgatggtgtccgggatctcgacgctctcccttatgcgactcctgcattaggaaattaatacgactcactataggggaattgtgagcggataacaattcccctgtagaaataattttgtttaactttaataaggagatataccatgggtgaactgccgagtaggtagctgataacagtacagcgcggctgaaatcatcattaaagcggtgaactgccgagtaggtagctgataacggatccgaattcgagctcggcgcgcctgcaggtcgacaagcttgcggccgcataatgcttaagtcgaacagaaagtaatcgtattgtacacggccgcataatcgaaattaatacgactcactataggggaattgtgagcggataacaattccccatcttagtatattagttaagtataagaaggagatatacatatgcaaactctgaaagaactaatcgcatccaatcctgacgacttaacaactgaacttaagagagcatttcgtccactcacaccgcatattgcaattgatggtaatgaacttgacgcactgacgatattagtcaatttaaccgataagactgatgatcagaaagacctgctcgatcgagccaaatgcaagcaaaaacttcgagatgaaaaatggtgggctagctgcataaattgcgttaattacagacaaagccataacccaaaattcccggatatacgttctgaaggcgtgattcgaacccaagccctgggtgaattaccgagtttcctactctcgtcctcaaaaatcccaccataccattggtcatatagccatgattcaaaatacgtcaacaaaagcgcattcctcaccaatgagttttgttgggatggtgagatctcatgtttgggtgagcttcttaaagatgcagatcacccactttggaatactttgaaaaagttaggttgttctcaaaaaacttgcaaagcaatggcaaaacaactagctgatattactctcacgactatcaatgtcacactcgcaccaaattacctgactcaaatatctctccccgatagtgatacatcctacatttcactctctcctgttgcatcgctatcgatgcaaagccactttcatcagaggctccaagatgaaaatcggcatagcgcgataacgcggtttagccgaactaccaacatgggggtcactgcgatgacatgtggcggcgcatttagaatgttaaagtctggcgctaagttttccagcccccctcatcaccgattaaacagtaaacgaagttggttgacgtcagagcatgttcagtcattaaaacagtaccagcgcctcaacaaaagcctcatacctgaaaactctcggattgcactccgtagaaaatacaaaatcgagcttcaaaatatggtcagatcttggtttgcaatgcaagaccatacccttgattcgaacatacttatccaacatttgaatcatgacctatcttacttaggagccacaaaacgttttgcatacgatccagcgatgaccaagctctttactgagcttttgaaacgagagttatcaaattcaatcaataatggtgagcaacacactaatggatcgtttttagtcctaccgaatatcagggtttgtggcgcaacagctttaagctccccggtaacggtggggattccatcacttacagctttctttggcttcgttcacgcatttgaacggaatataaatcgcaccacctcatcgtttcgtgttgaatcctttgcgatatgcgtccatcaactacatgtcgagaagcgaggtttgacagcagagtttgtggaaaaaggcgacgggactatatccgctcccgcgacccgggatgactggcagtgtgatgtcgtatttagccttattttgaacaccaactttgctcaacatattgaccaagatacgttagttacatcactaccaaagcgattggctcggggttcagcaaaaattgcgattgatgactttaaacatatcaactcattctcgacattagaaacagcgatcgaatctctgccaatagaagctggtaggtggttatcactttacgcacagtcaaacaataatctaagtgatctattagcagccatgacagaggaccatcagctcatggcaagctgcgtcggttaccacttgttagaagagcccaaagataaaccaaactccctcagaggttacaaacacgctatcgccgagtgcatcattggactcattaactcaatcacctttagctcagagactgatcccaacacaatcttttggtcgctaaagaactatcaaaactacctagtggtacagccaaggagtatcaacgatgaaactaccgacaaatctagcctatgagcgctctatcgacccatcagatgtctgtttttttgtcgtctggcccgatgatagaaaaacacctttaacctacaattctcgtactctgctcgggcaaatggaagcggcatcattagcctatgatgtctcaggtcaaccaataaaaagtgccaccgctgaggcgttagctcaagggaaccctcatcaagttgatttctgccacgttccatacggtgcgagtcatattgaatgcagtttctccgtctcgttttcttctgaactacgtcaaccatataagtgtaactcaagcaaagttaaacaaacgctagtgcaattagtcgagctctacgaaacgaaaatcggctggactgagctagcaacccgatatttgatgaacatttgcaacggtaaatggctgtggaaaaatacccgtaaagcctattgctggaacattgtacttacaccttggccttggaacggggaaaaggttggatttgaagatattcgtactaactacacctcacggcaagactttaaaaataataaaaattggtctgctatagttgaaatgatcaaaaccgcattttctagtactgatgggctggcgatatttgaagtcagggccaccttgcacttgccaacgaatgctatggtgcggccaagccaagttttcacagaaaaagaaagtggcagtaaaagtaaatctaaaactcaaaacagtcgagtttttcagagtacaactattgatggtgaacgatcgccaatactaggggcctttaaaacgggagcagctattgcaaccattgacgactggtatcctgaagccactgagccactaagggtcggacggtttggggttcatcgcgaagatgtcacttgctaccgtcatccgtctaccggaaaagattttttctcgatattacaacaagcagagcactatattgaagtgttgagcgccaacaaaactcccgctcaagaaactatcaacgacatgcactttttaatggctaacctgattaagggtgggatgttccagcataaaggagactgactgtgaaatggtattataagacaatcacctttctgccagagttgtgcaacaacgagtcactggctgcaaagtgtctccgcgttctgcatggatttaactatcagtatgagacacgaaatatcggcgtttcatttccgctttggtgtgatgcaacggttggaaaaaagatttcatttgtcagcaagaacaagatagaactcgacttactacttaaacaacactatttcgtccaaatggaacaacttcaatactttcatatatccaacactgttctcgtcccagaagattgtacatacgtttcctttagacgctgtcaatctatagataagctcacagcagcagggctggcaaggaaaatcagacgcctggagaaacgtgctctatctagaggcgagcaatttgacccatcatcttttgctcaaaaagagcatactgcaatagcgcactaccactcacttggggagtccagcaaacagacgaaccgcaactttcgactcaatatcaggatgctctcggagcaaccccgtgaggggaactcgatttttagtagctatggcttatcaaattcagaaaactcgtttcagcctgtacccttaatctccggtagcgaaacgccggggacttctgaatctgctactccggaaagcggaggctctggctcgtcaggaggttcaggaagttcaggcggtatgtttttgcaaagacctaaaccttacagcgatgaaagtttagaaagtttctttatccgagtggctaacaaaaatggctacggtgatgtccatcgcttcctagaagccactaaacgattccttcaagacattgaccataatggctatcaaacctttccgactgatataactcggataaacccatactcagctaaaaacagttccagcgcacgaactgcgtcattcctgaaacttgcacaattgacatttaatgaaccgccagagctacttgggttggcaattaacagaacaaacatgaaatactcgccgtcaactagcgcggttgttagaggtgcagaagtctttcctcgcagtttactacggacgcactccatcccctgctgtcctttgtgtctgcgagaaaatggctacgcctcctacctttggcactttcaggggtacgaatactgccacagccataacgtacctttaattaccacttgtagctgtggtaaggagtttgactaccgagtatctgggttaaagggcatttgctgcaaatgcaaggagcctatcaccttaaccagcagggagaacggtcatgaggcagcgtgtactgtttcaaactggcttgctggccatgaatctaaacctctgccaaatcttcctaaaagctaccgatggggtttagttcattggtggatgggtattaaagatagcgagttcgatcacttttcgttcgttcaatttttctcaaactggccaaggtcattccactcgataatcgaagatgaagtagagttcaaccttgagcatgctgttgtcagcacgtctgaattacgactaaaagatcttcttggtcgattgtttttcggttcaattcggttacctgagcggaatcttcaacacaatatcatccttggtgagcttctctgctatttagaaaatcgtttatggcaagacaagggattaatcgccaacctcaaaatgaacgcgttagaggcgactgtaatgttaaattgtagcctcgatcagattgcatcaatggttgaacaacgcatcttgaagccaaatcgaaaaagcaagcccaacagccctcttgatgttaccgattatctatttcatttcggcgatattttctgtctttggttagctgagttccaaagcgatgagtttaaccgttcgttttatgtgtcgaggtggtaatgacctaggctgctgccaccgctgagcaataactagcataaccccttggggcctctaaacgggtcttgaggggttttttgctgaaacctcaggcatttgagaagcacacggtcacactgcttccggtagtcaataaaccggtaaaccagcaatagacataagcggctatttaacgaccctgccctgaaccgacgaccgggtcatcgtggccggatcttgcggcccctcggcttgaacgaattgttagacattatttgccgactaccttggtgatctcgcctttcacgtagtggacaaattcttccaactgatctgcgcgcgaggccaagcgatcttcttcttgtccaagataagcctgtctagcttcaagtatgacgggctgatactgggccggcaggcgctccattgcccagtcggcagcgacatccttcggcgcgattttgccggttactgcgctgtaccaaatgcgggacaacgtaagcactacatttcgctcatcgccagcccagtcgggcggcgagttccatagcgttaaggtttcatttagcgcctcaaatagatcctgttcaggaaccggatcaaagagttcctccgccgctggacctaccaaggcaacgctatgttctcttgcttttgtcagcaagatagccagatcaatgtcgatcgtggctggctcgaagatacctgcaagaatgtcattgcgctgccattctccaaattgcagttcgcgcttagctggataacgccacggaatgatgtcgtcgtgcacaacaatggtgacttctacagcgcggagaatctcgctctctccaggggaagccgaagtttccaaaaggtcgttgatcaaagctcgccgcgttgtttcatcaagccttacggtcaccgtaaccagcaaatcaatatcactgtgtggcttcaggccgccatccactgcggagccgtacaaatgtacggccagcaacgtcggttcgagatggcgctcgatgacgccaactacctctgatagttgagtcgatacttcggcgatcaccgcttccctcatactcttcctttttcaatattattgaagcatttatcagggttattgtctcatgagcggatacatatttgaatgtatttagaaaaataaacaaatagctagctcactcggtcgctacgctccgggcgtgagactgcggcgggcgctgcggacacatacaaagttacccacagattccgtggataagcaggggactaacatgtgaggcaaaacagcagggccgcgccggtggcgtttttccataggctccgccctcctgccagagttcacataaacagacgcttttccggtgcatctgtgggagccgtgaggctcaaccatgaatctgacagtacgggcgaaacccgacaggacttaaagatccccaccgtttccggcgggtcgctccctcttgcgctctcctgttccgaccctgccgtttaccggatacctgttccgcctttctcccttacgggaagtgtggcgctttctcatagctcacacactggtatctcggctcggtgtaggtcgttcgctccaagctgggctgtaagcaagaactccccgttcagcccgactgctgcgccttatccggtaactgttcacttgagtccaacccggaaaagcacggtaaaacgccactggcagcagccattggtaactgggagttcgcagaggatttgtttagctaaacacgcggttgctcttgaagtgtgcgccaaagtccggctacactggaaggacagatttggttgctgtgctctgcgaaagccagttaccacggttaagcagttccccaactgacttaaccttcgatcaaaccacctccccaggtggttttttcgtttacagggcaaaagattacgcgcagaaaaaaaggatctcaagaagatcctttgatcttttctactgaaccgctctagatttcagtgcaatttatctcttcaaatgtagcacctgaagtcagccccatacgatataagttgtaattctcatgttagtcatgccccgcgcccaccggaaggagctgactgggttgaaggctctcaagggcatcggtcgagatcccggtgcctaatgagtgagctaacttacattaattgcgttgcgctcactgcccgctttccagtcgggaaacctgtcgtgccagctgcattaatgaatcggccaacgcgcggggagaggcggtttgcgtattgggcgccagggtggtttttcttttcaccagtgagacgggcaacagctgattgcccttcaccgcctggccctgagagagttgcagcaagcggtccacgctggtttgccccagcaggcgaaaatcctgtttgatggtggttaacggcgggatataacatgagctgtcttcggtatcgtcgtatcccactaccgagatgtccgcaccaacgcgcagcccggactcggtaatggcgcgcattgcgcccagcgccatctgatcgttggcaaccagcatcgcagtgggaacgatgccctcattcagcatttgcatggtttgttgaaaaccggacatggcactccagtcgccttcccgttccgctatcggctgaatttgattgcgagtgagatatttatgccagccagccagacgcagacgcgccgagacagaacttaatgggcccgctaacagcgcgatttgctggtgacccaatgcgaccagatgctccacgcccagtcgcgtaccgtcttcatgggagaaaataatactgttgatgggtgtctggtcagagacatcaagaaataacgccggaacattagtgcaggcagcttccacagcaatggcatcctggtcatccagcggatagttaatgatcagcccactgacgcgttgcgcgagaagattgtgcaccgccgctttacaggcttcgacgccgcttcgttctaccatcgacaccaccacgctggcacccagttgatcggcgcgagatttaatcgccgcgacaatttgcgacggcgcgtgcagggccagactggaggtggcaacgccaatcagcaacgactgtttgcccgccagttgttgtgccacgcggttgggaatgtaattcagctccgccatcgccgcttccactttttcccgcgttttcgcagaaacgtggctggcctggttcaccacgcgggaaacggtctgataagagacaccggcatactctgcgacatcgtataacgttactggtttcac

SEQ ID NO: 47 - DNA, 2946 bp, Synthetic construct
  source 1..2946: mol_type = other DNA
gcgcccaatacgcaaaccgcctctccccgcgcgttggccgattcattaatgcagctggcacgacaggtttcccgactggaaagcgggcagtgagcgcaacgcaattaatgtgagttagctcactcattaggcaccccaggctttacactttatgcttccggctcgtatgttgtgtggaattgtgagcggataacaatttcacacaggaaacagctatgaccatgattacgccaagctttgttgatacaaccataaaatgataattacacccataaattgataattatcacacccataaattgatattgcctcttcatggtctaaacttcagtaagtttacgacattttcatgaagaggtcatttccggggatccgagtctagagtccttactgcagtagttttgctgaaatactcgattcacaaaaatatcaacttatggttgttttgtgagatatcaatatatggttgttttgtggttaagttgctgattataaataattattaaatatcactttatggttgcatcaacaggtaccgagctcgaattcactggccgtcgttttacaacgtcgtgactgggaaaaccctggcgttacccaacttaatcgccttgcagcacatccccctttcgccagctggcgtaatagcgaagaggcccgcaccgatcgcccttcccaacagttgcgcagcctgaatggcgaatggcgcctgatgcggtattttctccttacgcatctgtgcggtatttcacaccgcatatggtgcactctcagtacaatctgctctgatgccgcatagttaagccagccccgacacccgccaacacccgctgacgcgccctgacgggcttgtctgctcccggcatccgcttacagacaagctgtgaccgtctccgggagctgcatgtgtcagaggttttcaccgtcatcaccgaaacgcgcgagacgaaagggcctcgtgatacgcctatttttataggttaatgtcatgataataatggtttcttagacgtcaggtggcacttttcggggaaatgtgcgcggaacccctatttgtttatttttctaaatacattcaaatatgtatccgctcatgagacaataaccctgataaatgcttcaataatattgaaaaaggaagagtatgagtattcaacatttccgtgtcgcccttattcccttttttgcggcattttgccttcctgtttttgctcacccagaaacgctggtgaaagtaaaagatgctgaagatcagttgggtgcacgagtgggttacatcgaactggatctcaacagcggtaagatccttgagagttttcgccccgaagaacgttttccaatgatgagcacttttaaagttctgctatgtggcgcggtattatcccgtattgacgccgggcaagagcaactcggtcgccgcatacactattctcagaatgacttggttgagtactcaccagtcacagaaaagcatcttacggatggcatgacagtaagagaattatgcagtgctgccataaccatgagtgataacactgcggccaacttacttctgacaacgatcggaggaccgaaggagctaaccgcttttttgcacaacatgggggatcatgtaactcgccttgatcgttgggaaccggagctgaatgaagccataccaaacgacgagcgtgacaccacgatgcctgtagcaatggcaacaacgttgcgcaaactattaactggcgaactacttactctagcttcccggcaacaattaatagactggatggaggcggataaagttgcaggaccacttctgcgctcggcccttccggctggctggtttattgctgataaatctggagccggtgagcgtgggtctcgcggtatcattgcagcactggggccagatggtaagccctcccgtatcgtagttatctacacgacggggagtcaggcaactatggatgaacgaaatagacagatcgctgagataggtgcctcactgattaagcattggtaactgtcagaccaagtttactcatatatactttagattgatttaaaacttcatttttaatttaaaaggatctaggtgaagatcctttttgataatctcatgaccaaaatcccttaacgtgagttttcgttccactgagcgtcagaccccgtagaaaagatcaaaggatcttcttgagatcctttttttctgcgcgtaatctgctgcttgcaaacaaaaaaaccaccgctaccagcggtggtttgtttgccggatcaagagctaccaactctttttccgaaggtaactggcttcagcagagcgcagataccaaatactgttcttctagtgtagccgtagttaggccaccacttcaagaactctgtagcaccgcctacatacctcgctctgctaatcctgttaccagtggctgctgccagtggcgataagtcgtgtcttaccgggttggactcaagacgatagttaccggataaggcgcagcggtcgggctgaacggggggttcgtgcacacagcccagcttggagcgaacgacctacaccgaactgagatacctacagcgtgagctatgagaaagcgccacgcttcccgaagggagaaaggcggacaggtatccggtaagcggcagggtcggaacaggagagcgcacgagggagcttccagggggaaacgcctggtatctttatagtcctgtcgggtttcgccacctctgacttgagcgtcgatttttgtgatgctcgtcaggggggcggagcctatggaaaaacgccagcaacgcggcctttttacggttcctggccttttgctggccttttgctcacatgttctttcctgcgttatcccctgattctgtggataaccgtattaccgcctttgagtgagctgataccgctcgccgcagccgaacgaccgagcgcagcgagtcagtgagcgaggaagcggaaga

SEQ ID NO: 48 - DNA, 2987 bp, Synthetic construct
  source 1..2987: mol_type = other DNA
attgcagcactggggccagatggtaagccctcccgtatcgtagttatctacacgacggggagtcaggcaactatggatgaacgaaatagacagatcgctgagataggtgcctcactgattaagcattggtaactgtcagaccaagtttactcatatatactttagattgatttaaaacttcatttttaatttaaaaggatctaggtgaagatcctttttgataatctcatgaccaaaatcccttaacgtgagttttcgttccactgagcgtcagaccccgtagaaaagatcaaaggatcttcttgagatcctttttttctgcgcgtaatctgctgcttgcaaacaaaaaaaccaccgctaccagcggtggtttgtttgccggatcaagagctaccaactctttttccgaaggtaactggcttcagcagagcgcagataccaaatactgttcttctagtgtagccgtagttaggccaccacttcaagaactctgtagcaccgcctacatacctcgctctgctaatcctgttaccagtggctgctgccagtggcgataagtcgtgtcttaccgggttggactcaagacgatagttaccggataaggcgcagcggtcgggctgaacggggggttcgtgcacacagcccagcttggagcgaacgacctacaccgaactgagatacctacagcgtgagctatgagaaagcgccacgcttcccgaagggagaaaggcggacaggtatccggtaagcggcagggtcggaacaggagagcgcacgagggagcttccagggggaaacgcctggtatctttatagtcctgtcgggtttcgccacctctgacttgagcgtcgatttttgtgatgctcgtcaggggggcggagcctatggaaaaacgccagcaacgcggcctttttacggttcctggccttttgctggccttttgctcacatgttctttcctgcgttatcccctgattctgtggataaccgtattaccgcctttgagtgagctgataccgctcgccgcagccgaacgaccgagcgcagcgagtcagtgagcgaggaagcggaagagcgcccaatacgcaaaccgcctctccccgcgcgttggccgattcattaatgcagctggcacgacaggtttcccgactggaaagcgggcagtgagcgcaacgcaattaatgtgagttagctcactcattaggcaccccaggctttacactttatgcttccggctcgtatgttgtgtggaattgtgagcggataacaatttcacacaggaaacagctatgaccatgattacgccaagctttgttgatacaaccataaaatgataattacacccataaattgataattatcacacccataaattgatattgcctcttcatggtctaaacttcagtaagtttacgacattttcatgaagaggtcatttccggggatccatggagaaaaaaatcactggatataccaccgttcgctctggagtgaataccaccttactgcagtagttttgctgaaatactcgattcacaaaaatatcaacttatggttgttttgtgagatatcaatatatggttgttttgtggttaagttgctgattataaataattattaaatatcactttatggttgcatcaacaggtaccgagctcgaattcactggccgtcgttttacaacgtcgtgactgggaaaaccctggcgttacccaacttaatcgccttgcagcacatccccctttcgccagctggcgtaatagcgaagaggcccgcaccgatcgcccttcccaacagttgcgcagcctgaatggcgaatggcgcctgatgcggtattttctccttacgcatctgtgcggtatttcacaccgcatatggtgcactctcagtacaatctgctctgatgccgcatagttaagccagccccgacacccgccaacacccgctgacgcgccctgacgggcttgtctgctcccggcatccgcttacagacaagctgtgaccgtctccgggagctgcatgtgtcagaggttttcaccgtcatcaccgaaacgcgcgagacgaaagggcctcgtgatacgcctatttttataggttaatgtcatgataataatggtttcttagacgtcaggtggcacttttcggggaaatgtgcgcggaacccctatttgtttatttttctaaatacattcaaatatgtatccgctcatgagacaataaccctgataaatgcttcaataatattgaaaaaggaagagtatgagtattcaacatttccgtgtcgcccttattcccttttttgcggcattttgccttcctgtttttgctcacccagaaacgctggtgaaagtaaaagatgctgaagatcagttgggtgcacgagtgggttacatcgaactggatctcaacagcggtaagatccttgagagttttcgccccgaagaacgttttccaatgatgagcacttttaaagttctgctatgtggcgcggtattatcccgtattgacgccgggcaagagcaactcggtcgccgcatacactattctcagaatgacttggttgagtactcaccagtcacagaaaagcatcttacggatggcatgacagtaagagaattatgcagtgctgccataaccatgagtgataacactgcggccaacttacttctgacaacgatcggaggaccgaaggagctaaccgcttttttgcacaacatgggggatcatgtaactcgccttgatcgttgggaaccggagctgaatgaagccataccaaacgacgagcgtgacaccacgatgcctgtagcaatggcaacaacgttgcgcaaactattaactggcgaactacttactctagcttcccggcaacaattaatagactggatggaggcggataaagttgcaggaccacttctgcgctcggcccttccggctggctggtttattgctgataaatctggagccggtgagcgtgggtctcgcggtatc

SEQ ID NO: 49 - DNA, 3050 bp, Synthetic construct
  source 1..3050: mol_type = other DNA
attgcagcactggggccagatggtaagccctcccgtatcgtagttatctacacgacggggagtcaggcaactatggatgaacgaaatagacagatcgctgagataggtgcctcactgattaagcattggtaactgtcagaccaagtttactcatatatactttagattgatttaaaacttcatttttaatttaaaaggatctaggtgaagatcctttttgataatctcatgaccaaaatcccttaacgtgagttttcgttccactgagcgtcagaccccgtagaaaagatcaaaggatcttcttgagatcctttttttctgcgcgtaatctgctgcttgcaaacaaaaaaaccaccgctaccagcggtggtttgtttgccggatcaagagctaccaactctttttccgaaggtaactggcttcagcagagcgcagataccaaatactgttcttctagtgtagccgtagttaggccaccacttcaagaactctgtagcaccgcctacatacctcgctctgctaatcctgttaccagtggctgctgccagtggcgataagtcgtgtcttaccgggttggactcaagacgatagttaccggataaggcgcagcggtcgggctgaacggggggttcgtgcacacagcccagcttggagcgaacgacctacaccgaactgagatacctacagcgtgagctatgagaaagcgccacgcttcccgaagggagaaaggcggacaggtatccggtaagcggcagggtcggaacaggagagcgcacgagggagcttccagggggaaacgcctggtatctttatagtcctgtcgggtttcgccacctctgacttgagcgtcgatttttgtgatgctcgtcaggggggcggagcctatggaaaaacgccagcaacgcggcctttttacggttcctggccttttgctggccttttgctcacatgttctttcctgcgttatcccctgattctgtggataaccgtattaccgcctttgagtgagctgataccgctcgccgcagccgaacgaccgagcgcagcgagtcagtgagcgaggaagcggaagagcgcccaatacgcaaaccgcctctccccgcgcgttggccgattcattaatgcagctggcacgacaggtttcccgactggaaagcgggcagtgagcgcaacgcaattaatgtgagttagctcactcattaggcaccccaggctttacactttatgcttccggctcgtatgttgtgtggaattgtgagcggataacaatttcacacaggaaacagctatgaccatgattacgccaagctttgttgatacaaccataaaatgataattacacccataaattgataattatcacacccataaattgatattgcctcttcatggtctaaacttcagtaagtttacgacattttcatgaagaggtcatttccggggatccatggagaaaaaaatcactggatataccaccgttgatatatcccaatggcatcgtaaagaacattttgaggcatttcagtcagttgctcaatgtacccgctctggagtgaataccaccttactgcagtagttttgctgaaatactcgattcacaaaaatatcaacttatggttgttttgtgagatatcaatatatggttgttttgtggttaagttgctgattataaataattattaaatatcactttatggttgcatcaacaggtaccgagctcgaattcactggccgtcgttttacaacgtcgtgactgggaaaaccctggcgttacccaacttaatcgccttgcagcacatccccctttcgccagctggcgtaatagcgaagaggcccgcaccgatcgcccttcccaacagttgcgcagcctgaatggcgaatggcgcctgatgcggtattttctccttacgcatctgtgcggtatttcacaccgcatatggtgcactctcagtacaatctgctctgatgccgcatagttaagccagccccgacacccgccaacacccgctgacgcgccctgacgggcttgtctgctcccggcatccgcttacagacaagctgtgaccgtctccgggagctgcatgtgtcagaggttttcaccgtcatcaccgaaacgcgcgagacgaaagggcctcgtgatacgcctatttttataggttaatgtcatgataataatggtttcttagacgtcaggtggcacttttcggggaaatgtgcgcggaacccctatttgtttatttttctaaatacattcaaatatgtatccgctcatgagacaataaccctgataaatgcttcaataatattgaaaaaggaagagtatgagtattcaacatttccgtgtcgcccttattcccttttttgcggcattttgccttcctgtttttgctcacccagaaacgctggtgaaagtaaaagatgctgaagatcagttgggtgcacgagtgggttacatcgaactggatctcaacagcggtaagatccttgagagttttcgccccgaagaacgttttccaatgatgagcacttttaaagttctgctatgtggcgcggtattatcccgtattgacgccgggcaagagcaactcggtcgccgcatacactattctcagaatgacttggttgagtactcaccagtcacagaaaagcatcttacggatggcatgacagtaagagaattatgcagtgctgccataaccatgagtgataacactgcggccaacttacttctgacaacgatcggaggaccgaaggagctaaccgcttttttgcacaacatgggggatcatgtaactcgccttgatcgttgggaaccggagctgaatgaagccataccaaacgacgagcgtgacaccacgatgcctgtagcaatggcaacaacgttgcgcaaactattaactggcgaactacttactctagcttcccggcaacaattaatagactggatggaggcggataaagttgcaggaccacttctgcgctcggcccttccggctggctggtttattgctgataaatctggagccggtgagcgtgggtctcgcggtatc

SEQ ID NO: 50 - DNA, 3177 bp, Synthetic construct
  source 1..3177: mol_type = other DNA
attgcagcactggggccagatggtaagccctcccgtatcgtagttatctacacgacggggagtcaggcaactatggatgaacgaaatagacagatcgctgagataggtgcctcactgattaagcattggtaactgtcagaccaagtttactcatatatactttagattgatttaaaacttcatttttaatttaaaaggatctaggtgaagatcctttttgataatctcatgaccaaaatcccttaacgtgagttttcgttccactgagcgtcagaccccgtagaaaagatcaaaggatcttcttgagatcctttttttctgcgcgtaatctgctgcttgcaaacaaaaaaaccaccgctaccagcggtggtttgtttgccggatcaagagctaccaactctttttccgaaggtaactggcttcagcagagcgcagataccaaatactgttcttctagtgtagccgtagttaggccaccacttcaagaactctgtagcaccgcctacatacctcgctctgctaatcctgttaccagtggctgctgccagtggcgataagtcgtgtcttaccgggttggactcaagacgatagttaccggataaggcgcagcggtcgggctgaacggggggttcgtgcacacagcccagcttggagcgaacgacctacaccgaactgagatacctacagcgtgagctatgagaaagcgccacgcttcccgaagggagaaaggcggacaggtatccggtaagcggcagggtcggaacaggagagcgcacgagggagcttccagggggaaacgcctggtatctttatagtcctgtcgggtttcgccacctctgacttgagcgtcgatttttgtgatgctcgtcaggggggcggagcctatggaaaaacgccagcaacgcggcctttttacggttcctggccttttgctggccttttgctcacatgttctttcctgcgttatcccctgattctgtggataaccgtattaccgcctttgagtgagctgataccgctcgccgcagccgaacgaccgagcgcagcgagtcagtgagcgaggaagcggaagagcgcccaatacgcaaaccgcctctccccgcgcgttggccgattcattaatgcagctggcacgacaggtttcccgactggaaagcgggcagtgagcgcaacgcaattaatgtgagttagctcactcattaggcaccccaggctttacactttatgcttccggctcgtatgttgtgtggaattgtgagcggataacaatttcacacaggaaacagctatgaccatgattacgccaagctttgttgatacaaccataaaatgataattacacccataaattgataattatcacacccataaattgatattgcctcttcatggtctaaacttcagtaagtttacgacattttcatgaagaggtcatttccggggatccatggagaaaaaaatcactggatataccaccgttgatatatcccaatggcatcgtaaagaacattttgaggcatttcagtcagttgctcaatgtacctataaccagaccgttcagctggatattacggcctttttaaagaccgtaaagaaaaataagcacaagttttatccggcctttattcacattcttgcccgcctgatgaatgctcatccggagttccgtacgctctggagtgaataccaccttactgcagtagttttgctgaaatactcgattcacaaaaatatcaacttatggttgttttgtgagatatcaatatatggttgttttgtggttaagttgctgattataaataattattaaatatcactttatggttgcatcaacaggtaccgagctcgaattcactggccgtcgttttacaacgtcgtgactgggaaaaccctggcgttacccaacttaatcgccttgcagcacatccccctttcgccagctggcgtaatagcgaagaggcccgcaccgatcgcccttcccaacagttgcgcagcctgaatggcgaatggcgcctgatgcggtattttctccttacgcatctgtgcggtatttcacaccgcatatggtgcactctcagtacaatctgctctgatgccgcatagttaagccagccccgacacccgccaacacccgctgacgcgccctgacgggcttgtctgctcccggcatccgcttacagacaagctgtgaccgtctccgggagctgcatgtgtcagaggttttcaccgtcatcaccgaaacgcgcgagacgaaagggcctcgtgatacgcctatttttataggttaatgtcatgataataatggtttcttagacgtcaggtggcacttttcggggaaatgtgcgcggaacccctatttgtttatttttctaaatacattcaaatatgtatccgctcatgagacaataaccctgataaatgcttcaataatattgaaaaaggaagagtatgagtattcaacatttccgtgtcgcccttattcccttttttgcggcattttgccttcctgtttttgctcacccagaaacgctggtgaaagtaaaagatgctgaagatcagttgggtgcacgagtgggttacatcgaactggatctcaacagcggtaagatccttgagagttttcgccccgaagaacgttttccaatgatgagcacttttaaagttctgctatgtggcgcggtattatcccgtattgacgccgggcaagagcaactcggtcgccgcatacactattctcagaatgacttggttgagtactcaccagtcacagaaaagcatcttacggatggcatgacagtaagagaattatgcagtgctgccataaccatgagtgataacactgcggccaacttacttctgacaacgatcggaggaccgaaggagctaaccgcttttttgcacaacatgggggatcatgtaactcgccttgatcgttgggaaccggagctgaatgaagccataccaaacgacgagcgtgacaccacgatgcctgtagcaatggcaacaacgttgcgcaaactattaactggcgaactacttactctagcttcccggcaacaattaatagactggatggaggcggataaagttgcaggaccacttctgcgctcggcccttccggctggctggtttattgctgataaatctggagccggtgagcgtgggtctcgcggtatc

SEQ ID NO: 51 - DNA, 3428 bp, Synthetic construct
  source 1..3428: mol_type = other DNA
attgcagcactggggccagatggtaagccctcccgtatcgtagttatctacacgacggggagtcaggcaactatggatgaacgaaatagacagatcgctgagataggtgcctcactgattaagcattggtaactgtcagaccaagtttactcatatatactttagattgatttaaaacttcatttttaatttaaaaggatctaggtgaagatcctttttgataatctcatgaccaaaatcccttaacgtgagttttcgttccactgagcgtcagaccccgtagaaaagatcaaaggatcttcttgagatcctttttttctgcgcgtaatctgctgcttgcaaacaaaaaaaccaccgctaccagcggtggtttgtttgccggatcaagagctaccaactctttttccgaaggtaactggcttcagcagagcgcagataccaaatactgttcttctagtgtagccgtagttaggccaccacttcaagaactctgtagcaccgcctacatacctcgctctgctaatcctgttaccagtggctgctgccagtggcgataagtcgtgtcttaccgggttggactcaagacgatagttaccggataaggcgcagcggtcgggctgaacggggggttcgtgcacacagcccagcttggagcgaacgacctacaccgaactgagatacctacagcgtgagctatgagaaagcgccacgcttcccgaagggagaaaggcggacaggtatccggtaagcggcagggtcggaacaggagagcgcacgagggagcttccagggggaaacgcctggtatctttatagtcctgtcgggtttcgccacctctgacttgagcgtcgatttttgtgatgctcgtcaggggggcggagcctatggaaaaacgccagcaacgcggcctttttacggttcctggccttttgctggccttttgctcacatgttctttcctgcgttatcccctgattctgtggataaccgtattaccgcctttgagtgagctgataccgctcgccgcagccgaacgaccgagcgcagcgagtcagtgagcgaggaagcggaagagcgcccaatacgcaaaccgcctctccccgcgcgttggccgattcattaatgcagctggcacgacaggtttcccgactggaaagcgggcagtgagcgcaacgcaattaatgtgagttagctcactcattaggcaccccaggctttacactttatgcttccggctcgtatgttgtgtggaattgtgagcggataacaatttcacacaggaaacagctatgaccatgattacgccaagctttgttgatacaaccataaaatgataattacacccataaattgataattatcacacccataaattgatattgcctcttcatggtctaaacttcagtaagtttacgacattttcatgaagaggtcatttccggggatccatggagaaaaaaatcactggatataccaccgttgatatatcccaatggcatcgtaaagaacattttgaggcatttcagtcagttgctcaatgtacctataaccagaccgttcagctggatattacggcctttttaaagaccgtaaagaaaaataagcacaagttttatccggcctttattcacattcttgcccgcctgatgaatgctcatccggagttccgtatggcaatgaaagacggtgagctggtgatatgggatagtgttcacccttgttacaccgttttccatgagcaaactgaaacgttttcatcgctctggagtgaataccacgacgatttccggcagtttctacacatatattcgcaagatgtggcgtgttacggtgaaaacctggcctatttccctaaagggtttattgagaatatgtttttcgtctcagccaatccctgggtgagtttcaccagttttgatttaaacgtggccaatatggacaacttactgcagtagttttgctgaaatactcgattcacaaaaatatcaacttatggttgttttgtgagatatcaatatatggttgttttgtggttaagttgctgattataaataattattaaatatcactttatggttgcatcaacaggtaccgagctcgaattcactggccgtcgttttacaacgtcgtgactgggaaaaccctggcgttacccaacttaatcgccttgcagcacatccccctttcgccagctggcgtaatagcgaagaggcccgcaccgatcgcccttcccaacagttgcgcagcctgaatggcgaatggcgcctgatgcggtattttctccttacgcatctgtgcggtatttcacaccgcatatggtgcactctcagtacaatctgctctgatgccgcatagttaagccagccccgacacccgccaacacccgctgacgcgccctgacgggcttgtctgctcccggcatccgcttacagacaagctgtgaccgtctccgggagctgcatgtgtcagaggttttcaccgtcatcaccgaaacgcgcgagacgaaagggcctcgtgatacgcctatttttataggttaatgtcatgataataatggtttcttagacgtcaggtggcacttttcggggaaatgtgcgcggaacccctatttgtttatttttctaaatacattcaaatatgtatccgctcatgagacaataaccctgataaatgcttcaataatattgaaaaaggaagagtatgagtattcaacatttccgtgtcgcccttattcccttttttgcggcattttgccttcctgtttttgctcacccagaaacgctggtgaaagtaaaagatgctgaagatcagttgggtgcacgagtgggttacatcgaactggatctcaacagcggtaagatccttgagagttttcgccccgaagaacgttttccaatgatgagcacttttaaagttctgctatgtggcgcggtattatcccgtattgacgccgggcaagagcaactcggtcgccgcatacactattctcagaatgacttggttgagtactcaccagtcacagaaaagcatcttacggatggcatgacagtaagagaattatgcagtgctgccataaccatgagtgataacactgcggccaacttacttctgacaacgatcggaggaccgaaggagctaaccgcttttttgcacaacatgggggatcatgtaactcgccttgatcgttgggaaccggagctgaatgaagccataccaaacgacgagcgtgacaccacgatgcctgtagcaatggcaacaacgttgcgcaaactattaactggcgaactacttactctagcttcccggcaacaattaatagactggatggaggcggataaagttgcaggaccacttctgcgctcggcccttccggctggctggtttattgctgataaatctggagccggtgagcgtgggtctcgcggtatc

SEQ ID NO: 52 - DNA, 4658 bp, Synthetic construct
  source 1..4658: mol_type = other DNA
gcgcccaatacgcaaaccgcctctccccgcgcgttggccgattcattaatgcagctggcacgacaggtttcccgactggaaagcgggcagtgagcgcaacgcaattaatgtgagttagctcactcattaggcaccccaggctttacactttatgcttccggctcgtatgttgtgtggaattgtgagcggataacaatttcacacaggaaacagctatgaccatgattacgccaagctttgttgatacaaccataaaatgataattacacccataaattgataattatcacacccataaattgatattgcctcttcatggtctaaacttcagtaagtttacgacattttcatgaagaggtcatttccgggcggcctattggttaaaaaatgagctgatttaacaaaaatttaacgcgaattaattgacattgattattgactagttattaatagtaatcaattacggggtcattagttcatagcccatatatggagttccgcgttacataacttacggtaaatggcccgcctggctgaccgcccaacgacccccgcccattgacgtcaataatgacgtatgttcccatagtaacgccaatagggactttccattgacgtcaatgggtggagtatttacggtaaactgcccacttggcagtacatcaagtgtatcatatgccaagtacgccccctattgacgtcaatgacggtaaatggcccgcctggcattatgcccagtacatgaccttatgggactttcctacttggcagtacatctacgtattagtcatcgctattaccatggtgatgcggttttggcagtacatcaatgggcgtggatagcggtttgactcacggggatttccaagtctccaccccattgacgtcaatgggagtttgttttggcaccaaaatcaacgggactttccaaaatgtcgtaacaactccgccccattgacgcaaatgggcggtaggcgtgtacggtgggaggtctatataagcagagctctctggctaactagagaacccactgcttactggcttatcgaaattaatagcactggacatcacgaagcttaccggtagccaccatgaccgagtacaagcccacggtgcgcctcgccacccgcgacgacgtccccagggccgtacgcaccctcgccgccgcgttcgccgactaccccgccacgcgccacaccgtcgatccggaccgccacatcgagcgggtcaccgagctgcaagaactcttcctcacgcgcgtcgggctcgacatcggcaaggtgtgggtcgcggacgacggcgccgcggtggcggtctggaccacgccggagagcgtcgaagcgggggcggtgttcgccgagatcggcccgcgcatggccgagttgagcggttcccggctggccgcgcagcaacagatggaaggcctcctggcgccgcaccggcccaaggagcccgcgtggttcctggccaccgtcggagtctcgcccgaccaccagggcaagggtctgggcagcgccgtcgtgctccccggagtggaggcggccgagcgcgccggggtgcccgccttcctggagacctccgcgccccgcaacctccccttctacgagcggctcggcttcaccgtcaccgccgacgtcgaggtgcccgaaggaccgcgcacctggtgcatgacccgcaagcccggtgcctgagcgggactctggggttcgaaatgaccgaccaagcgacgcccaacctgccatcacgagatttcgattccaccgccgccttctatgaaaggttgggcttcggaatcgttttccgggacgccggctggatgatcctccagcgcggggatctcatgctggagttcttcgcccaccccaacttgtttattgcagcttataatggttacaaataaagcaatagcatcacaaatttcacaaataaagcatttttttcactgcattctagttgtggtttgtccaaactcatcaatgtatcttatcatgtctgtataccgtcgacctctagctagagcttggcgtaatcatggtcatagctgtttcctgtgtgaaattgttatccgctcacaattccacacaacatacgagcagtccttactgcagtagttttgctgaaatactcgattcacaaaaatatcaacttatggttgttttgtgagatatcaatatatggttgttttgtggttaagttgctgattataaataattattaaatatcactttatggttgcatcaacaggtaccgagctcgaattcactggccgtcgttttacaacgtcgtgactgggaaaaccctggcgttacccaacttaatcgccttgcagcacatccccctttcgccagctggcgtaatagcgaagaggcccgcaccgatcgcccttcccaacagttgcgcagcctgaatggcgaatggcgcctgatgcggtattttctccttacgcatctgtgcggtatttcacaccgcatatggtgcactctcagtacaatctgctctgatgccgcatagttaagccagccccgacacccgccaacacccgctgacgcgccctgacgggcttgtctgctcccggcatccgcttacagacaagctgtgaccgtctccgggagctgcatgtgtcagaggttttcaccgtcatcaccgaaacgcgcgagacgaaagggcctcgtgatacgcctatttttataggttaatgtcatgataataatggtttcttagacgtcaggtggcacttttcggggaaatgtgcgcggaacccctatttgtttatttttctaaatacattcaaatatgtatccgctcatgagacaataaccctgataaatgcttcaataatattgaaaaaggaagagtatgagtattcaacatttccgtgtcgcccttattcccttttttgcggcattttgccttcctgtttttgctcacccagaaacgctggtgaaagtaaaagatgctgaagatcagttgggtgcacgagtgggttacatcgaactggatctcaacagcggtaagatccttgagagttttcgccccgaagaacgttttccaatgatgagcacttttaaagttctgctatgtggcgcggtattatcccgtattgacgccgggcaagagcaactcggtcgccgcatacactattctcagaatgacttggttgagtactcaccagtcacagaaaagcatcttacggatggcatgacagtaagagaattatgcagtgctgccataaccatgagtgataacactgcggccaacttacttctgacaacgatcggaggaccgaaggagctaaccgcttttttgcacaacatgggggatcatgtaactcgccttgatcgttgggaaccggagctgaatgaagccataccaaacgacgagcgtgacaccacgatgcctgtagcaatggcaacaacgttgcgcaaactattaactggcgaactacttactctagcttcccggcaacaattaatagactggatggaggcggataaagttgcaggaccacttctgcgctcggcccttccggctggctggtttattgctgataaatctggagccggtgagcgtgggtctcgcggtatcattgcagcactggggccagatggtaagccctcccgtatcgtagttatctacacgacggggagtcaggcaactatggatgaacgaaatagacagatcgctgagataggtgcctcactgattaagcattggtaactgtcagaccaagtttactcatatatactttagattgatttaaaacttcatttttaatttaaaaggatctaggtgaagatcctttttgataatctcatgaccaaaatcccttaacgtgagttttcgttccactgagcgtcagaccccgtagaaaagatcaaaggatcttcttgagatcctttttttctgcgcgtaatctgctgcttgcaaacaaaaaaaccaccgctaccagcggtggtttgtttgccggatcaagagctaccaactctttttccgaaggtaactggcttcagcagagcgcagataccaaatactgttcttctagtgtagccgtagttaggccaccacttcaagaactctgtagcaccgcctacatacctcgctctgctaatcctgttaccagtggctgctgccagtggcgataagtcgtgtcttaccgggttggactcaagacgatagttaccggataaggcgcagcggtcgggctgaacggggggttcgtgcacacagcccagcttggagcgaacgacctacaccgaactgagatacctacagcgtgagctatgagaaagcgccacgcttcccgaagggagaaaggcggacaggtatccggtaagcggcagggtcggaacaggagagcgcacgagggagcttccagggggaaacgcctggtatctttatagtcctgtcgggtttcgccacctctgacttgagcgtcgatttttgtgatgctcgtcaggggggcggagcctatggaaaaacgccagcaacgcggcctttttacggttcctggccttttgctggccttttgctcacatgttctttcctgcgttatcccctgattctgtggataaccgtattaccgcctttgagtgagctgataccgctcgccgcagccgaacgaccgagcgcagcgagtcagtgagcgaggaagcggaaga

SEQ ID NO: 53 - DNA, 5915 bp, Synthetic construct
  source 1..5915: mol_type = other DNA
gcgcccaatacgcaaaccgcctctccccgcgcgttggccgattcattaatgcagctggcacgacaggtttcccgactggaaagcgggcagtgagcgcaacgcaattaatgtgagttagctcactcattaggcaccccaggctttacactttatgcttccggctcgtatgttgtgtggaattgtgagcggataacaatttcacacaggaaacagctatgaccatgattacgccaagctttgttgatacaaccataaaatgataattacacccataaattgataattatcacacccataaattgatattgcctcttcatggtctaaacttcagtaagtttacgacattttcatgaagaggtcatttccggggtacagctcgtccatgccgagagtgatcccggcggcggtcacgaactccagcaggaccatgtgatcgcgcttctcgttggggtctttgctcagggcggactgggtgctcaggtagtggttgtcgggcagcagcacggggccgtcgccgatgggggtgttctgctggtagtggtcggcgagctgcacgctgccgtcctcgatgttgtggcggatcttgaagttcaccttgatgccgttcttctgcttgtcggccatgatatagacgttgtggctgttgtagttgtactccagcttgtgccccaggatgttgccgtcctccttgaagtcgatgcccttcagctcgatgcggttcaccagggtgtcgccctcgaacttcacctcggcgcgggtcttgtagttgccgtcgtccttgaagaagatggtgcgctcctggacgtagccttcgggcatggcggacttgaagaagtcgtgctgcttcatgtggtcggggtagcggctgaagcactgcacgccgtaggtcagggtggtcacgagggtgggccagggcacgggcagcttgccggtggtgcagatgaacttcagggtcagcttgccgtaggtggcatcgccctcgccctcgccggacacgctgaacttgtggccgtttacgtcgccgtccagctcgaccaggatgggcaccaccccggtgaacagctcctcgcccttgctcactgggccaggattctcctcgacgtcaccgcatgttagcagacttcctctgccctctccactgccgaattcctttttcttttttgcctggccggcctttttcgtggccgccggccttttgtcgcctcccagctgagacaggtcgatccgtgtctcgtacaggccggtgatgctctggtggatcagggtggcgtccagcacctctttggtgctggtgtacctcttccggtcgatggtggtgtcaaagtacttgaaggcggcaggggctcccagattggtcagggtaaacaggtggatgatattctcggcctgctctctgatgggcttatcccggtgcttgttgtaggcggacagcactttgtccagattagcgtcggccaggatcactctcttggagaactcgctgatctgctcgatgatctcgtccaggtagtgcttgtgctgttccacaaacagctgtttctgctcattatcctcgggggagcccttcagcttctcatagtggctggccaggtacaggaagttcacatatttggagggcagggccagttcgtttcccttctgcagttcgccggcagaggccagcattctcttccggccgttttccagctcgaacagggagtacttaggcagcttgatgatcaggtcctttttcacttctttgtagcccttggcttccagaaagtcgatgggattcttctcgaagctgcttctttccatgatggtgatccccagcagctctttcacactcttcagtttcttggacttgcccttttccactttggccaccaccagcacagaataggccacggtggggctgtcgaagccgccgtacttcttagggtcccagtccttctttctggcgatcagcttatcgctgttcctcttgggcaggatagactctttgctgaagccgcctgtctgcacctcggtctttttcacgatattcacttggggcatgctcagcactttccgcacggtggcaaaatcccggcccttatcccacacgatctccccggtttcgccgtttgtctcgatcagaggccgcttccggatctcgccgttggccagggtaatctcggtcttgaaaaagttcatgatgttgctgtagaagaagtacttggcggtagccttgccgatttcctgctcgctcttggcgatcatcttccgcacgtcgtacaccttgtagtcgccgtacacgaactcgctttccagcttagggtactttttgatcagggcggttcccacgacggcgttcaggtaggcgtcgtgggcgtggtggtagttgttgatctcgcgcactttgtaaaactggaaatccttccggaaatcggacaccagcttggacttcagggtgatcactttcacttcccggatcagcttgtcattctcgtcgtacttagtgttcatccgggagtccaggatctgtgccacgtgctttgtgatctgccgggtttccaccagctgtctcttgatgaagccggccttatccagttcgctcaggccgcctctctcggccttggtcagattgtcgaactttctctgggtaatcagcttggcgttcagatggggttttcctcgaacagctggttgtaggtctgcaccagctggatgaacagcttgtccacgtcgctgttgtcggggttcaggtcgccctcgatcaggaagtggccccggaacttgatcatgtgggccagggccagatagatcagccgcaggtcggccttgtcggtgctgtccaccagtttctttctcaggtggtagatggtggggtacttctcgtggtaggccacctcgtccacgatgttgccgaagatggggtgccgctcgtgcttcttatcctcttccaccaggaaggactcttccagtctgtggaagaagctgtcgtccaccttggccatctcgttgctgaagatctcttgcagatagcagatccggttcttccgtctggtgtatcttcttctggcggttctcttcagccgggtggcctcggctgtttcgccgctgtcgaacagcagggctccgatcaggttcttcttgatgctgtgccggtcggtgttgcccagcaccttgaatttcttgctgggcaccttgtactcgtcggtgatcacggcccagcccacagagttggtgccgatgtccaggccgatgctgtacttcttgtcggctgctgggactccgtggataccgaccttccgcttcttctttggggccatcttatcgtcatcgtctttgtaatcaatatcatgatccttgtagtctccgtcgtggtccagtccttactgcagtagttttgctgaaatactcgattcacaaaaatatcaacttatggttgttttgtgagatatcaatatatggttgttttgtggttaagttgctgattataaataattattaaatatcactttatggttgcatcaacaggtaccgagctcgaattcactggccgtcgttttacaacgtcgtgactgggaaaaccctggcgttacccaacttaatcgccttgcagcacatccccctttcgccagctggcgtaatagcgaagaggcccgcaccgatcgcccttcccaacagttgcgcagcctgaatggcgaatggcgcctgatgcggtattttctccttacgcatctgtgcggtatttcacaccgcatatggtgcactctcagtacaatctgctctgatgccgcatagttaagccagccccgacacccgccaacacccgctgacgcgccctgacgggcttgtctgctcccggcatccgcttacagacaagctgtgaccgtctccgggagctgcatgtgtcagaggttttcaccgtcatcaccgaaacgcgcgagacgaaagggcctcgtgatacgcctatttttataggttaatgtcatgataataatggtttcttagacgtcaggtggcacttttcggggaaatgtgcgcggaacccctatttgtttatttttctaaatacattcaaatatgtatccgctcatgagacaataaccctgataaatgcttcaataatattgaaaaaggaagagtatgagtattcaacatttccgtgtcgcccttattcccttttttgcggcattttgccttcctgtttttgctcacccagaaacgctggtgaaagtaaaagatgctgaagatcagttgggtgcacgagtgggttacatcgaactggatctcaacagcggtaagatccttgagagttttcgccccgaagaacgttttccaatgatgagcacttttaaagttctgctatgtggcgcggtattatcccgtattgacgccgggcaagagcaactcggtcgccgcatacactattctcagaatgacttggttgagtactcaccagtcacagaaaagcatcttacggatggcatgacagtaagagaattatgcagtgctgccataaccatgagtgataacactgcggccaacttacttctgacaacgatcggaggaccgaaggagctaaccgcttttttgcacaacatgggggatcatgtaactcgccttgatcgttgggaaccggagctgaatgaagccataccaaacgacgagcgtgacaccacgatgcctgtagcaatggcaacaacgttgcgcaaactattaactggcgaactacttactctagcttcccggcaacaattaatagactggatggaggcggataaagttgcaggaccacttctgcgctcggcccttccggctggctggtttattgctgataaatctggagccggtgagcgtgggtctcgcggtatcattgcagcactggggccagatggtaagccctcccgtatcgtagttatctacacgacggggagtcaggcaactatggatgaacgaaatagacagatcgctgagataggtgcctcactgattaagcattggtaactgtcagaccaagtttactcatatatactttagattgatttaaaacttcatttttaatttaaaaggatctaggtgaagatcctttttgataatctcatgaccaaaatcccttaacgtgagttttcgttccactgagcgtcagaccccgtagaaaagatcaaaggatcttcttgagatcctttttttctgcgcgtaatctgctgcttgcaaacaaaaaaaccaccgctaccagcggtggtttgtttgccggatcaagagctaccaactctttttccgaaggtaactggcttcagcagagcgcagataccaaatactgttcttctagtgtagccgtagttaggccaccacttcaagaactctgtagcaccgcctacatacctcgctctgctaatcctgttaccagtggctgctgccagtggcgataagtcgtgtcttaccgggttggactcaagacgatagttaccggataaggcgcagcggtcgggctgaacggggggttcgtgcacacagcccagcttggagcgaacgacctacaccgaactgagatacctacagcgtgagctatgagaaagcgccacgcttcccgaagggagaaaggcggacaggtatccggtaagcggcagggtcggaacaggagagcgcacgagggagcttccagggggaaacgcctggtatctttatagtcctgtcgggtttcgccacctctgacttgagcgtcgatttttgtgatgctcgtcaggggggcggagcctatggaaaaacgccagcaacgcggcctttttacggttcctggccttttgctggccttttgctcacatgttctttcctgcgttatcccctgattctgtggataaccgtattaccgcctttgagtgagctgataccgctcgccgcagccgaacgaccgagcgcagcgagtcagtgagcgaggaagcggaaga

SEQ ID NO: 54 - DNA, 6897 bp, Synthetic construct
  source 1..6897: mol_type = other DNA
gcgcccaatacgcaaaccgcctctccccgcgcgttggccgattcattaatgcagctggcacgacaggtttcccgactggaaagcgggcagtgagcgcaacgcaattaatgtgagttagctcactcattaggcaccccaggctttacactttatgcttccggctcgtatgttgtgtggaattgtgagcggataacaatttcacacaggaaacagctatgaccatgattacgccaagctttgttgatacaaccataaaatgataattacacccataaattgataattatcacacccataaattgatattgcctcttcatggtctaaacttcagtaagtttacgacattttcatgaagaggtcatttccggggtacagctcgtccatgccgagagtgatcccggcggcggtcacgaactccagcaggaccatgtgatcgcgcttctcgttggggtctttgctcagggcggactgggtgctcaggtagtggttgtcgggcagcagcacggggccgtcgccgatgggggtgttctgctggtagtggtcggcgagctgcacgctgccgtcctcgatgttgtggcggatcttgaagttcaccttgatgccgttcttctgcttgtcggccatgatatagacgttgtggctgttgtagttgtactccagcttgtgccccaggatgttgccgtcctccttgaagtcgatgcccttcagctcgatgcggttcaccagggtgtcgccctcgaacttcacctcggcgcgggtcttgtagttgccgtcgtccttgaagaagatggtgcgctcctggacgtagccttcgggcatggcggacttgaagaagtcgtgctgcttcatgtggtcggggtagcggctgaagcactgcacgccgtaggtcagggtggtcacgagggtgggccagggcacgggcagcttgccggtggtgcagatgaacttcagggtcagcttgccgtaggtggcatcgccctcgccctcgccggacacgctgaacttgtggccgtttacgtcgccgtccagctcgaccaggatgggcaccaccccggtgaacagctcctcgcccttgctcactgggccaggattctcctcgacgtcaccgcatgttagcagacttcctctgccctctccactgccgaattcctttttcttttttgcctggccggcctttttcgtggccgccggccttttgtcgcctcccagctgagacaggtcgatccgtgtctcgtacaggccggtgatgctctggtggatcagggtggcgtccagcacctctttggtgctggtgtacctcttccggtcgatggtggtgtcaaagtacttgaaggcggcaggggctcccagattggtcagggtaaacaggtggatgatattctcggcctgctctctgatgggcttatcccggtgcttgttgtaggcggacagcactttgtccagattagcgtcggccaggatcactctcttggagaactcgctgatctgctcgatgatctcgtccaggtagtgcttgtgctgttccacaaacagctgtttctgctcattatcctcgggggagcccttcagcttctcatagtggctggccaggtacaggaagttcacatatttggagggcagggccagttcgtttcccttctgcagttcgccggcagaggccagcattctcttccggccgttttccagctcgaacagggagtacttaggcagcttgatgatcaggtcctttttcacttctttgtagcccttggcttccagaaagtcgatgggattcttctcgaagctgcttctttccatgatggtgatccccagcagctctttcacactcttcagtttcttggacttgcccttttccactttggccaccaccagcacagaataggccacggtggggctgtcgaagccgccgtacttcttagggtcccagtccttctttctggcgatcagcttatcgctgttcctcttgggcaggatagactctttgctgaagccgcctgtctgcacctcggtctttttcacgatattcacttggggcatgctcagcactttccgcacggtggcaaaatcccggcccttatcccacacgatctccccggtttcgccgtttgtctcgatcagaggccgcttccggatctcgccgttggccagggtaatctcggtcttgaaaaagttcatgatgttgctgtagaagaagtacttggcggtagccttgccgatttcctgctcgctcttggcgatcatcttccgcacgtcgtacaccttgtagtcgccgtacacgaactcgctttccagcttagggtactttttgatcagggcggttcccacgacggcgttcaggtaggcgtcgtgggcgtggtggtagttgttgatctcgcgcactttgtaaaactggaaatccttccggaaatcggacaccagcttggacttcagggtgatcactttcacttcccggatcagcttgtcattctcgtcgtacttagtgttcatccgggagtccaggatctgtgccacgtgctttgtgatctgccgggtttccaccagctgtctcttgatgaagccggccttatccagttcgctcaggccgcctctctcggccttggtcagattgtcgaactttctctgggtaatcagcttggcgttcaatttcactttggtcagctcgttatacacggtgaagtactcgtacagcaggctgtgcttgggcagcaccttctcgttgggcaggttcttatcgaagttggtcatccgctcgatgaagctctgggcggaagcgcccttgtccaccacttcctcgaagttccagggggtgatggtttcctcgctctttctggtcatccaggcgaatctgctgtttcccctggccagagggcccacgtagtaggggatgcggaaggtcaggatcttctcgatcttttcccggttgtccttcaggaatgggtaaaaatcttcctgccgccgcagaatggcgtgcagctctcccaggtggatctggtgggggatgctgccgttgtcgaaggtccgctgcttccgcagcaggtcctctctgttcagcttcacgagcagttcctcggtgccgtccatcttttccaggatgggcttgatgaacttgtagaactcttcctggctggctccgccgtcaatgtagccggcgtagccgttcttgctctggtcgaagaaaatctctttgtacttctcaggcagctgctgccgcacgagagctttcagcagggtcaggtcctggtggtgctcgtcgtatctcttgatcatagaggcgctcaggggggccttggtgatctcggtgttcactctcaggatgtcgctcagcaggatggcgtcggacaggttcttggcggccagaaacaggtcggcgtactggtcgccgatctgggccagcaggttgtccaggtcgtcgtcgtaggtgtccttgctcagctgcagtttggcatcctcggccaggtcgaagttgctcttgaagttgggggtcaggcccaggctcagggcaatcaggtttccgaacaggccattcttcttctcgccgggcagctgggcgatcagattttccagccgtctgctcttgctcagtctggcagacaggatggccttggcgtccacgccgctggcgttgatggggttttcctcgaacagctggttgtaggtctgcaccagctggatgaacagcttgtccacgtcgctgttgtcggggttcaggtcgccctcgatcaggaagtggccccggaacttgatcatgtgggccagggccagatagatcagccgcaggtcggccttgtcggtgctgtccaccagtttctttctcaggtggtagatggtggggtacttctcgtggtaggccacctcgtccacgatgttgccgaagatggggtgccgctcgtgcttcttatcctcttccaccaggaaggactcttccagtctgtggaagaagctgtcgtccaccttggccatctcgttgctgaagatctcttgcagatagcagatccggttcttccgtctggtgtatcttcttctggcggttctcttcagccgggtggcctcggctgtttcgccgctgtcgaacagcagggctccgatcaggttcttcttgatgctgtgccggtcggtgttgcccagcaccttgaatttcttgctgggcaccttgtactcgtcggtgatcacggcccagcccacagagttggtgccgatgtccaggccgatgctgtacttcttgtcggctgctgggactccgtggataccgaccttccgcttcttctttggggccatcttatcgtcatcgtctttgtaatcaatatcatgatccttgtagtctccgtcgtggtccagtccttactgcagtagttttgctgaaatactcgattcacaaaaatatcaacttatggttgttttgtgagatatcaatatatggttgttttgtggttaagttgctgattataaataattattaaatatcactttatggttgcatcaacaggtaccgagctcgaattcactggccgtcgttttacaacgtcgtgactgggaaaaccctggcgttacccaacttaatcgccttgcagcacatccccctttcgccagctggcgtaatagcgaagaggcccgcaccgatcgcccttcccaacagttgcgcagcctgaatggcgaatggcgcctgatgcggtattttctccttacgcatctgtgcggtatttcacaccgcatatggtgcactctcagtacaatctgctctgatgccgcatagttaagccagccccgacacccgccaacacccgctgacgcgccctgacgggcttgtctgctcccggcatccgcttacagacaagctgtgaccgtctccgggagctgcatgtgtcagaggttttcaccgtcatcaccgaaacgcgcgagacgaaagggcctcgtgatacgcctatttttataggttaatgtcatgataataatggtttcttagacgtcaggtggcacttttcggggaaatgtgcgcggaacccctatttgtttatttttctaaatacattcaaatatgtatccgctcatgagacaataaccctgataaatgcttcaataatattgaaaaaggaagagtatgagtattcaacatttccgtgtcgcccttattcccttttttgcggcattttgccttcctgtttttgctcacccagaaacgctggtgaaagtaaaagatgctgaagatcagttgggtgcacgagtgggttacatcgaactggatctcaacagcggtaagatccttgagagttttcgccccgaagaacgttttccaatgatgagcacttttaaagttctgctatgtggcgcggtattatcccgtattgacgccgggcaagagcaactcggtcgccgcatacactattctcagaatgacttggttgagtactcaccagtcacagaaaagcatcttacggatggcatgacagtaagagaattatgcagtgctgccataaccatgagtgataacactgcggccaacttacttctgacaacgatcggaggaccgaaggagctaaccgcttttttgcacaacatgggggatcatgtaactcgccttgatcgttgggaaccggagctgaatgaagccataccaaacgacgagcgtgacaccacgatgcctgtagcaatggcaacaacgttgcgcaaactattaactggcgaactacttactctagcttcccggcaacaattaatagactggatggaggcggataaagttgcaggaccacttctgcgctcggcccttccggctggctggtttattgctgataaatctggagccggtgagcgtgggtctcgcggtatcattgcagcactggggccagatggtaagccctcccgtatcgtagttatctacacgacggggagtcaggcaactatggatgaacgaaatagacagatcgctgagataggtgcctcactgattaagcattggtaactgtcagaccaagtttactcatatatactttagattgatttaaaacttcatttttaatttaaaaggatctaggtgaagatcctttttgataatctcatgaccaaaatcccttaacgtgagttttcgttccactgagcgtcagaccccgtagaaaagatcaaaggatcttcttgagatcctttttttctgcgcgtaatctgctgcttgcaaacaaaaaaaccaccgctaccagcggtggtttgtttgccggatcaagagctaccaactctttttccgaaggtaactggcttcagcagagcgcagataccaaatactgttcttctagtgtagccgtagttaggccaccacttcaagaactctgtagcaccgcctacatacctcgctctgctaatcctgttaccagtggctgctgccagtggcgataagtcgtgtcttaccgggttggactcaagacgatagttaccggataaggcgcagcggtcgggctgaacggggggttcgtgcacacagcccagcttggagcgaacgacctacaccgaactgagatacctacagcgtgagctatgagaaagcgccacgcttcccgaagggagaaaggcggacaggtatccggtaagcggcagggtcggaacaggagagcgcacgagggagcttccagggggaaacgcctggtatctttatagtcctgtcgggtttcgccacctctgacttgagcgtcgatttttgtgatgctcgtcaggggggcggagcctatggaaaaacgccagcaacgcggcctttttacggttcctggccttttgctggccttttgctcacatgttctttcctgcgttatcccctgattctgtggataaccgtattaccgcctttgagtgagctgataccgctcgccgcagccgaacgaccgagcgcagcgagtcagtgagcgaggaagcggaaga

SEQ ID NO: 55 - DNA, 7971 bp, Synthetic construct
  source 1..7971: mol_type = other DNA
gcgcccaatacgcaaaccgcctctccccgcgcgttggccgattcattaatgcagctggcacgacaggtttcccgactggaaagcgggcagtgagcgcaacgcaattaatgtgagttagctcactcattaggcaccccaggctttacactttatgcttccggctcgtatgttgtgtggaattgtgagcggataacaatttcacacaggaaacagctatgaccatgattacgccaagctttgttgatacaaccataaaatgataattacacccataaattgataattatcacacccataaattgatattgcctcttcatggtctaaacttcagtaagtttacgacattttcatgaagaggtcatttccggggtacagctcgtccatgccgagagtgatcccggcggcggtcacgaactccagcaggaccatgtgatcgcgcttctcgttggggtctttgctcagggcggactgggtgctcaggtagtggttgtcgggcagcagcacggggccgtcgccgatgggggtgttctgctggtagtggtcggcgagctgcacgctgccgtcctcgatgttgtggcggatcttgaagttcaccttgatgccgttcttctgcttgtcggccatgatatagacgttgtggctgttgtagttgtactccagcttgtgccccaggatgttgccgtcctccttgaagtcgatgcccttcagctcgatgcggttcaccagggtgtcgccctcgaacttcacctcggcgcgggtcttgtagttgccgtcgtccttgaagaagatggtgcgctcctggacgtagccttcgggcatggcggacttgaagaagtcgtgctgcttcatgtggtcggggtagcggctgaagcactgcacgccgtaggtcagggtggtcacgagggtgggccagggcacgggcagcttgccggtggtgcagatgaacttcagggtcagcttgccgtaggtggcatcgccctcgccctcgccggacacgctgaacttgtggccgtttacgtcgccgtccagctcgaccaggatgggcaccaccccggtgaacagctcctcgcccttgctcactgggccaggattctcctcgacgtcaccgcatgttagcagacttcctctgccctctccactgccgaattcctttttcttttttgcctggccggcctttttcgtggccgccggccttttgtcgcctcccagctgagacaggtcgatccgtgtctcgtacaggccggtgatgctctggtggatcagggtggcgtccagcacctctttggtgctggtgtacctcttccggtcgatggtggtgtcaaagtacttgaaggcggcaggggctcccagattggtcagggtaaacaggtggatgatattctcggcctgctctctgatgggcttatcccggtgcttgttgtaggcggacagcactttgtccagattagcgtcggccaggatcactctcttggagaactcgctgatctgctcgatgatctcgtccaggtagtgcttgtgctgttccacaaacagctgtttctgctcattatcctcgggggagcccttcagcttctcatagtggctggccaggtacaggaagttcacatatttggagggcagggccagttcgtttcccttctgcagttcgccggcagaggccagcattctcttccggccgttttccagctcgaacagggagtacttaggcagcttgatgatcaggtcctttttcacttctttgtagcccttggcttccagaaagtcgatgggattcttctcgaagctgcttctttccatgatggtgatccccagcagctctttcacactcttcagtttcttggacttgcccttttccactttggccaccaccagcacagaataggccacggtggggctgtcgaagccgccgtacttcttagggtcccagtccttctttctggcgatcagcttatcgctgttcctcttgggcaggatagactctttgctgaagccgcctgtctgcacctcggtctttttcacgatattcacttggggcatgctcagcactttccgcacggtggcaaaatcccggcccttatcccacacgatctccccggtttcgccgtttgtctcgatcagaggccgcttccggatctcgccgttggccagggtaatctcggtcttgaaaaagttcatgatgttgctgtagaagaagtacttggcggtagccttgccgatttcctgctcgctcttggcgatcatcttccgcacgtcgtacaccttgtagtcgccgtacacgaactcgctttccagcttagggtactttttgatcagggcggttcccacgacggcgttcaggtaggcgtcgtgggcgtggtggtagttgttgatctcgcgcactttgtaaaactggaaatccttccggaaatcggacaccagcttggacttcagggtgatcactttcacttcccggatcagcttgtcattctcgtcgtacttagtgttcatccgggagtccaggatctgtgccacgtgctttgtgatctgccgggtttccaccagctgtctcttgatgaagccggccttatccagttcgctcaggccgcctctctcggccttggtcagattgtcgaactttctctgggtaatcagcttggcgttcagcagctgccgccagtagttcttcatcttcttcacgacctcttcggagggcacgttgtcgctcttgccccggttcttgtcgcttctggtcagcaccttgttgtcgatggagtcgtccttcagaaagctctgaggcacgatatggtccacatcgtagtcggacagccggttgatgtccagttcctggtccacgtacatatcccgcccattctgcaggtagtacaggtacagcttctcgttctgcagctgggtgttttccacggggtgttctttcaggatctggctgcccagctctttgatgccctcttcgatccgcttcattctctcgcggctgttcttctgtcccttctgggtggtctggttctctctggccatttcgatcacgatgttctcgggcttgtgccggcccatcactttcacgagctcgtccaccaccttcactgtctgcaggatgcccttcttaatggcggggctgccggccagattggcaatgtgctcgtgcaggctatcgccctggccggacacctgggctttctggatgtcctctttaaaggtcaggctgtcgtcgtggatcagctgcatgaagtttctgttggcgaagccgtcggacttcaggaaatccaggattgtcttgccggactgcttgtcccggatgccgttgatcagcttccggctcagcctgccccagccggtgtatctccgccgcttcagctgcttcatcactttgtcgtcgaacaggtgggcataggttttcagccgttcctcgatcatctctctgtcctcaaacagtgtcagggtcagcacgatatcttccagaatgtcctcgttttcctcattgtccaggaagtccttgtccttgataattttcagcagatcgtggtatgtgcccagggaggcgttgaaccgatcttccacgccggagatttccacggagtcgaagcactcgattttcttgaagtagtcctctttcagctgcttcacggtcactttccggttggtcttgaacagcaggtccacgatggcctttttctgctcgccgctcaggaaggcgggctttctcattccctcggtcacgtatttcactttggtcagctcgttatacacggtgaagtactcgtacagcaggctgtgcttgggcagcaccttctcgttgggcaggttcttatcgaagttggtcatccgctcgatgaagctctgggcggaagcgcccttgtccaccacttcctcgaagttccagggggtgatggtttcctcgctctttctggtcatccaggcgaatctgctgtttcccctggccagagggcccacgtagtaggggatgcggaaggtcaggatcttctcgatcttttcccggttgtccttcaggaatgggtaaaaatcttcctgccgccgcagaatggcgtgcagctctcccaggtggatctggtgggggatgctgccgttgtcgaaggtccgctgcttccgcagcaggtcctctctgttcagcttcacgagcagttcctcggtgccgtccatcttttccaggatgggcttgatgaacttgtagaactcttcctggctggctccgccgtcaatgtagccggcgtagccgttcttgctctggtcgaagaaaatctctttgtacttctcaggcagctgctgccgcacgagagctttcagcagggtcaggtcctggtggtgctcgtcgtatctcttgatcatagaggcgctcaggggggccttggtgatctcggtgttcactctcaggatgtcgctcagcaggatggcgtcggacaggttcttggcggccagaaacaggtcggcgtactggtcgccgatctgggccagcaggttgtccaggtcgtcgtcgtaggtgtccttgctcagctgcagtttggcatcctcggccaggtcgaagttgctcttgaagttgggggtcaggcccaggctcagggcaatcaggtttccgaacaggccattcttcttctcgccgggcagctgggcgatcagattttccagccgtctgctcttgctcagtctggcagacaggatggccttggcgtccacgccgctggcgttgatggggttttcctcgaacagctggttgtaggtctgcaccagctggatgaacagcttgtccacgtcgctgttgtcggggttcaggtcgccctcgatcaggaagtggccccggaacttgatcatgtgggccagggccagatagatcagccgcaggtcggccttgtcggtgctgtccaccagtttctttctcaggtggtagatggtggggtacttctcgtggtaggccacctcgtccacgatgttgccgaagatggggtgccgctcgtgcttcttatcctcttccaccaggaaggactcttccagtctgtggaagaagctgtcgtccaccttggccatctcgttgctgaagatctcttgcagatagcagatccggttcttccgtctggtgtatcttcttctggcggttctcttcagccgggtggcctcggctgtttcgccgctgtcgaacagcagggctccgatcaggttcttcttgatgctgtgccggtcggtgttgcccagcaccttgaatttcttgctgggcaccttgtactcgtcggtgatcacggcccagcccacagagttggtgccgatgtccaggccgatgctgtacttcttgtcggctgctgggactccgtggataccgaccttccgcttcttctttggggccatcttatcgtcatcgtctttgtaatcaatatcatgatccttgtagtctccgtcgtggtccagtccttactgcagtagttttgctgaaatactcgattcacaaaaatatcaacttatggttgttttgtgagatatcaatatatggttgttttgtggttaagttgctgattataaataattattaaatatcactttatggttgcatcaacaggtaccgagctcgaattcactggccgtcgttttacaacgtcgtgactgggaaaaccctggcgttacccaacttaatcgccttgcagcacatccccctttcgccagctggcgtaatagcgaagaggcccgcaccgatcgcccttcccaacagttgcgcagcctgaatggcgaatggcgcctgatgcggtattttctccttacgcatctgtgcggtatttcacaccgcatatggtgcactctcagtacaatctgctctgatgccgcatagttaagccagccccgacacccgccaacacccgctgacgcgccctgacgggcttgtctgctcccggcatccgcttacagacaagctgtgaccgtctccgggagctgcatgtgtcagaggttttcaccgtcatcaccgaaacgcgcgagacgaaagggcctcgtgatacgcctatttttataggttaatgtcatgataataatggtttcttagacgtcaggtggcacttttcggggaaatgtgcgcggaacccctatttgtttatttttctaaatacattcaaatatgtatccgctcatgagacaataaccctgataaatgcttcaataatattgaaaaaggaagagtatgagtattcaacatttccgtgtcgcccttattcccttttttgcggcattttgccttcctgtttttgctcacccagaaacgctggtgaaagtaaaagatgctgaagatcagttgggtgcacgagtgggttacatcgaactggatctcaacagcggtaagatccttgagagttttcgccccgaagaacgttttccaatgatgagcacttttaaagttctgctatgtggcgcggtattatcccgtattgacgccgggcaagagcaactcggtcgccgcatacactattctcagaatgacttggttgagtactcaccagtcacagaaaagcatcttacggatggcatgacagtaagagaattatgcagtgctgccataaccatgagtgataacactgcggccaacttacttctgacaacgatcggaggaccgaaggagctaaccgcttttttgcacaacatgggggatcatgtaactcgccttgatcgttgggaaccggagctgaatgaagccataccaaacgacgagcgtgacaccacgatgcctgtagcaatggcaacaacgttgcgcaaactattaactggcgaactacttactctagcttcccggcaacaattaatagactggatggaggcggataaagttgcaggaccacttctgcgctcggcccttccggctggctggtttattgctgataaatctggagccggtgagcgtgggtctcgcggtatcattgcagcactggggccagatggtaagccctcccgtatcgtagttatctacacgacggggagtcaggcaactatggatgaacgaaatagacagatcgctgagataggtgcctcactgattaagcattggtaactgtcagaccaagtttactcatatatactttagattgatttaaaacttcatttttaatttaaaaggatctaggtgaagatcctttttgataatctcatgaccaaaatcccttaacgtgagttttcgttccactgagcgtcagaccccgtagaaaagatcaaaggatcttcttgagatcctttttttctgcgcgtaatctgctgcttgcaaacaaaaaaaccaccgctaccagcggtggtttgtttgccggatcaagagctaccaactctttttccgaaggtaactggcttcagcagagcgcagataccaaatactgttcttctagtgtagccgtagttaggccaccacttcaagaactctgtagcaccgcctacatacctcgctctgctaatcctgttaccagtggctgctgccagtggcgataagtcgtgtcttaccgggttggactcaagacgatagttaccggataaggcgcagcggtcgggctgaacggggggttcgtgcacacagcccagcttggagcgaacgacctacaccgaactgagatacctacagcgtgagctatgagaaagcgccacgcttcccgaagggagaaaggcggacaggtatccggtaagcggcagggtcggaacaggagagcgcacgagggagcttccagggggaaacgcctggtatctttatagtcctgtcgggtttcgccacctctgacttgagcgtcgatttttgtgatgctcgtcaggggggcggagcctatggaaaaacgccagcaacgcggcctttttacggttcctggccttttgctggccttttgctcacatgttctttcctgcgttatcccctgattctgtggataaccgtattaccgcctttgagtgagctgataccgctcgccgcagccgaacgaccgagcgcagcgagtcagtgagcgaggaagcggaaga

SEQ ID NO: 56 - DNA, 12789 bp, Synthetic construct
  source 1..12789: mol_type = other DNA
gcgcccaatacgcaaaccgcctctccccgcgcgttggccgattcattaatgcagctggcacgacaggtttcccgactggaaagcgggcagtgagcgcaacgcaattaatgtgagttagctcactcattaggcaccccaggctttacactttatgcttccggctcgtatgttgtgtggaattgtgagcggataacaatttcacacaggaaacagctatgaccatgattacgccaagctttgttgatacaaccataaaatgataattacacccataaattgataattatcacacccataaattgatattgcctcttcatggtctaaacttcagtaagtttacgacattttcatgaagaggtcatttccggggtacagctcgtccatgccgagagtgatcccggcggcggtcacgaactccagcaggaccatgtgatcgcgcttctcgttggggtctttgctcagggcggactgggtgctcaggtagtggttgtcgggcagcagcacggggccgtcgccgatgggggtgttctgctggtagtggtcggcgagctgcacgctgccgtcctcgatgttgtggcggatcttgaagttcaccttgatgccgttcttctgcttgtcggccatgatatagacgttgtggctgttgtagttgtactccagcttgtgccccaggatgttgccgtcctccttgaagtcgatgcccttcagctcgatgcggttcaccagggtgtcgccctcgaacttcacctcggcgcgggtcttgtagttgccgtcgtccttgaagaagatggtgcgctcctggacgtagccttcgggcatggcggacttgaagaagtcgtgctgcttcatgtggtcggggtagcggctgaagcactgcacgccgtaggtcagggtggtcacgagggtgggccagggcacgggcagcttgccggtggtgcagatgaacttcagggtcagcttgccgtaggtggcatcgccctcgccctcgccggacacgctgaacttgtggccgtttacgtcgccgtccagctcgaccaggatgggcaccaccccggtgaacagctcctcgcccttgctcactgggccaggattctcctcgacgtcaccgcatgttagcagacttcctctgccctctccactgccgaattcctttttcttttttgcctggccggcctttttcgtggccgccggccttttgtcgcctcccagctgagacaggtcgatccgtgtctcgtacaggccggtgatgctctggtggatcagggtggcgtccagcacctctttggtgctggtgtacctcttccggtcgatggtggtgtcaaagtacttgaaggcggcaggggctcccagattggtcagggtaaacaggtggatgatattctcggcctgctctctgatgggcttatcccggtgcttgttgtaggcggacagcactttgtccagattagcgtcggccaggatcactctcttggagaactcgctgatctgctcgatgatctcgtccaggtagtgcttgtgctgttccacaaacagctgtttctgctcattatcctcgggggagcccttcagcttctcatagtggctggccaggtacaggaagttcacatatttggagggcagggccagttcgtttcccttctgcagttcgccggcagaggccagcattctcttccggccgttttccagctcgaacagggagtacttaggcagcttgatgatcaggtcctttttcacttctttgtagcccttggcttccagaaagtcgatgggattcttctcgaagctgcttctttccatgatggtgatccccagcagctctttcacactcttcagtttcttggacttgcccttttccactttggccaccaccagcacagaataggccacggtggggctgtcgaagccgccgtacttcttagggtcccagtccttctttctggcgatcagcttatcgctgttcctcttgggcaggatagactctttgctgaagccgcctgtctgcacctcggtctttttcacgatattcacttggggcatgctcagcactttccgcacggtggcaaaatcccggcccttatcccacacgatctccccggtttcgccgtttgtctcgatcagaggccgcttccggatctcgccgttggccagggtaatctcggtcttgaaaaagttcatgatgttgctgtagaagaagtacttggcggtagccttgccgatttcctgctcgctcttggcgatcatcttccgcacgtcgtacaccttgtagtcgccgtacacgaactcgctttccagcttagggtactttttgatcagggcggttcccacgacggcgttcaggtaggcgtcgtgggcgtggtggtagttgttgatctcgcgcactttgtaaaactggaaatccttccggaaatcggacaccagcttggacttcagggtgatcactttcacttcccggatcagcttgtcattctcgtcgtacttagtgttcatccgggagtccaggatctgtgccacagccctcccacacataaccagagggcagcaattcacgaatcccaactgccgtcggctgtccatcactgtccttcactatggctttgatcccaggatgcagatcgagaagcacctgtcggcaccgtccgcaggggctcaagatgcccctgttctcatttccgatcgcgacgatacaagtcaggttgccagctgccgcagcagcagcagtgcccagcaccacgagttctgcacaaggtcccccagtaaaatgatatacattgacaccagtgaagatgcggccgtcgctagagagagctgcgctggcgacgctgtagtcttcagagatggggatgctgttgattgtagccgttgctctttcaatgagggtggattcttcttgagacaaaggcttggccatcggtccaggattctcttcgacatctccggcttgtttcagcagagagaagtttgttgcgccggatccggcatagtcggggacatcatatgggtatgcataatcaggcacgtcgtagggataagcgtaatctggaacatcgtatgggtatttcttcttcttagcctgtccagccttctttgtggcggcaggtcgcttggatcccttgtacagctcatccataccgagagtgatgcctgcggcagtcacaaattccagaaggaccatgtgatctctcttttcgtttgggtccttggaaagctttgattgcgtggagagataatgattgtcaggcaagagtacaggtccatctccgatgggcgtattttgttggtaatgatcagccagttgaacactaccatcttcgacattatgtcggatcttaaagttggcctttatcccatttttctgcttatcagcggtaatatacacattatggctgttaaagttgtactccaacttgtgccccagtatgttaccgtcctccttaaaatcaatacctttcagttcaattcgattaaccagagtgtccccttcaaatttaacctcggctcgggttttatatgtaccatcatccttaaagctgatggtcctttcttgaacataaccttcaggcattgcagacttgaaaaagtcatgctgtttcatgtggtcgggatatcgagaaaagcattgcacgccgtaggtgagggtcgttacgagtgtaggccatgggacgggcagtttgcccgtcgtacagatgaatttcagagtcagcttaccattcgtggcgtccccttcgccttcgcccctgacggagaatttatgtccatttacatctccatcaagctctaccagaatgggcactactccagtgaagagttcttcacctttactcacgctacctcctcctccgcttcctcctcctccgcttccacctcctccttccagggccttgtactcgaacatgactttcacgagttcgcacagttcctcgctgttccggtcggtcatcagtttctttttcttcagattcttcaggtgcacgatcttctctgattccagggtctggatttcgatcttcttgtcagcgccgatcttgaaggtggccacgaagccgtattctttcagaatgtccacgatggacttcatgatggcgttcttcagcttccggtcgtaggacagcagcttccgcaggttttccagcacttccagcaggctaatctcggcgtgggggatgtagttgaagtgggcaatgtagttccggatgtacaggtcctttttttcctgcttcagtttcttcactttcttgtcggagtagatgctccgcttttccacattgtccttgtacagttctttgtagaagttgatatacttttccacgatctggccgcttttgtacttcacattcttggagttgtcgaaattgaaaatttcctcgatgtagtggttctcgggaaactcgcccttcagccggaatctcaggtcccgctcccagatgctggtgtagcccacgagccggtgcaggatcttcagcagcaggccctgcagcaggttcagctcattgaattccaccttgttcttcaggtgggtgtacttctggatgttgccgatggccttctcatactctttgtagtcctcgtcgttgaacttttcgtccttcttgggtctggcgtacttccggtgcaggttctgctgcatggtgtagttcttttcaatctcattcttcttgttgctgtactctttcagttctttcaggctgatcttatacttggccttatcggcgatcttttccagcagattcagcatgccgtatttcttgatattgtagaaggcccggtgcttgatgatgttctcgccgtcgaaatagatcttgttggtgtcgaactttttcagctctttccggtccttgattttgttttcgttgaagtccaggaacttgccgatctcgttggcttccagctcgaagtcctcggtcactctgttgttgtccaggttcagcaggttgatcagttccaactcgtcgctgaaggtttcttctttgttggcggactggtacttttccaggctgcccttcaggttggtcagctctttgtggttcagcagcttcaggatcaggtaaaacatgttcagattctcggtgtacttcagaatcttccccagcttgatctcgcgcacgaactcattgatctcgtgagggatttctttgttccgattgtgcttctcatagttcttcaggatcttgtcgtacttctctttgttatcctttttgatcttgatcttggagaagatgtcgttgttgtcattgttgttgttgctctcgatatacttcagattgttcttgttcaggtagtcgatgaagcccttcaggaaaatctgctgaataaagtcgatgtaggtattcttttcctctttgtcctggttgttgatcatctctctgctctggatgatggccaggtattccacgggcacggttttctcgatgttctcgaacttctgatacttgtagtggccggttttctggttccgctgcttgttaatcttgatcacttcattggtgatcttaaagaacaccttggagtttttcacgaacttgttcaggaactcgccgtagtagatattcttcagcaggtagatctgggcgtccttctcttctttgtccttgggcacgctccaaaaaaacttcagggtattccgcaggtcctcaatcttgttgtacagcttggtgaagctgggcacgaaggggatgtttttgttcacgaagttgaacttggtattcttcaggtacttgatgatcacatccttctcgtagtagttgaacacgttggcgctgttcagctgcttgaagattttcagcttcagcttcttttcgttgatttcgttctgaaacatcttcttggagatctcgctgggggcgatattcttgaaggcgaagatgtccttgccttccagttccaggttgaagtgcacgatgccgtgtctgatgctgctgatggcctcgtcgatgttggcgaagaagtcctcgatctcgttcttgttgtccatgttgaagtcgtagctgtagaacatcttcagattttctttcacttcgttctgcttgttctcattgtagatcttgtccacctcgccggacacgtatttctcttcgcccttgttgttcttcacggtcttgccccgcatccggccggtgataccgttctcgttctcggtttccaggatgttcctcaggctgaagtaggccacgctggacacgccgatgatgtttctcaggaaggcctcgttctgccggttccgggcgataaagtcggaggtggcgatctcgcccacttgcagatagtagttgtacttgccgcagttccgcacgtaggtgtccagcttgttcagcagtttgttttcgatcagctttttcagattctggtactcgaagatccgcttgatcttatcgttgctgatgttgctcagccgcttgtacacgtagtttttcagcagctgggacatctcgatttccacgaagtggcagaaggcgtacttaatattcttgtcgttcagttcctctttgtccaggtagtacttgtagaacacctggcttttcttcagctcagacatgtcggggatcttctcaatcagctctttgatgttgttcacgttctggatctcttcgtagataatcttggcgaagttctctttgtcgttcttccggccgatgatcttgtgatagtactcgcggatcttgtacttctcgtgcttcttgctgttctcgatcaggaaaaacagtttctcgatatcctctttcttatacagcttgtcgaaggcttcctgcacgttgttgatgtagtcgttgcgcttggcgctctctctgtagtagtcgtagatgatgttccgcttgctcttgccgcccactttttccacgttgttctcgttgatcttctggtagttggccttgttctcttcgaagctgtacttcaggctgttgatcttgttcagcttggcttccacgtccttccgaaagatttccagttcctcagagttcacgtcctcgttcagcaggatcttcttcagcacggagaagctgttcttgtttttcaggtcgtactcgctgatgtcctcttcgctatagttcttgtcctgcacggcgttcttttctttccggttcttcagatacagcacgctgtccttcaggtgcagcaccttgttgctaaagaacttcttcaggttctctcttctgatccggttctcttcctcggaggcgttgtcggggttcttgatgtagatgtccagccggatgctcagcagctcgctcagtctctcgctggtccggttttcctcgctggtggacttcacgagcttgccctcttcgatgtacttcttgtggctgatgccgtcgaccttggtcactttcatggatcgtgctttgtgatctgccgggtttccaccagctgtctcttgatgaagccggccttatccagttcgctcaggccgcctctctcggccttggtcagattgtcgaactttctctgggtaatcagcttggcgttcagcagctgccgccagtagttcttcatcttcttcacgacctcttcggagggcacgttgtcgctcttgccccggttcttgtcgcttctggtcagcaccttgttgtcgatggagtcgtccttcagaaagctctgaggcacgatatggtccacatcgtagtcggacagccggttgatgtccagttcctggtccacgtacatatcccgcccattctgcaggtagtacaggtacagcttctcgttctgcagctgggtgttttccacggggtgttctttcaggatctggctgcccagctctttgatgccctcttcgatccgcttcattctctcgcggctgttcttctgtcccttctgggtggtctggttctctctggccatttcgatcacgatgttctcgggcttgtgccggcccatcactttcacgagctcgtccaccaccttcactgtctgcaggatgcccttcttaatggcggggctgccggccagattggcaatgtgctcgtgcaggctatcgccctggccggacacctgggctttctggatgtcctctttaaaggtcaggctgtcgtcgtggatcagctgcatgaagtttctgttggcgaagccgtcggacttcaggaaatccaggattgtcttgccggactgcttgtcccggatgccgttgatcagcttccggctcagcctgccccagccggtgtatctccgccgcttcagctgcttcatcactttgtcgtcgaacaggtgggcataggttttcagccgttcctcgatcatctctctgtcctcaaacagtgtcagggtcagcacgatatcttccagaatgtcctcgttttcctcattgtccaggaagtccttgtccttgataattttcagcagatcgtggtatgtgcccagggaggcgttgaaccgatcttccacgccggagatttccacggagtcgaagcactcgattttcttgaagtagtcctctttcagctgcttcacggtcactttccggttggtcttgaacagcaggtccacgatggcctttttctgctcgccgctcaggaaggcgggctttctcattccctcggtcacgtatttcactttggtcagctcgttatacacggtgaagtactcgtacagcaggctgtgcttgggcagcaccttctcgttgggcaggttcttatcgaagttggtcatccgctcgatgaagctctgggcggaagcgcccttgtccaccacttcctcgaagttccagggggtgatggtttcctcgctctttctggtcatccaggcgaatctgctgtttcccctggccagagggcccacgtagtaggggatgcggaaggtcaggatcttctcgatcttttcccggttgtccttcaggaatgggtaaaaatcttcctgccgccgcagaatggcgtgcagctctcccaggtggatctggtgggggatgctgccgttgtcgaaggtccgctgcttccgcagcaggtcctctctgttcagcttcacgagcagttcctcggtgccgtccatcttttccaggatgggcttgatgaacttgtagaactcttcctggctggctccgccgtcaatgtagccggcgtagccgttcttgctctggtcgaagaaaatctctttgtacttctcaggcagctgctgccgcacgagagctttcagcagggtcaggtcctggtggtgctcgtcgtatctcttgatcatagaggcgctcaggggggccttggtgatctcggtgttcactctcaggatgtcgctcagcaggatggcgtcggacaggttcttggcggccagaaacaggtcggcgtactggtcgccgatctgggccagcaggttgtccaggtcgtcgtcgtaggtgtccttgctcagctgcagtttggcatcctcggccaggtcgaagttgctcttgaagttgggggtcaggcccaggctcagggcaatcaggtttccgaacaggccattcttcttctcgccgggcagctgggcgatcagattttccagccgtctgctcttgctcagtctggcagacaggatggccttggcgtccacgccgctggcgttgatggggttttcctcgaacagctggttgtaggtctgcaccagctggatgaacagcttgtccacgtcgctgttgtcggggttcaggtcgccctcgatcaggaagtggccccggaacttgatcatgtgggccagggccagatagatcagccgcaggtcggccttgtcggtgctgtccaccagtttctttctcaggtggtagatggtggggtacttctcgtggtaggccacctcgtccacgatgttgccgaagatggggtgccgctcgtgcttcttatcctcttccaccaggaaggactcttccagtctgtggaagaagctgtcgtccaccttggccatctcgttgctgaagatctcttgcagatagcagatccggttcttccgtctggtgtatcttcttctggcggttctcttcagccgggtggcctcggctgtttcgccgctgtcgaacagcagggctccgatcaggttcttcttgatgctgtgccggtcggtgttgcccagcaccttgaatttcttgctgggcaccttgtactcgtcggtgatcacggcccagcccacagagttggtgccgatgtccaggccgatgctgtacttcttgtcggctgctgggactccgtggataccgaccttccgcttcttctttggggccatcttatcgtcatcgtctttgtaatcaatatcatgatccttgtagtctccgtcgtggtccagtccttactgcagtagttttgctgaaatactcgattcacaaaaatatcaacttatggttgttttgtgagatatcaatatatggttgttttgtggttaagttgctgattataaataattattaaatatcactttatggttgcatcaacaggtaccgagctcgaattcactggccgtcgttttacaacgtcgtgactgggaaaaccctggcgttacccaacttaatcgccttgcagcacatccccctttcgccagctggcgtaatagcgaagaggcccgcaccgatcgcccttcccaacagttgcgcagcctgaatggcgaatggcgcctgatgcggtattttctccttacgcatctgtgcggtatttcacaccgcatatggtgcactctcagtacaatctgctctgatgccgcatagttaagccagccccgacacccgccaacacccgctgacgcgccctgacgggcttgtctgctcccggcatccgcttacagacaagctgtgaccgtctccgggagctgcatgtgtcagaggttttcaccgtcatcaccgaaacgcgcgagacgaaagggcctcgtgatacgcctatttttataggttaatgtcatgataataatggtttcttagacgtcaggtggcacttttcggggaaatgtgcgcggaacccctatttgtttatttttctaaatacattcaaatatgtatccgctcatgagacaataaccctgataaatgcttcaataatattgaaaaaggaagagtatgagtattcaacatttccgtgtcgcccttattcccttttttgcggcattttgccttcctgtttttgctcacccagaaacgctggtgaaagtaaaagatgctgaagatcagttgggtgcacgagtgggttacatcgaactggatctcaacagcggtaagatccttgagagttttcgccccgaagaacgttttccaatgatgagcacttttaaagttctgctatgtggcgcggtattatcccgtattgacgccgggcaagagcaactcggtcgccgcatacactattctcagaatgacttggttgagtactcaccagtcacagaaaagcatcttacggatggcatgacagtaagagaattatgcagtgctgccataaccatgagtgataacactgcggccaacttacttctgacaacgatcggaggaccgaaggagctaaccgcttttttgcacaacatgggggatcatgtaactcgccttgatcgttgggaaccggagctgaatgaagccataccaaacgacgagcgtgacaccacgatgcctgtagcaatggcaacaacgttgcgcaaactattaactggcgaactacttactctagcttcccggcaacaattaatagactggatggaggcggataaagttgcaggaccacttctgcgctcggcccttccggctggctggtttattgctgataaatctggagccggtgagcgtgggtctcgcggtatcattgcagcactggggccagatggtaagccctcccgtatcgtagttatctacacgacggggagtcaggcaactatggatgaacgaaatagacagatcgctgagataggtgcctcactgattaagcattggtaactgtcagaccaagtttactcatatatactttagattgatttaaaacttcatttttaatttaaaaggatctaggtgaagatcctttttgataatctcatgaccaaaatcccttaacgtgagttttcgttccactgagcgtcagaccccgtagaaaagatcaaaggatcttcttgagatcctttttttctgcgcgtaatctgctgcttgcaaacaaaaaaaccaccgctaccagcggtggtttgtttgccggatcaagagctaccaactctttttccgaaggtaactggcttcagcagagcgcagataccaaatactgttcttctagtgtagccgtagttaggccaccacttcaagaactctgtagcaccgcctacatacctcgctctgctaatcctgttaccagtggctgctgccagtggcgataagtcgtgtcttaccgggttggactcaagacgatagttaccggataaggcgcagcggtcgggctgaacggggggttcgtgcacacagcccagcttggagcgaacgacctacaccgaactgagatacctacagcgtgagctatgagaaagcgccacgcttcccgaagggagaaaggcggacaggtatccggtaagcggcagggtcggaacaggagagcgcacgagggagcttccagggggaaacgcctggtatctttatagtcctgtcgggtttcgccacctctgacttgagcgtcgatttttgtgatgctcgtcaggggggcggagcctatggaaaaacgccagcaacgcggcctttttacggttcctggccttttgctggccttttgctcacatgttctttcctgcgttatcccctgattctgtggataaccgtattaccgcctttgagtgagctgataccgctcgccgcagccgaacgaccgagcgcagcgagtcagtgagcgaggaagcggaaga

SEQ ID NO: 57 - DNA, 3633 bp, Synthetic construct
  source 1..3633: mol_type = other DNA
attgcagcactggggccagatggtaagccctcccgtatcgtagttatctacacgacggggagtcaggcaactatggatgaacgaaatagacagatcgctgagataggtgcctcactgattaagcattggtaactgtcagaccaagtttactcatatatactttagattgatttaaaacttcatttttaatttaaaaggatctaggtgaagatcctttttgataatctcatgaccaaaatcccttaacgtgagttttcgttccactgagcgtcagaccccgtagaaaagatcaaaggatcttcttgagatcctttttttctgcgcgtaatctgctgcttgcaaacaaaaaaaccaccgctaccagcggtggtttgtttgccggatcaagagctaccaactctttttccgaaggtaactggcttcagcagagcgcagataccaaatactgttcttctagtgtagccgtagttaggccaccacttcaagaactctgtagcaccgcctacatacctcgctctgctaatcctgttaccagtggctgctgccagtggcgataagtcgtgtcttaccgggttggactcaagacgatagttaccggataaggcgcagcggtcgggctgaacggggggttcgtgcacacagcccagcttggagcgaacgacctacaccgaactgagatacctacagcgtgagctatgagaaagcgccacgcttcccgaagggagaaaggcggacaggtatccggtaagcggcagggtcggaacaggagagcgcacgagggagcttccagggggaaacgcctggtatctttatagtcctgtcgggtttcgccacctctgacttgagcgtcgatttttgtgatgctcgtcaggggggcggagcctatggaaaaacgccagcaacgcggcctttttacggttcctggccttttgctggccttttgctcacatgttctttcctgcgttatcccctgattctgtggataaccgtattaccgcctttgagtgagctgataccgctcgccgcagccgaacgaccgagcgcagcgagtcagtgagcgaggaagcggaagagcgcccaatacgcaaaccgcctctccccgcgcgttggccgattcattaatgcagctggcacgacaggtttcccgactggaaagcgggcagtgagcgcaacgcaattaatgtgagttagctcactcattaggcaccccaggctttacactttatgcttccggctcgtatgttgtgtggaattgtgagcggataacaatttcacacaggaaacagctatgaccatgattacgccaagctttgttgatacaaccataaaatgataattacacccataaattgataattatcacacccataaattgatattgcctcttcatggtctaaacttcagtaagtttacgacattttcatgaagaggtcatttcaggaggtaaataatggagaaaaaaatcactggatataccaccgttgatatatcccaatggcatcgtaaagaacattttgaggcatttcagtcagttgctcaatgtacctataaccagaccgttcagctggatattacggcctttttaaagaccgtaaagaaaaataagcacaagttttatccggcctttattcacattcttgcccgcctgatgaatgctcatccggagttccgtatggcaatgaaagacggtgagctggtgatatgggatagtgttcacccttgttacaccgttttccatgagcaaactgaaacgttttcatcgctctggagtgaataccacgacgatttccggcagtttctacacatatattcgcaagatgtggcgtgttacggtgaaaacctggcctatttccctaaagggtttattgagaatatgtttttcgtctcagccaatccctgggtgagtttcaccagttttgatttaaacgtggccaatatggacaacttcttcgcccccgttttcactatgggcaaatattatacgcaaggcgacaaggtgctgatgccgctggcgattcaggttcatcatgccgtttgtgatggcttccatgtcggcagaatgcttaatgaattacaacagtactgcgatgagtggcagggcggggcgtaatttttttaaggcagttattggtgcccttctagagtccttactgcagtagttttgctgaaatactcgattcacaaaaatatcaacttatggttgttttgtgagatatcaatatatggttgttttgtggttaagttgctgattataaataattattaaatatcactttatggttgcatcaacaggtaccgagctcgaattcactggccgtcgttttacaacgtcgtgactgggaaaaccctggcgttacccaacttaatcgccttgcagcacatccccctttcgccagctggcgtaatagcgaagaggcccgcaccgatcgcccttcccaacagttgcgcagcctgaatggcgaatggcgcctgatgcggtattttctccttacgcatctgtgcggtatttcacaccgcatatggtgcactctcagtacaatctgctctgatgccgcatagttaagccagccccgacacccgccaacacccgctgacgcgccctgacgggcttgtctgctcccggcatccgcttacagacaagctgtgaccgtctccgggagctgcatgtgtcagaggttttcaccgtcatcaccgaaacgcgcgagacgaaagggcctcgtgatacgcctatttttataggttaatgtcatgataataatggtttcttagacgtcaggtggcacttttcggggaaatgtgcgcggaacccctatttgtttatttttctaaatacattcaaatatgtatccgctcatgagacaataaccctgataaatgcttcaataatattgaaaaaggaagagtatgagtattcaacatttccgtgtcgcccttattcccttttttgcggcattttgccttcctgtttttgctcacccagaaacgctggtgaaagtaaaagatgctgaagatcagttgggtgcacgagtgggttacatcgaactggatctcaacagcggtaagatccttgagagttttcgccccgaagaacgttttccaatgatgagcacttttaaagttctgctatgtggcgcggtattatcccgtattgacgccgggcaagagcaactcggtcgccgcatacactattctcagaatgacttggttgagtactcaccagtcacagaaaagcatcttacggatggcatgacagtaagagaattatgcagtgctgccataaccatgagtgataacactgcggccaacttacttctgacaacgatcggaggaccgaaggagctaaccgcttttttgcacaacatgggggatcatgtaactcgccttgatcgttgggaaccggagctgaatgaagccataccaaacgacgagcgtgacaccacgatgcctgtagcaatggcaacaacgttgcgcaaactattaactggcgaactacttactctagcttcccggcaacaattaatagactggatggaggcggataaagttgcaggaccacttctgcgctcggcccttccggctggctggtttattgctgataaatctggagccggtgagcgtgggtctcgcggtatc

SEQ ID NO: 58 - DNA, 3613 bp, Synthetic construct
  source 1..3613: mol_type = other DNA
attgcagcactggggccagatggtaagccctcccgtatcgtagttatctacacgacggggagtcaggcaactatggatgaacgaaatagacagatcgctgagataggtgcctcactgattaagcattggtaactgtcagaccaagtttactcatatatactttagattgatttaaaacttcatttttaatttaaaaggatctaggtgaagatcctttttgataatctcatgaccaaaatcccttaacgtgagttttcgttccactgagcgtcagaccccgtagaaaagatcaaaggatcttcttgagatcctttttttctgcgcgtaatctgctgcttgcaaacaaaaaaaccaccgctaccagcggtggtttgtttgccggatcaagagctaccaactctttttccgaaggtaactggcttcagcagagcgcagataccaaatactgttcttctagtgtagccgtagttaggccaccacttcaagaactctgtagcaccgcctacatacctcgctctgctaatcctgttaccagtggctgctgccagtggcgataagtcgtgtcttaccgggttggactcaagacgatagttaccggataaggcgcagcggtcgggctgaacggggggttcgtgcacacagcccagcttggagcgaacgacctacaccgaactgagatacctacagcgtgagctatgagaaagcgccacgcttcccgaagggagaaaggcggacaggtatccggtaagcggcagggtcggaacaggagagcgcacgagggagcttccagggggaaacgcctggtatctttatagtcctgtcgggtttcgccacctctgacttgagcgtcgatttttgtgatgctcgtcaggggggcggagcctatggaaaaacgccagcaacgcggcctttttacggttcctggccttttgctggccttttgctcacatgttctttcctgcgttatcccctgattctgtggataaccgtattaccgcctttgagtgagctgataccgctcgccgcagccgaacgaccgagcgcagcgagtcagtgagcgaggaagcggaagagcgcccaatacgcaaaccgcctctccccgcgcgttggccgattcattaatgcagctggcacgacaggtttcccgactggaaagcgggcagtgagcgcaacgcaattaatgtgagttagctcactcattaggcaccccaggctttacactttatgcttccggctcgtatgttgtgtggaattgtgagcggataacaatttcacacaggaaacagctatgaccatgattacgccaagctttgttgatacaaccataaaatgataattacacccataaattgataattatcacacccataaattgatattgcctcttcatggtctaaacttcagtaagtttacgacataggaggtaaataatggagaaaaaaatcactggatataccaccgttgatatatcccaatggcatcgtaaagaacattttgaggcatttcagtcagttgctcaatgtacctataaccagaccgttcagctggatattacggcctttttaaagaccgtaaagaaaaataagcacaagttttatccggcctttattcacattcttgcccgcctgatgaatgctcatccggagttccgtatggcaatgaaagacggtgagctggtgatatgggatagtgttcacccttgttacaccgttttccatgagcaaactgaaacgttttcatcgctctggagtgaataccacgacgatttccggcagtttctacacatatattcgcaagatgtggcgtgttacggtgaaaacctggcctatttccctaaagggtttattgagaatatgtttttcgtctcagccaatccctgggtgagtttcaccagttttgatttaaacgtggccaatatggacaacttcttcgcccccgttttcactatgggcaaatattatacgcaaggcgacaaggtgctgatgccgctggcgattcaggttcatcatgccgtttgtgatggcttccatgtcggcagaatgcttaatgaattacaacagtactgcgatgagtggcagggcggggcgtaatttttttaaggcagttattggtgcccttctagagtccttactgcagtagttttgctgaaatactcgattcacaaaaatatcaacttatggttgttttgtgagatatcaatatatggttgttttgtggttaagttgctgattataaataattattaaatatcactttatggttgcatcaacaggtaccgagctcgaattcactggccgtcgttttacaacgtcgtgactgggaaaaccctggcgttacccaacttaatcgccttgcagcacatccccctttcgccagctggcgtaatagcgaagaggcccgcaccgatcgcccttcccaacagttgcgcagcctgaatggcgaatggcgcctgatgcggtattttctccttacgcatctgtgcggtatttcacaccgcatatggtgcactctcagtacaatctgctctgatgccgcatagttaagccagccccgacacccgccaacacccgctgacgcgccctgacgggcttgtctgctcccggcatccgcttacagacaagctgtgaccgtctccgggagctgcatgtgtcagaggttttcaccgtcatcaccgaaacgcgcgagacgaaagggcctcgtgatacgcctatttttataggttaatgtcatgataataatggtttcttagacgtcaggtggcacttttcggggaaatgtgcgcggaacccctatttgtttatttttctaaatacattcaaatatgtatccgctcatgagacaataaccctgataaatgcttcaataatattgaaaaaggaagagtatgagtattcaacatttccgtgtcgcccttattcccttttttgcggcattttgccttcctgtttttgctcacccagaaacgctggtgaaagtaaaagatgctgaagatcagttgggtgcacgagtgggttacatcgaactggatctcaacagcggtaagatccttgagagttttcgccccgaagaacgttttccaatgatgagcacttttaaagttctgctatgtggcgcggtattatcccgtattgacgccgggcaagagcaactcggtcgccgcatacactattctcagaatgacttggttgagtactcaccagtcacagaaaagcatcttacggatggcatgacagtaagagaattatgcagtgctgccataaccatgagtgataacactgcggccaacttacttctgacaacgatcggaggaccgaaggagctaaccgcttttttgcacaacatgggggatcatgtaactcgccttgatcgttgggaaccggagctgaatgaagccataccaaacgacgagcgtgacaccacgatgcctgtagcaatggcaacaacgttgcgcaaactattaactggcgaactacttactctagcttcccggcaacaattaatagactggatggaggcggataaagttgcaggaccacttctgcgctcggcccttccggctggctggtttattgctgataaatctggagccggtgagcgtgggtctcgcggtatc

SEQ ID NO: 59 - DNA, 3603 bp, Synthetic construct
  source 1..3603: mol_type = other DNA
attgcagcactggggccagatggtaagccctcccgtatcgtagttatctacacgacggggagtcaggcaactatggatgaacgaaatagacagatcgctgagataggtgcctcactgattaagcattggtaactgtcagaccaagtttactcatatatactttagattgatttaaaacttcatttttaatttaaaaggatctaggtgaagatcctttttgataatctcatgaccaaaatcccttaacgtgagttttcgttccactgagcgtcagaccccgtagaaaagatcaaaggatcttcttgagatcctttttttctgcgcgtaatctgctgcttgcaaacaaaaaaaccaccgctaccagcggtggtttgtttgccggatcaagagctaccaactctttttccgaaggtaactggcttcagcagagcgcagataccaaatactgttcttctagtgtagccgtagttaggccaccacttcaagaactctgtagcaccgcctacatacctcgctctgctaatcctgttaccagtggctgctgccagtggcgataagtcgtgtcttaccgggttggactcaagacgatagttaccggataaggcgcagcggtcgggctgaacggggggttcgtgcacacagcccagcttggagcgaacgacctacaccgaactgagatacctacagcgtgagctatgagaaagcgccacgcttcccgaagggagaaaggcggacaggtatccggtaagcggcagggtcggaacaggagagcgcacgagggagcttccagggggaaacgcctggtatctttatagtcctgtcgggtttcgccacctctgacttgagcgtcgatttttgtgatgctcgtcaggggggcggagcctatggaaaaacgccagcaacgcggcctttttacggttcctggccttttgctggccttttgctcacatgttctttcctgcgttatcccctgattctgtggataaccgtattaccgcctttgagtgagctgataccgctcgccgcagccgaacgaccgagcgcagcgagtcagtgagcgaggaagcggaagagcgcccaatacgcaaaccgcctctccccgcgcgttggccgattcattaatgcagctggcacgacaggtttcccgactggaaagcgggcagtgagcgcaacgcaattaatgtgagttagctcactcattaggcaccccaggctttacactttatgcttccggctcgtatgttgtgtggaattgtgagcggataacaatttcacacaggaaacagctatgaccatgattacgccaagctttgttgatacaaccataaaatgataattacacccataaattgataattatcacacccataaattgatattgcctcttcatggtctaaacttcagtaagaggaggtaaataatggagaaaaaaatcactggatataccaccgttgatatatcccaatggcatcgtaaagaacattttgaggcatttcagtcagttgctcaatgtacctataaccagaccgttcagctggatattacggcctttttaaagaccgtaaagaaaaataagcacaagttttatccggcctttattcacattcttgcccgcctgatgaatgctcatccggagttccgtatggcaatgaaagacggtgagctggtgatatgggatagtgttcacccttgttacaccgttttccatgagcaaactgaaacgttttcatcgctctggagtgaataccacgacgatttccggcagtttctacacatatattcgcaagatgtggcgtgttacggtgaaaacctggcctatttccctaaagggtttattgagaatatgtttttcgtctcagccaatccctgggtgagtttcaccagttttgatttaaacgtggccaatatggacaacttcttcgcccccgttttcactatgggcaaatattatacgcaaggcgacaaggtgctgatgccgctggcgattcaggttcatcatgccgtttgtgatggcttccatgtcggcagaatgcttaatgaattacaacagtactgcgatgagtggcagggcggggcgtaatttttttaaggcagttattggtgcccttctagagtccttactgcagtagttttgctgaaatactcgattcacaaaaatatcaacttatggttgttttgtgagatatcaatatatggttgttttgtggttaagttgctgattataaataattattaaatatcactttatggttgcatcaacaggtaccgagctcgaattcactggccgtcgttttacaacgtcgtgactgggaaaaccctggcgttacccaacttaatcgccttgcagcacatccccctttcgccagctggcgtaatagcgaagaggcccgcaccgatcgcccttcccaacagttgcgcagcctgaatggcgaatggcgcctgatgcggtattttctccttacgcatctgtgcggtatttcacaccgcatatggtgcactctcagtacaatctgctctgatgccgcatagttaagccagccccgacacccgccaacacccgctgacgcgccctgacgggcttgtctgctcccggcatccgcttacagacaagctgtgaccgtctccgggagctgcatgtgtcagaggttttcaccgtcatcaccgaaacgcgcgagacgaaagggcctcgtgatacgcctatttttataggttaatgtcatgataataatggtttcttagacgtcaggtggcacttttcggggaaatgtgcgcggaacccctatttgtttatttttctaaatacattcaaatatgtatccgctcatgagacaataaccctgataaatgcttcaataatattgaaaaaggaagagtatgagtattcaacatttccgtgtcgcccttattcccttttttgcggcattttgccttcctgtttttgctcacccagaaacgctggtgaaagtaaaagatgctgaagatcagttgggtgcacgagtgggttacatcgaactggatctcaacagcggtaagatccttgagagttttcgccccgaagaacgttttccaatgatgagcacttttaaagttctgctatgtggcgcggtattatcccgtattgacgccgggcaagagcaactcggtcgccgcatacactattctcagaatgacttggttgagtactcaccagtcacagaaaagcatcttacggatggcatgacagtaagagaattatgcagtgctgccataaccatgagtgataacactgcggccaacttacttctgacaacgatcggaggaccgaaggagctaaccgcttttttgcacaacatgggggatcatgtaactcgccttgatcgttgggaaccggagctgaatgaagccataccaaacgacgagcgtgacaccacgatgcctgtagcaatggcaacaacgttgcgcaaactattaactggcgaactacttactctagcttcccggcaacaattaatagactggatggaggcggataaagttgcaggaccacttctgcgctcggcccttccggctggctggtttattgctgataaatctggagccggtgagcgtgggtctcgcggtatc

SEQ ID NO: 60 - DNA, 3593 bp, Synthetic construct
  source 1..3593: mol_type = other DNA
attgcagcactggggccagatggtaagccctcccgtatcgtagttatctacacgacggggagtcaggcaactatggatgaacgaaatagacagatcgctgagataggtgcctcactgattaagcattggtaactgtcagaccaagtttactcatatatactttagattgatttaaaacttcatttttaatttaaaaggatctaggtgaagatcctttttgataatctcatgaccaaaatcccttaacgtgagttttcgttccactgagcgtcagaccccgtagaaaagatcaaaggatcttcttgagatcctttttttctgcgcgtaatctgctgcttgcaaacaaaaaaaccaccgctaccagcggtggtttgtttgccggatcaagagctaccaactctttttccgaaggtaactggcttcagcagagcgcagataccaaatactgttcttctagtgtagccgtagttaggccaccacttcaagaactctgtagcaccgcctacatacctcgctctgctaatcctgttaccagtggctgctgccagtggcgataagtcgtgtcttaccgggttggactcaagacgatagttaccggataaggcgcagcggtcgggctgaacggggggttcgtgcacacagcccagcttggagcgaacgacctacaccgaactgagatacctacagcgtgagctatgagaaagcgccacgcttcccgaagggagaaaggcggacaggtatccggtaagcggcagggtcggaacaggagagcgcacgagggagcttccagggggaaacgcctggtatctttatagtcctgtcgggtttcgccacctctgacttgagcgtcgatttttgtgatgctcgtcaggggggcggagcctatggaaaaacgccagcaacgcggcctttttacggttcctggccttttgctggccttttgctcacatgttctttcctgcgttatcccctgattctgtggataaccgtattaccgcctttgagtgagctgataccgctcgccgcagccgaacgaccgagcgcagcgagtcagtgagcgaggaagcggaagagcgcccaatacgcaaaccgcctctccccgcgcgttggccgattcattaatgcagctggcacgacaggtttcccgactggaaagcgggcagtgagcgcaacgcaattaatgtgagttagctcactcattaggcaccccaggctttacactttatgcttccggctcgtatgttgtgtggaattgtgagcggataacaatttcacacaggaaacagctatgaccatgattacgccaagctttgttgatacaaccataaaatgataattacacccataaattgataattatcacacccataaattgatattgcctcttcatggtctaaaaggaggtaaataatggagaaaaaaatcactggatataccaccgttgatatatcccaatggcatcgtaaagaacattttgaggcatttcagtcagttgctcaatgtacctataaccagaccgttcagctggatattacggcctttttaaagaccgtaaagaaaaataagcacaagttttatccggcctttattcacattcttgcccgcctgatgaatgctcatccggagttccgtatggcaatgaaagacggtgagctggtgatatgggatagtgttcacccttgttacaccgttttccatgagcaaactgaaacgttttcatcgctctggagtgaataccacgacgatttccggcagtttctacacatatattcgcaagatgtggcgtgttacggtgaaaacctggcctatttccctaaagggtttattgagaatatgtttttcgtctcagccaatccctgggtgagtttcaccagttttgatttaaacgtggccaatatggacaacttcttcgcccccgttttcactatgggcaaatattatacgcaaggcgacaaggtgctgatgccgctggcgattcaggttcatcatgccgtttgtgatggcttccatgtcggcagaatgcttaatgaattacaacagtactgcgatgagtggcagggcggggcgtaatttttttaaggcagttattggtgcccttctagagtccttactgcagtagttttgctgaaatactcgattcacaaaaatatcaacttatggttgttttgtgagatatcaatatatggttgttttgtggttaagttgctgattataaataattattaaatatcactttatggttgcatcaacaggtaccgagctcgaattcactggccgtcgttttacaacgtcgtgactgggaaaaccctggcgttacccaacttaatcgccttgcagcacatccccctttcgccagctggcgtaatagcgaagaggcccgcaccgatcgcccttcccaacagttgcgcagcctgaatggcgaatggcgcctgatgcggtattttctccttacgcatctgtgcggtatttcacaccgcatatggtgcactctcagtacaatctgctctgatgccgcatagttaagccagccccgacacccgccaacacccgctgacgcgccctgacgggcttgtctgctcccggcatccgcttacagacaagctgtgaccgtctccgggagctgcatgtgtcagaggttttcaccgtcatcaccgaaacgcgcgagacgaaagggcctcgtgatacgcctatttttataggttaatgtcatgataataatggtttcttagacgtcaggtggcacttttcggggaaatgtgcgcggaacccctatttgtttatttttctaaatacattcaaatatgtatccgctcatgagacaataaccctgataaatgcttcaataatattgaaaaaggaagagtatgagtattcaacatttccgtgtcgcccttattcccttttttgcggcattttgccttcctgtttttgctcacccagaaacgctggtgaaagtaaaagatgctgaagatcagttgggtgcacgagtgggttacatcgaactggatctcaacagcggtaagatccttgagagttttcgccccgaagaacgttttccaatgatgagcacttttaaagttctgctatgtggcgcggtattatcccgtattgacgccgggcaagagcaactcggtcgccgcatacactattctcagaatgacttggttgagtactcaccagtcacagaaaagcatcttacggatggcatgacagtaagagaattatgcagtgctgccataaccatgagtgataacactgcggccaacttacttctgacaacgatcggaggaccgaaggagctaaccgcttttttgcacaacatgggggatcatgtaactcgccttgatcgttgggaaccggagctgaatgaagccataccaaacgacgagcgtgacaccacgatgcctgtagcaatggcaacaacgttgcgcaaactattaactggcgaactacttactctagcttcccggcaacaattaatagactggatggaggcggataaagttgcaggaccacttctgcgctcggcccttccggctggctggtttattgctgataaatctggagccggtgagcgtgggtctcgcggtatc

SEQ ID NO: 61 - DNA, 3583 bp, Synthetic construct
  source 1..3583: mol_type = other DNA
attgcagcactggggccagatggtaagccctcccgtatcgtagttatctacacgacggggagtcaggcaactatggatgaacgaaatagacagatcgctgagataggtgcctcactgattaagcattggtaactgtcagaccaagtttactcatatatactttagattgatttaaaacttcatttttaatttaaaaggatctaggtgaagatcctttttgataatctcatgaccaaaatcccttaacgtgagttttcgttccactgagcgtcagaccccgtagaaaagatcaaaggatcttcttgagatcctttttttctgcgcgtaatctgctgcttgcaaacaaaaaaaccaccgctaccagcggtggtttgtttgccggatcaagagctaccaactctttttccgaaggtaactggcttcagcagagcgcagataccaaatactgttcttctagtgtagccgtagttaggccaccacttcaagaactctgtagcaccgcctacatacctcgctctgctaatcctgttaccagtggctgctgccagtggcgataagtcgtgtcttaccgggttggactcaagacgatagttaccggataaggcgcagcggtcgggctgaacggggggttcgtgcacacagcccagcttggagcgaacgacctacaccgaactgagatacctacagcgtgagctatgagaaagcgccacgcttcccgaagggagaaaggcggacaggtatccggtaagcggcagggtcggaacaggagagcgcacgagggagcttccagggggaaacgcctggtatctttatagtcctgtcgggtttcgccacctctgacttgagcgtcgatttttgtgatgctcgtcaggggggcggagcctatggaaaaacgccagcaacgcggcctttttacggttcctggccttttgctggccttttgctcacatgttctttcctgcgttatcccctgattctgtggataaccgtattaccgcctttgagtgagctgataccgctcgccgcagccgaacgaccgagcgcagcgagtcagtgagcgaggaagcggaagagcgcccaatacgcaaaccgcctctccccgcgcgttggccgattcattaatgcagctggcacgacaggtttcccgactggaaagcgggcagtgagcgcaacgcaattaatgtgagttagctcactcattaggcaccccaggctttacactttatgcttccggctcgtatgttgtgtggaattgtgagcggataacaatttcacacaggaaacagctatgaccatgattacgccaagctttgttgatacaaccataaaatgataattacacccataaattgataattatcacacccataaattgatattgcctcttcaggaggtaaataatggagaaaaaaatcactggatataccaccgttgatatatcccaatggcatcgtaaagaacattttgaggcatttcagtcagttgctcaatgtacctataaccagaccgttcagctggatattacggcctttttaaagaccgtaaagaaaaataagcacaagttttatccggcctttattcacattcttgcccgcctgatgaatgctcatccggagttccgtatggcaatgaaagacggtgagctggtgatatgggatagtgttcacccttgttacaccgttttccatgagcaaactgaaacgttttcatcgctctggagtgaataccacgacgatttccggcagtttctacacatatattcgcaagatgtggcgtgttacggtgaaaacctggcctatttccctaaagggtttattgagaatatgtttttcgtctcagccaatccctgggtgagtttcaccagttttgatttaaacgtggccaatatggacaacttcttcgcccccgttttcactatgggcaaatattatacgcaaggcgacaaggtgctgatgccgctggcgattcaggttcatcatgccgtttgtgatggcttccatgtcggcagaatgcttaatgaattacaacagtactgcgatgagtggcagggcggggcgtaatttttttaaggcagttattggtgcccttctagagtccttactgcagtagttttgctgaaatactcgattcacaaaaatatcaacttatggttgttttgtgagatatcaatatatggttgttttgtggttaagttgctgattataaataattattaaatatcactttatggttgcatcaacaggtaccgagctcgaattcactggccgtcgttttacaacgtcgtgactgggaaaaccctggcgttacccaacttaatcgccttgcagcacatccccctttcgccagctggcgtaatagcgaagaggcccgcaccgatcgcccttcccaacagttgcgcagcctgaatggcgaatggcgcctgatgcggtattttctccttacgcatctgtgcggtatttcacaccgcatatggtgcactctcagtacaatctgctctgatgccgcatagttaagccagccccgacacccgccaacacccgctgacgcgccctgacgggcttgtctgctcccggcatccgcttacagacaagctgtgaccgtctccgggagctgcatgtgtcagaggttttcaccgtcatcaccgaaacgcgcgagacgaaagggcctcgtgatacgcctatttttataggttaatgtcatgataataatggtttcttagacgtcaggtggcacttttcggggaaatgtgcgcggaacccctatttgtttatttttctaaatacattcaaatatgtatccgctcatgagacaataaccctgataaatgcttcaataatattgaaaaaggaagagtatgagtattcaacatttccgtgtcgcccttattcccttttttgcggcattttgccttcctgtttttgctcacccagaaacgctggtgaaagtaaaagatgctgaagatcagttgggtgcacgagtgggttacatcgaactggatctcaacagcggtaagatccttgagagttttcgccccgaagaacgttttccaatgatgagcacttttaaagttctgctatgtggcgcggtattatcccgtattgacgccgggcaagagcaactcggtcgccgcatacactattctcagaatgacttggttgagtactcaccagtcacagaaaagcatcttacggatggcatgacagtaagagaattatgcagtgctgccataaccatgagtgataacactgcggccaacttacttctgacaacgatcggaggaccgaaggagctaaccgcttttttgcacaacatgggggatcatgtaactcgccttgatcgttgggaaccggagctgaatgaagccataccaaacgacgagcgtgacaccacgatgcctgtagcaatggcaacaacgttgcgcaaactattaactggcgaactacttactctagcttcccggcaacaattaatagactggatggaggcggataaagttgcaggaccacttctgcgctcggcccttccggctggctggtttattgctgataaatctggagccggtgagcgtgggtctcgcggtatc

SEQ ID NO: 62 - DNA, 3573 bp, Synthetic construct
  source 1..3573: mol_type = other DNA
attgcagcactggggccagatggtaagccctcccgtatcgtagttatctacacgacggggagtcaggcaactatggatgaacgaaatagacagatcgctgagataggtgcctcactgattaagcattggtaactgtcagaccaagtttactcatatatactttagattgatttaaaacttcatttttaatttaaaaggatctaggtgaagatcctttttgataatctcatgaccaaaatcccttaacgtgagttttcgttccactgagcgtcagaccccgtagaaaagatcaaaggatcttcttgagatcctttttttctgcgcgtaatctgctgcttgcaaacaaaaaaaccaccgctaccagcggtggtttgtttgccggatcaagagctaccaactctttttccgaaggtaactggcttcagcagagcgcagataccaaatactgttcttctagtgtagccgtagttaggccaccacttcaagaactctgtagcaccgcctacatacctcgctctgctaatcctgttaccagtggctgctgccagtggcgataagtcgtgtcttaccgggttggactcaagacgatagttaccggataaggcgcagcggtcgggctgaacggggggttcgtgcacacagcccagcttggagcgaacgacctacaccgaactgagatacctacagcgtgagctatgagaaagcgccacgcttcccgaagggagaaaggcggacaggtatccggtaagcggcagggtcggaacaggagagcgcacgagggagcttccagggggaaacgcctggtatctttatagtcctgtcgggtttcgccacctctgacttgagcgtcgatttttgtgatgctcgtcaggggggcggagcctatggaaaaacgccagcaacgcggcctttttacggttcctggccttttgctggccttttgctcacatgttctttcctgcgttatcccctgattctgtggataaccgtattaccgcctttgagtgagctgataccgctcgccgcagccgaacgaccgagcgcagcgagtcagtgagcgaggaagcggaagagcgcccaatacgcaaaccgcctctccccgcgcgttggccgattcattaatgcagctggcacgacaggtttcccgactggaaagcgggcagtgagcgcaacgcaattaatgtgagttagctcactcattaggcaccccaggctttacactttatgcttccggctcgtatgttgtgtggaattgtgagcggataacaatttcacacaggaaacagctatgaccatgattacgccaagctttgttgatacaaccataaaatgataattacacccataaattgataattatcacacccataaattgataaggaggtaaataatggagaaaaaaatcactggatataccaccgttgatatatcccaatggcatcgtaaagaacattttgaggcatttcagtcagttgctcaatgtacctataaccagaccgttcagctggatattacggcctttttaaagaccgtaaagaaaaataagcacaagttttatccggcctttattcacattcttgcccgcctgatgaatgctcatccggagttccgtatggcaatgaaagacggtgagctggtgatatgggatagtgttcacccttgttacaccgttttccatgagcaaactgaaacgttttcatcgctctggagtgaataccacgacgatttccggcagtttctacacatatattcgcaagatgtggcgtgttacggtgaaaacctggcctatttccctaaagggtttattgagaatatgtttttcgtctcagccaatccctgggtgagtttcaccagttttgatttaaacgtggccaatatggacaacttcttcgcccccgttttcactatgggcaaatattatacgcaaggcgacaaggtgctgatgccgctggcgattcaggttcatcatgccgtttgtgatggcttccatgtcggcagaatgcttaatgaattacaacagtactgcgatgagtggcagggcggggcgtaatttttttaaggcagttattggtgcccttctagagtccttactgcagtagttttgctgaaatactcgattcacaaaaatatcaacttatggttgttttgtgagatatcaatatatggttgttttgtggttaagttgctgattataaataattattaaatatcactttatggttgcatcaacaggtaccgagctcgaattcactggccgtcgttttacaacgtcgtgactgggaaaaccctggcgttacccaacttaatcgccttgcagcacatccccctttcgccagctggcgtaatagcgaagaggcccgcaccgatcgcccttcccaacagttgcgcagcctgaatggcgaatggcgcctgatgcggtattttctccttacgcatctgtgcggtatttcacaccgcatatggtgcactctcagtacaatctgctctgatgccgcatagttaagccagccccgacacccgccaacacccgctgacgcgccctgacgggcttgtctgctcccggcatccgcttacagacaagctgtgaccgtctccgggagctgcatgtgtcagaggttttcaccgtcatcaccgaaacgcgcgagacgaaagggcctcgtgatacgcctatttttataggttaatgtcatgataataatggtttcttagacgtcaggtggcacttttcggggaaatgtgcgcggaacccctatttgtttatttttctaaatacattcaaatatgtatccgctcatgagacaataaccctgataaatgcttcaataatattgaaaaaggaagagtatgagtattcaacatttccgtgtcgcccttattcccttttttgcggcattttgccttcctgtttttgctcacccagaaacgctggtgaaagtaaaagatgctgaagatcagttgggtgcacgagtgggttacatcgaactggatctcaacagcggtaagatccttgagagttttcgccccgaagaacgttttccaatgatgagcacttttaaagttctgctatgtggcgcggtattatcccgtattgacgccgggcaagagcaactcggtcgccgcatacactattctcagaatgacttggttgagtactcaccagtcacagaaaagcatcttacggatggcatgacagtaagagaattatgcagtgctgccataaccatgagtgataacactgcggccaacttacttctgacaacgatcggaggaccgaaggagctaaccgcttttttgcacaacatgggggatcatgtaactcgccttgatcgttgggaaccggagctgaatgaagccataccaaacgacgagcgtgacaccacgatgcctgtagcaatggcaacaacgttgcgcaaactattaactggcgaactacttactctagcttcccggcaacaattaatagactggatggaggcggataaagttgcaggaccacttctgcgctcggcccttccggctggctggtttattgctgataaatctggagccggtgagcgtgggtctcgcggtatc

SEQ ID NO: 63 - DNA, 3563 bp, Synthetic construct
  source 1..3563: mol_type = other DNA
attgcagcactggggccagatggtaagccctcccgtatcgtagttatctacacgacggggagtcaggcaactatggatgaacgaaatagacagatcgctgagataggtgcctcactgattaagcattggtaactgtcagaccaagtttactcatatatactttagattgatttaaaacttcatttttaatttaaaaggatctaggtgaagatcctttttgataatctcatgaccaaaatcccttaacgtgagttttcgttccactgagcgtcagaccccgtagaaaagatcaaaggatcttcttgagatcctttttttctgcgcgtaatctgctgcttgcaaacaaaaaaaccaccgctaccagcggtggtttgtttgccggatcaagagctaccaactctttttccgaaggtaactggcttcagcagagcgcagataccaaatactgttcttctagtgtagccgtagttaggccaccacttcaagaactctgtagcaccgcctacatacctcgctctgctaatcctgttaccagtggctgctgccagtggcgataagtcgtgtcttaccgggttggactcaagacgatagttaccggataaggcgcagcggtcgggctgaacggggggttcgtgcacacagcccagcttggagcgaacgacctacaccgaactgagatacctacagcgtgagctatgagaaagcgccacgcttcccgaagggagaaaggcggacaggtatccggtaagcggcagggtcggaacaggagagcgcacgagggagcttccagggggaaacgcctggtatctttatagtcctgtcgggtttcgccacctctgacttgagcgtcgatttttgtgatgctcgtcaggggggcggagcctatggaaaaacgccagcaacgcggcctttttacggttcctggccttttgctggccttttgctcacatgttctttcctgcgttatcccctgattctgtggataaccgtattaccgcctttgagtgagctgataccgctcgccgcagccgaacgaccgagcgcagcgagtcagtgagcgaggaagcggaagagcgcccaatacgcaaaccgcctctccccgcgcgttggccgattcattaatgcagctggcacgacaggtttcccgactggaaagcgggcagtgagcgcaacgcaattaatgtgagttagctcactcattaggcaccccaggctttacactttatgcttccggctcgtatgttgtgtggaattgtgagcggataacaatttcacacaggaaacagctatgaccatgattacgccaagctttgttgatacaaccataaaatgataattacacccataaattgataattatcacacccaaggaggtaaataatggagaaaaaaatcactggatataccaccgttgatatatcccaatggcatcgtaaagaacattttgaggcatttcagtcagttgctcaatgtacctataaccagaccgttcagctggatattacggcctttttaaagaccgtaaagaaaaataagcacaagttttatccggcctttattcacattcttgcccgcctgatgaatgctcatccggagttccgtatggcaatgaaagacggtgagctggtgatatgggatagtgttcacccttgttacaccgttttccatgagcaaactgaaacgttttcatcgctctggagtgaataccacgacgatttccggcagtttctacacatatattcgcaagatgtggcgtgttacggtgaaaacctggcctatttccctaaagggtttattgagaatatgtttttcgtctcagccaatccctgggtgagtttcaccagttttgatttaaacgtggccaatatggacaacttcttcgcccccgttttcactatgggcaaatattatacgcaaggcgacaaggtgctgatgccgctggcgattcaggttcatcatgccgtttgtgatggcttccatgtcggcagaatgcttaatgaattacaacagtactgcgatgagtggcagggcggggcgtaatttttttaaggcagttattggtgcccttctagagtccttactgcagtagttttgctgaaatactcgattcacaaaaatatcaacttatggttgttttgtgagatatcaatatatggttgttttgtggttaagttgctgattataaataattattaaatatcactttatggttgcatcaacaggtaccgagctcgaattcactggccgtcgttttacaacgtcgtgactgggaaaaccctggcgttacccaacttaatcgccttgcagcacatccccctttcgccagctggcgtaatagcgaagaggcccgcaccgatcgcccttcccaacagttgcgcagcctgaatggcgaatggcgcctgatgcggtattttctccttacgcatctgtgcggtatttcacaccgcatatggtgcactctcagtacaatctgctctgatgccgcatagttaagccagccccgacacccgccaacacccgctgacgcgccctgacgggcttgtctgctcccggcatccgcttacagacaagctgtgaccgtctccgggagctgcatgtgtcagaggttttcaccgtcatcaccgaaacgcgcgagacgaaagggcctcgtgatacgcctatttttataggttaatgtcatgataataatggtttcttagacgtcaggtggcacttttcggggaaatgtgcgcggaacccctatttgtttatttttctaaatacattcaaatatgtatccgctcatgagacaataaccctgataaatgcttcaataatattgaaaaaggaagagtatgagtattcaacatttccgtgtcgcccttattcccttttttgcggcattttgccttcctgtttttgctcacccagaaacgctggtgaaagtaaaagatgctgaagatcagttgggtgcacgagtgggttacatcgaactggatctcaacagcggtaagatccttgagagttttcgccccgaagaacgttttccaatgatgagcacttttaaagttctgctatgtggcgcggtattatcccgtattgacgccgggcaagagcaactcggtcgccgcatacactattctcagaatgacttggttgagtactcaccagtcacagaaaagcatcttacggatggcatgacagtaagagaattatgcagtgctgccataaccatgagtgataacactgcggccaacttacttctgacaacgatcggaggaccgaaggagctaaccgcttttttgcacaacatgggggatcatgtaactcgccttgatcgttgggaaccggagctgaatgaagccataccaaacgacgagcgtgacaccacgatgcctgtagcaatggcaacaacgttgcgcaaactattaactggcgaactacttactctagcttcccggcaacaattaatagactggatggaggcggataaagttgcaggaccacttctgcgctcggcccttccggctggctggtttattgctgataaatctggagccggtgagcgtgggtctcgcggtatc

SEQ ID NO: 64 - DNA, 3553 bp, Synthetic construct
  source 1..3553: mol_type = other DNA
attgcagcactggggccagatggtaagccctcccgtatcgtagttatctacacgacggggagtcaggcaactatggatgaacgaaatagacagatcgctgagataggtgcctcactgattaagcattggtaactgtcagaccaagtttactcatatatactttagattgatttaaaacttcatttttaatttaaaaggatctaggtgaagatcctttttgataatctcatgaccaaaatcccttaacgtgagttttcgttccactgagcgtcagaccccgtagaaaagatcaaaggatcttcttgagatcctttttttctgcgcgtaatctgctgcttgcaaacaaaaaaaccaccgctaccagcggtggtttgtttgccggatcaagagctaccaactctttttccgaaggtaactggcttcagcagagcgcagataccaaatactgttcttctagtgtagccgtagttaggccaccacttcaagaactctgtagcaccgcctacatacctcgctctgctaatcctgttaccagtggctgctgccagtggcgataagtcgtgtcttaccgggttggactcaagacgatagttaccggataaggcgcagcggtcgggctgaacggggggttcgtgcacacagcccagcttggagcgaacgacctacaccgaactgagatacctacagcgtgagctatgagaaagcgccacgcttcccgaagggagaaaggcggacaggtatccggtaagcggcagggtcggaacaggagagcgcacgagggagcttccagggggaaacgcctggtatctttatagtcctgtcgggtttcgccacctctgacttgagcgtcgatttttgtgatgctcgtcaggggggcggagcctatggaaaaacgccagcaacgcggcctttttacggttcctggccttttgctggccttttgctcacatgttctttcctgcgttatcccctgattctgtggataaccgtattaccgcctttgagtgagctgataccgctcgccgcagccgaacgaccgagcgcagcgagtcagtgagcgaggaagcggaagagcgcccaatacgcaaaccgcctctccccgcgcgttggccgattcattaatgcagctggcacgacaggtttcccgactggaaagcgggcagtgagcgcaacgcaattaatgtgagttagctcactcattaggcaccccaggctttacactttatgcttccggctcgtatgttgtgtggaattgtgagcggataacaatttcacacaggaaacagctatgaccatgattacgccaagctttgttgatacaaccataaaatgataattacacccataaattgataattaggaggtaaataatggagaaaaaaatcactggatataccaccgttgatatatcccaatggcatcgtaaagaacattttgaggcatttcagtcagttgctcaatgtacctataaccagaccgttcagctggatattacggcctttttaaagaccgtaaagaaaaataagcacaagttttatccggcctttattcacattcttgcccgcctgatgaatgctcatccggagttccgtatggcaatgaaagacggtgagctggtgatatgggatagtgttcacccttgttacaccgttttccatgagcaaactgaaacgttttcatcgctctggagtgaataccacgacgatttccggcagtttctacacatatattcgcaagatgtggcgtgttacggtgaaaacctggcctatttccctaaagggtttattgagaatatgtttttcgtctcagccaatccctgggtgagtttcaccagttttgatttaaacgtggccaatatggacaacttcttcgcccccgttttcactatgggcaaatattatacgcaaggcgacaaggtgctgatgccgctggcgattcaggttcatcatgccgtttgtgatggcttccatgtcggcagaatgcttaatgaattacaacagtactgcgatgagtggcagggcggggcgtaatttttttaaggcagttattggtgcccttctagagtccttactgcagtagttttgctgaaatactcgattcacaaaaatatcaacttatggttgttttgtgagatatcaatatatggttgttttgtggttaagttgctgattataaataattattaaatatcactttatggttgcatcaacaggtaccgagctcgaattcactggccgtcgttttacaacgtcgtgactgggaaaaccctggcgttacccaacttaatcgccttgcagcacatccccctttcgccagctggcgtaatagcgaagaggcccgcaccgatcgcccttcccaacagttgcgcagcctgaatggcgaatggcgcctgatgcggtattttctccttacgcatctgtgcggtatttcacaccgcatatggtgcactctcagtacaatctgctctgatgccgcatagttaagccagccccgacacccgccaacacccgctgacgcgccctgacgggcttgtctgctcccggcatccgcttacagacaagctgtgaccgtctccgggagctgcatgtgtcagaggttttcaccgtcatcaccgaaacgcgcgagacgaaagggcctcgtgatacgcctatttttataggttaatgtcatgataataatggtttcttagacgtcaggtggcacttttcggggaaatgtgcgcggaacccctatttgtttatttttctaaatacattcaaatatgtatccgctcatgagacaataaccctgataaatgcttcaataatattgaaaaaggaagagtatgagtattcaacatttccgtgtcgcccttattcccttttttgcggcattttgccttcctgtttttgctcacccagaaacgctggtgaaagtaaaagatgctgaagatcagttgggtgcacgagtgggttacatcgaactggatctcaacagcggtaagatccttgagagttttcgccccgaagaacgttttccaatgatgagcacttttaaagttctgctatgtggcgcggtattatcccgtattgacgccgggcaagagcaactcggtcgccgcatacactattctcagaatgacttggttgagtactcaccagtcacagaaaagcatcttacggatggcatgacagtaagagaattatgcagtgctgccataaccatgagtgataacactgcggccaacttacttctgacaacgatcggaggaccgaaggagctaaccgcttttttgcacaacatgggggatcatgtaactcgccttgatcgttgggaaccggagctgaatgaagccataccaaacgacgagcgtgacaccacgatgcctgtagcaatggcaacaacgttgcgcaaactattaactggcgaactacttactctagcttcccggcaacaattaatagactggatggaggcggataaagttgcaggaccacttctgcgctcggcccttccggctggctggtttattgctgataaatctggagccggtgagcgtgggtctcgcggtatc

SEQ ID NO: 65 - DNA, 3543 bp, Synthetic construct
  source 1..3543: mol_type = other DNA
attgcagcactggggccagatggtaagccctcccgtatcgtagttatctacacgacggggagtcaggcaactatggatgaacgaaatagacagatcgctgagataggtgcctcactgattaagcattggtaactgtcagaccaagtttactcatatatactttagattgatttaaaacttcatttttaatttaaaaggatctaggtgaagatcctttttgataatctcatgaccaaaatcccttaacgtgagttttcgttccactgagcgtcagaccccgtagaaaagatcaaaggatcttcttgagatcctttttttctgcgcgtaatctgctgcttgcaaacaaaaaaaccaccgctaccagcggtggtttgtttgccggatcaagagctaccaactctttttccgaaggtaactggcttcagcagagcgcagataccaaatactgttcttctagtgtagccgtagttaggccaccacttcaagaactctgtagcaccgcctacatacctcgctctgctaatcctgttaccagtggctgctgccagtggcgataagtcgtgtcttaccgggttggactcaagacgatagttaccggataaggcgcagcggtcgggctgaacggggggttcgtgcacacagcccagcttggagcgaacgacctacaccgaactgagatacctacagcgtgagctatgagaaagcgccacgcttcccgaagggagaaaggcggacaggtatccggtaagcggcagggtcggaacaggagagcgcacgagggagcttccagggggaaacgcctggtatctttatagtcctgtcgggtttcgccacctctgacttgagcgtcgatttttgtgatgctcgtcaggggggcggagcctatggaaaaacgccagcaacgcggcctttttacggttcctggccttttgctggccttttgctcacatgttctttcctgcgttatcccctgattctgtggataaccgtattaccgcctttgagtgagctgataccgctcgccgcagccgaacgaccgagcgcagcgagtcagtgagcgaggaagcggaagagcgcccaatacgcaaaccgcctctccccgcgcgttggccgattcattaatgcagctggcacgacaggtttcccgactggaaagcgggcagtgagcgcaacgcaattaatgtgagttagctcactcattaggcaccccaggctttacactttatgcttccggctcgtatgttgtgtggaattgtgagcggataacaatttcacacaggaaacagctatgaccatgattacgccaagctttgttgatacaaccataaaatgataattacacccataaaggaggtaaataatggagaaaaaaatcactggatataccaccgttgatatatcccaatggcatcgtaaagaacattttgaggcatttcagtcagttgctcaatgtacctataaccagaccgttcagctggatattacggcctttttaaagaccgtaaagaaaaataagcacaagttttatccggcctttattcacattcttgcccgcctgatgaatgctcatccggagttccgtatggcaatgaaagacggtgagctggtgatatgggatagtgttcacccttgttacaccgttttccatgagcaaactgaaacgttttcatcgctctggagtgaataccacgacgatttccggcagtttctacacatatattcgcaagatgtggcgtgttacggtgaaaacctggcctatttccctaaagggtttattgagaatatgtttttcgtctcagccaatccctgggtgagtttcaccagttttgatttaaacgtggccaatatggacaacttcttcgcccccgttttcactatgggcaaatattatacgcaaggcgacaaggtgctgatgccgctggcgattcaggttcatcatgccgtttgtgatggcttccatgtcggcagaatgcttaatgaattacaacagtactgcgatgagtggcagggcggggcgtaatttttttaaggcagttattggtgcccttctagagtccttactgcagtagttttgctgaaatactcgattcacaaaaatatcaacttatggttgttttgtgagatatcaatatatggttgttttgtggttaagttgctgattataaataattattaaatatcactttatggttgcatcaacaggtaccgagctcgaattcactggccgtcgttttacaacgtcgtgactgggaaaaccctggcgttacccaacttaatcgccttgcagcacatccccctttcgccagctggcgtaatagcgaagaggcccgcaccgatcgcccttcccaacagttgcgcagcctgaatggcgaatggcgcctgatgcggtattttctccttacgcatctgtgcggtatttcacaccgcatatggtgcactctcagtacaatctgctctgatgccgcatagttaagccagccccgacacccgccaacacccgctgacgcgccctgacgggcttgtctgctcccggcatccgcttacagacaagctgtgaccgtctccgggagctgcatgtgtcagaggttttcaccgtcatcaccgaaacgcgcgagacgaaagggcctcgtgatacgcctatttttataggttaatgtcatgataataatggtttcttagacgtcaggtggcacttttcggggaaatgtgcgcggaacccctatttgtttatttttctaaatacattcaaatatgtatccgctcatgagacaataaccctgataaatgcttcaataatattgaaaaaggaagagtatgagtattcaacatttccgtgtcgcccttattcccttttttgcggcattttgccttcctgtttttgctcacccagaaacgctggtgaaagtaaaagatgctgaagatcagttgggtgcacgagtgggttacatcgaactggatctcaacagcggtaagatccttgagagttttcgccccgaagaacgttttccaatgatgagcacttttaaagttctgctatgtggcgcggtattatcccgtattgacgccgggcaagagcaactcggtcgccgcatacactattctcagaatgacttggttgagtactcaccagtcacagaaaagcatcttacggatggcatgacagtaagagaattatgcagtgctgccataaccatgagtgataacactgcggccaacttacttctgacaacgatcggaggaccgaaggagctaaccgcttttttgcacaacatgggggatcatgtaactcgccttgatcgttgggaaccggagctgaatgaagccataccaaacgacgagcgtgacaccacgatgcctgtagcaatggcaacaacgttgcgcaaactattaactggcgaactacttactctagcttcccggcaacaattaatagactggatggaggcggataaagttgcaggaccacttctgcgctcggcccttccggctggctggtttattgctgataaatctggagccggtgagcgtgggtctcgcggtatc

SEQ ID NO: 66 - DNA, 3533 bp, Synthetic construct
  source 1..3533: mol_type = other DNA
attgcagcactggggccagatggtaagccctcccgtatcgtagttatctacacgacggggagtcaggcaactatggatgaacgaaatagacagatcgctgagataggtgcctcactgattaagcattggtaactgtcagaccaagtttactcatatatactttagattgatttaaaacttcatttttaatttaaaaggatctaggtgaagatcctttttgataatctcatgaccaaaatcccttaacgtgagttttcgttccactgagcgtcagaccccgtagaaaagatcaaaggatcttcttgagatcctttttttctgcgcgtaatctgctgcttgcaaacaaaaaaaccaccgctaccagcggtggtttgtttgccggatcaagagctaccaactctttttccgaaggtaactggcttcagcagagcgcagataccaaatactgttcttctagtgtagccgtagttaggccaccacttcaagaactctgtagcaccgcctacatacctcgctctgctaatcctgttaccagtggctgctgccagtggcgataagtcgtgtcttaccgggttggactcaagacgatagttaccggataaggcgcagcggtcgggctgaacggggggttcgtgcacacagcccagcttggagcgaacgacctacaccgaactgagatacctacagcgtgagctatgagaaagcgccacgcttcccgaagggagaaaggcggacaggtatccggtaagcggcagggtcggaacaggagagcgcacgagggagcttccagggggaaacgcctggtatctttatagtcctgtcgggtttcgccacctctgacttgagcgtcgatttttgtgatgctcgtcaggggggcggagcctatggaaaaacgccagcaacgcggcctttttacggttcctggccttttgctggccttttgctcacatgttctttcctgcgttatcccctgattctgtggataaccgtattaccgcctttgagtgagctgataccgctcgccgcagccgaacgaccgagcgcagcgagtcagtgagcgaggaagcggaagagcgcccaatacgcaaaccgcctctccccgcgcgttggccgattcattaatgcagctggcacgacaggtttcccgactggaaagcgggcagtgagcgcaacgcaattaatgtgagttagctcactcattaggcaccccaggctttacactttatgcttccggctcgtatgttgtgtggaattgtgagcggataacaatttcacacaggaaacagctatgaccatgattacgccaagctttgttgatacaaccataaaatgataattaggaggtaaataatggagaaaaaaatcactggatataccaccgttgatatatcccaatggcatcgtaaagaacattttgaggcatttcagtcagttgctcaatgtacctataaccagaccgttcagctggatattacggcctttttaaagaccgtaaagaaaaataagcacaagttttatccggcctttattcacattcttgcccgcctgatgaatgctcatccggagttccgtatggcaatgaaagacggtgagctggtgatatgggatagtgttcacccttgttacaccgttttccatgagcaaactgaaacgttttcatcgctctggagtgaataccacgacgatttccggcagtttctacacatatattcgcaagatgtggcgtgttacggtgaaaacctggcctatttccctaaagggtttattgagaatatgtttttcgtctcagccaatccctgggtgagtttcaccagttttgatttaaacgtggccaatatggacaacttcttcgcccccgttttcactatgggcaaatattatacgcaaggcgacaaggtgctgatgccgctggcgattcaggttcatcatgccgtttgtgatggcttccatgtcggcagaatgcttaatgaattacaacagtactgcgatgagtggcagggcggggcgtaatttttttaaggcagttattggtgcccttctagagtccttactgcagtagttttgctgaaatactcgattcacaaaaatatcaacttatggttgttttgtgagatatcaatatatggttgttttgtggttaagttgctgattataaataattattaaatatcactttatggttgcatcaacaggtaccgagctcgaattcactggccgtcgttttacaacgtcgtgactgggaaaaccctggcgttacccaacttaatcgccttgcagcacatccccctttcgccagctggcgtaatagcgaagaggcccgcaccgatcgcccttcccaacagttgcgcagcctgaatggcgaatggcgcctgatgcggtattttctccttacgcatctgtgcggtatttcacaccgcatatggtgcactctcagtacaatctgctctgatgccgcatagttaagccagccccgacacccgccaacacccgctgacgcgccctgacgggcttgtctgctcccggcatccgcttacagacaagctgtgaccgtctccgggagctgcatgtgtcagaggttttcaccgtcatcaccgaaacgcgcgagacgaaagggcctcgtgatacgcctatttttataggttaatgtcatgataataatggtttcttagacgtcaggtggcacttttcggggaaatgtgcgcggaacccctatttgtttatttttctaaatacattcaaatatgtatccgctcatgagacaataaccctgataaatgcttcaataatattgaaaaaggaagagtatgagtattcaacatttccgtgtcgcccttattcccttttttgcggcattttgccttcctgtttttgctcacccagaaacgctggtgaaagtaaaagatgctgaagatcagttgggtgcacgagtgggttacatcgaactggatctcaacagcggtaagatccttgagagttttcgccccgaagaacgttttccaatgatgagcacttttaaagttctgctatgtggcgcggtattatcccgtattgacgccgggcaagagcaactcggtcgccgcatacactattctcagaatgacttggttgagtactcaccagtcacagaaaagcatcttacggatggcatgacagtaagagaattatgcagtgctgccataaccatgagtgataacactgcggccaacttacttctgacaacgatcggaggaccgaaggagctaaccgcttttttgcacaacatgggggatcatgtaactcgccttgatcgttgggaaccggagctgaatgaagccataccaaacgacgagcgtgacaccacgatgcctgtagcaatggcaacaacgttgcgcaaactattaactggcgaactacttactctagcttcccggcaacaattaatagactggatggaggcggataaagttgcaggaccacttctgcgctcggcccttccggctggctggtttattgctgataaatctggagccggtgagcgtgggtctcgcggtatc

SEQ ID NO: 67 - DNA, 3523 bp, Synthetic construct
  source 1..3523: mol_type = other DNA
attgcagcactggggccagatggtaagccctcccgtatcgtagttatctacacgacggggagtcaggcaactatggatgaacgaaatagacagatcgctgagataggtgcctcactgattaagcattggtaactgtcagaccaagtttactcatatatactttagattgatttaaaacttcatttttaatttaaaaggatctaggtgaagatcctttttgataatctcatgaccaaaatcccttaacgtgagttttcgttccactgagcgtcagaccccgtagaaaagatcaaaggatcttcttgagatcctttttttctgcgcgtaatctgctgcttgcaaacaaaaaaaccaccgctaccagcggtggtttgtttgccggatcaagagctaccaactctttttccgaaggtaactggcttcagcagagcgcagataccaaatactgttcttctagtgtagccgtagttaggccaccacttcaagaactctgtagcaccgcctacatacctcgctctgctaatcctgttaccagtggctgctgccagtggcgataagtcgtgtcttaccgggttggactcaagacgatagttaccggataaggcgcagcggtcgggctgaacggggggttcgtgcacacagcccagcttggagcgaacgacctacaccgaactgagatacctacagcgtgagctatgagaaagcgccacgcttcccgaagggagaaaggcggacaggtatccggtaagcggcagggtcggaacaggagagcgcacgagggagcttccagggggaaacgcctggtatctttatagtcctgtcgggtttcgccacctctgacttgagcgtcgatttttgtgatgctcgtcaggggggcggagcctatggaaaaacgccagcaacgcggcctttttacggttcctggccttttgctggccttttgctcacatgttctttcctgcgttatcccctgattctgtggataaccgtattaccgcctttgagtgagctgataccgctcgccgcagccgaacgaccgagcgcagcgagtcagtgagcgaggaagcggaagagcgcccaatacgcaaaccgcctctccccgcgcgttggccgattcattaatgcagctggcacgacaggtttcccgactggaaagcgggcagtgagcgcaacgcaattaatgtgagttagctcactcattaggcaccccaggctttacactttatgcttccggctcgtatgttgtgtggaattgtgagcggataacaatttcacacaggaaacagctatgaccatgattacgccaagctttgttgatacaaccataaaggaggtaaataatggagaaaaaaatcactggatataccaccgttgatatatcccaatggcatcgtaaagaacattttgaggcatttcagtcagttgctcaatgtacctataaccagaccgttcagctggatattacggcctttttaaagaccgtaaagaaaaataagcacaagttttatccggcctttattcacattcttgcccgcctgatgaatgctcatccggagttccgtatggcaatgaaagacggtgagctggtgatatgggatagtgttcacccttgttacaccgttttccatgagcaaactgaaacgttttcatcgctctggagtgaataccacgacgatttccggcagtttctacacatatattcgcaagatgtggcgtgttacggtgaaaacctggcctatttccctaaagggtttattgagaatatgtttttcgtctcagccaatccctgggtgagtttcaccagttttgatttaaacgtggccaatatggacaacttcttcgcccccgttttcactatgggcaaatattatacgcaaggcgacaaggtgctgatgccgctggcgattcaggttcatcatgccgtttgtgatggcttccatgtcggcagaatgcttaatgaattacaacagtactgcgatgagtggcagggcggggcgtaatttttttaaggcagttattggtgcccttctagagtccttactgcagtagttttgctgaaatactcgattcacaaaaatatcaacttatggttgttttgtgagatatcaatatatggttgttttgtggttaagttgctgattataaataattattaaatatcactttatggttgcatcaacaggtaccgagctcgaattcactggccgtcgttttacaacgtcgtgactgggaaaaccctggcgttacccaacttaatcgccttgcagcacatccccctttcgccagctggcgtaatagcgaagaggcccgcaccgatcgcccttcccaacagttgcgcagcctgaatggcgaatggcgcctgatgcggtattttctccttacgcatctgtgcggtatttcacaccgcatatggtgcactctcagtacaatctgctctgatgccgcatagttaagccagccccgacacccgccaacacccgctgacgcgccctgacgggcttgtctgctcccggcatccgcttacagacaagctgtgaccgtctccgggagctgcatgtgtcagaggttttcaccgtcatcaccgaaacgcgcgagacgaaagggcctcgtgatacgcctatttttataggttaatgtcatgataataatggtttcttagacgtcaggtggcacttttcggggaaatgtgcgcggaacccctatttgtttatttttctaaatacattcaaatatgtatccgctcatgagacaataaccctgataaatgcttcaataatattgaaaaaggaagagtatgagtattcaacatttccgtgtcgcccttattcccttttttgcggcattttgccttcctgtttttgctcacccagaaacgctggtgaaagtaaaagatgctgaagatcagttgggtgcacgagtgggttacatcgaactggatctcaacagcggtaagatccttgagagttttcgccccgaagaacgttttccaatgatgagcacttttaaagttctgctatgtggcgcggtattatcccgtattgacgccgggcaagagcaactcggtcgccgcatacactattctcagaatgacttggttgagtactcaccagtcacagaaaagcatcttacggatggcatgacagtaagagaattatgcagtgctgccataaccatgagtgataacactgcggccaacttacttctgacaacgatcggaggaccgaaggagctaaccgcttttttgcacaacatgggggatcatgtaactcgccttgatcgttgggaaccggagctgaatgaagccataccaaacgacgagcgtgacaccacgatgcctgtagcaatggcaacaacgttgcgcaaactattaactggcgaactacttactctagcttcccggcaacaattaatagactggatggaggcggataaagttgcaggaccacttctgcgctcggcccttccggctggctggtttattgctgataaatctggagccggtgagcgtgggtctcgcggtatc

SEQ ID NO: 68 - DNA, 3513 bp, Synthetic construct
  source 1..3513: mol_type = other DNA
attgcagcactggggccagatggtaagccctcccgtatcgtagttatctacacgacggggagtcaggcaactatggatgaacgaaatagacagatcgctgagataggtgcctcactgattaagcattggtaactgtcagaccaagtttactcatatatactttagattgatttaaaacttcatttttaatttaaaaggatctaggtgaagatcctttttgataatctcatgaccaaaatcccttaacgtgagttttcgttccactgagcgtcagaccccgtagaaaagatcaaaggatcttcttgagatcctttttttctgcgcgtaatctgctgcttgcaaacaaaaaaaccaccgctaccagcggtggtttgtttgccggatcaagagctaccaactctttttccgaaggtaactggcttcagcagagcgcagataccaaatactgttcttctagtgtagccgtagttaggccaccacttcaagaactctgtagcaccgcctacatacctcgctctgctaatcctgttaccagtggctgctgccagtggcgataagtcgtgtcttaccgggttggactcaagacgatagttaccggataaggcgcagcggtcgggctgaacggggggttcgtgcacacagcccagcttggagcgaacgacctacaccgaactgagatacctacagcgtgagctatgagaaagcgccacgcttcccgaagggagaaaggcggacaggtatccggtaagcggcagggtcggaacaggagagcgcacgagggagcttccagggggaaacgcctggtatctttatagtcctgtcgggtttcgccacctctgacttgagcgtcgatttttgtgatgctcgtcaggggggcggagcctatggaaaaacgccagcaacgcggcctttttacggttcctggccttttgctggccttttgctcacatgttctttcctgcgttatcccctgattctgtggataaccgtattaccgcctttgagtgagctgataccgctcgccgcagccgaacgaccgagcgcagcgagtcagtgagcgaggaagcggaagagcgcccaatacgcaaaccgcctctccccgcgcgttggccgattcattaatgcagctggcacgacaggtttcccgactggaaagcgggcagtgagcgcaacgcaattaatgtgagttagctcactcattaggcaccccaggctttacactttatgcttccggctcgtatgttgtgtggaattgtgagcggataacaatttcacacaggaaacagctatgaccatgattacgccaagctttgttgataggaggtaaataatggagaaaaaaatcactggatataccaccgttgatatatcccaatggcatcgtaaagaacattttgaggcatttcagtcagttgctcaatgtacctataaccagaccgttcagctggatattacggcctttttaaagaccgtaaagaaaaataagcacaagttttatccggcctttattcacattcttgcccgcctgatgaatgctcatccggagttccgtatggcaatgaaagacggtgagctggtgatatgggatagtgttcacccttgttacaccgttttccatgagcaaactgaaacgttttcatcgctctggagtgaataccacgacgatttccggcagtttctacacatatattcgcaagatgtggcgtgttacggtgaaaacctggcctatttccctaaagggtttattgagaatatgtttttcgtctcagccaatccctgggtgagtttcaccagttttgatttaaacgtggccaatatggacaacttcttcgcccccgttttcactatgggcaaatattatacgcaaggcgacaaggtgctgatgccgctggcgattcaggttcatcatgccgtttgtgatggcttccatgtcggcagaatgcttaatgaattacaacagtactgcgatgagtggcagggcggggcgtaatttttttaaggcagttattggtgcccttctagagtccttactgcagtagttttgctgaaatactcgattcacaaaaatatcaacttatggttgttttgtgagatatcaatatatggttgttttgtggttaagttgctgattataaataattattaaatatcactttatggttgcatcaacaggtaccgagctcgaattcactggccgtcgttttacaacgtcgtgactgggaaaaccctggcgttacccaacttaatcgccttgcagcacatccccctttcgccagctggcgtaatagcgaagaggcccgcaccgatcgcccttcccaacagttgcgcagcctgaatggcgaatggcgcctgatgcggtattttctccttacgcatctgtgcggtatttcacaccgcatatggtgcactctcagtacaatctgctctgatgccgcatagttaagccagccccgacacccgccaacacccgctgacgcgccctgacgggcttgtctgctcccggcatccgcttacagacaagctgtgaccgtctccgggagctgcatgtgtcagaggttttcaccgtcatcaccgaaacgcgcgagacgaaagggcctcgtgatacgcctatttttataggttaatgtcatgataataatggtttcttagacgtcaggtggcacttttcggggaaatgtgcgcggaacccctatttgtttatttttctaaatacattcaaatatgtatccgctcatgagacaataaccctgataaatgcttcaataatattgaaaaaggaagagtatgagtattcaacatttccgtgtcgcccttattcccttttttgcggcattttgccttcctgtttttgctcacccagaaacgctggtgaaagtaaaagatgctgaagatcagttgggtgcacgagtgggttacatcgaactggatctcaacagcggtaagatccttgagagttttcgccccgaagaacgttttccaatgatgagcacttttaaagttctgctatgtggcgcggtattatcccgtattgacgccgggcaagagcaactcggtcgccgcatacactattctcagaatgacttggttgagtactcaccagtcacagaaaagcatcttacggatggcatgacagtaagagaattatgcagtgctgccataaccatgagtgataacactgcggccaacttacttctgacaacgatcggaggaccgaaggagctaaccgcttttttgcacaacatgggggatcatgtaactcgccttgatcgttgggaaccggagctgaatgaagccataccaaacgacgagcgtgacaccacgatgcctgtagcaatggcaacaacgttgcgcaaactattaactggcgaactacttactctagcttcccggcaacaattaatagactggatggaggcggataaagttgcaggaccacttctgcgctcggcccttccggctggctggtttattgctgataaatctggagccggtgagcgtgggtctcgcggtatc

SEQ ID NO: 69 - DNA, 3626 bp, Synthetic construct
  source 1..3626: mol_type = other DNA
attgcagcactggggccagatggtaagccctcccgtatcgtagttatctacacgacggggagtcaggcaactatggatgaacgaaatagacagatcgctgagataggtgcctcactgattaagcattggtaactgtcagaccaagtttactcatatatactttagattgatttaaaacttcatttttaatttaaaaggatctaggtgaagatcctttttgataatctcatgaccaaaatcccttaacgtgagttttcgttccactgagcgtcagaccccgtagaaaagatcaaaggatcttcttgagatcctttttttctgcgcgtaatctgctgcttgcaaacaaaaaaaccaccgctaccagcggtggtttgtttgccggatcaagagctaccaactctttttccgaaggtaactggcttcagcagagcgcagataccaaatactgttcttctagtgtagccgtagttaggccaccacttcaagaactctgtagcaccgcctacatacctcgctctgctaatcctgttaccagtggctgctgccagtggcgataagtcgtgtcttaccgggttggactcaagacgatagttaccggataaggcgcagcggtcgggctgaacggggggttcgtgcacacagcccagcttggagcgaacgacctacaccgaactgagatacctacagcgtgagctatgagaaagcgccacgcttcccgaagggagaaaggcggacaggtatccggtaagcggcagggtcggaacaggagagcgcacgagggagcttccagggggaaacgcctggtatctttatagtcctgtcgggtttcgccacctctgacttgagcgtcgatttttgtgatgctcgtcaggggggcggagcctatggaaaaacgccagcaacgcggcctttttacggttcctggccttttgctggccttttgctcacatgttctttcctgcgttatcccctgattctgtggataaccgtattaccgcctttgagtgagctgataccgctcgccgcagccgaacgaccgagcgcagcgagtcagtgagcgaggaagcggaagagcgcccaatacgcaaaccgcctctccccgcgcgttggccgattcattaatgcagctggcacgacaggtttcccgactggaaagcgggcagtgagcgcaacgcaattaatgtgagttagctcactcattaggcaccccaggctttacactttatgcttccggctcgtatgttgtgtggaattgtgagcggataacaatttcacacaggaaacagctatgaccatgattacgccaagctttgttgatacaaccataaaatgataattacacccataaattgataattatcacacccataaattgatattgcctcttcatggtctaaacttcagtaagtttacgacattttcatgaagaggtcatttccggggatccatggagaaaaaaatcactggatataccaccgttgatatatcccaatggcatcgtaaagaacattttgaggcatttcagtcagttgctcaatgtacctataaccagaccgttcagctggatattacggcctttttaaagaccgtaaagaaaaataagcacaagttttatccggcctttattcacattcttgcccgcctgatgaatgctcatccggagttccgtatggcaatgaaagacggtgagctggtgatatgggatagtgttcacccttgttacaccgttttccatgagcaaactgaaacgttttcatcgctctggagtgaataccacgacgatttccggcagtttctacacatatattcgcaagatgtggcgtgttacggtgaaaacctggcctatttccctaaagggtttattgagaatatgtttttcgtctcagccaatccctgggtgagtttcaccagttttgatttaaacgtggccaatatggacaacttcttcgcccccgttttcactatgggcaaatattatacgcaaggcgacaaggtgctgatgccgctggcgattcaggttcatcatgccgtttgtgatggcttccatgtcggcagaatgcttaatgaattacaacagtactgcgatgagtggcagggcggggcgtaatttttttaaggcagttattggtgcccttctagcttactgcagtagttttgctgaaatactcgattcacaaaaatatcaacttatggttgttttgtgagatatcaatatatggttgttttgtggttaagttgctgattataaataattattaaatatcactttatggttgcatcaacaggtaccgagctcgaattcactggccgtcgttttacaacgtcgtgactgggaaaaccctggcgttacccaacttaatcgccttgcagcacatccccctttcgccagctggcgtaatagcgaagaggcccgcaccgatcgcccttcccaacagttgcgcagcctgaatggcgaatggcgcctgatgcggtattttctccttacgcatctgtgcggtatttcacaccgcatatggtgcactctcagtacaatctgctctgatgccgcatagttaagccagccccgacacccgccaacacccgctgacgcgccctgacgggcttgtctgctcccggcatccgcttacagacaagctgtgaccgtctccgggagctgcatgtgtcagaggttttcaccgtcatcaccgaaacgcgcgagacgaaagggcctcgtgatacgcctatttttataggttaatgtcatgataataatggtttcttagacgtcaggtggcacttttcggggaaatgtgcgcggaacccctatttgtttatttttctaaatacattcaaatatgtatccgctcatgagacaataaccctgataaatgcttcaataatattgaaaaaggaagagtatgagtattcaacatttccgtgtcgcccttattcccttttttgcggcattttgccttcctgtttttgctcacccagaaacgctggtgaaagtaaaagatgctgaagatcagttgggtgcacgagtgggttacatcgaactggatctcaacagcggtaagatccttgagagttttcgccccgaagaacgttttccaatgatgagcacttttaaagttctgctatgtggcgcggtattatcccgtattgacgccgggcaagagcaactcggtcgccgcatacactattctcagaatgacttggttgagtactcaccagtcacagaaaagcatcttacggatggcatgacagtaagagaattatgcagtgctgccataaccatgagtgataacactgcggccaacttacttctgacaacgatcggaggaccgaaggagctaaccgcttttttgcacaacatgggggatcatgtaactcgccttgatcgttgggaaccggagctgaatgaagccataccaaacgacgagcgtgacaccacgatgcctgtagcaatggcaacaacgttgcgcaaactattaactggcgaactacttactctagcttcccggcaacaattaatagactggatggaggcggataaagttgcaggaccacttctgcgctcggcccttccggctggctggtttattgctgataaatctggagccggtgagcgtgggtctcgcggtatc

SEQ ID NO: 70 - DNA, 3616 bp, Synthetic construct
  source 1..3616: mol_type = other DNA
caccgaactgagatacctacagcgtgagctatgagaaagcgccacgcttcccgaagggagaaaggcggacaggtatccggtaagcggcagggtcggaacaggagagcgcacgagggagcttccagggggaaacgcctggtatctttatagtcctgtcgggtttcgccacctctgacttgagcgtcgatttttgtgatgctcgtcaggggggcggagcctatggaaaaacgccagcaacgcggcctttttacggttcctggccttttgctggccttttgctcacatgttctttcctgcgttatcccctgattctgtggataaccgtattaccgcctttgagtgagctgataccgctcgccgcagccgaacgaccgagcgcagcgagtcagtgagcgaggaagcggaagagcgcccaatacgcaaaccgcctctccccgcgcgttggccgattcattaatgcagctggcacgacaggtttcccgactggaaagcgggcagtgagcgcaacgcaattaatgtgagttagctcactcattaggcaccccaggctttacactttatgcttccggctcgtatgttgtgtggaattgtgagcggataacaatttcacacaggaaacagctatgaccatgattacgccaagctttgttgatacaaccataaaatgataattacacccataaattgataattatcacacccataaattgatattgcctcttcatggtctaaacttcagtaagtttacgacattttcatgaagaggtcatttccggggatccatggagaaaaaaatcactggatataccaccgttgatatatcccaatggcatcgtaaagaacattttgaggcatttcagtcagttgctcaatgtacctataaccagaccgttcagctggatattacggcctttttaaagaccgtaaagaaaaataagcacaagttttatccggcctttattcacattcttgcccgcctgatgaatgctcatccggagttccgtatggcaatgaaagacggtgagctggtgatatgggatagtgttcacccttgttacaccgttttccatgagcaaactgaaacgttttcatcgctctggagtgaataccacgacgatttccggcagtttctacacatatattcgcaagatgtggcgtgttacggtgaaaacctggcctatttccctaaagggtttattgagaatatgtttttcgtctcagccaatccctgggtgagtttcaccagttttgatttaaacgtggccaatatggacaacttcttcgcccccgttttcactatgggcaaatattatacgcaaggcgacaaggtgctgatgccgctggcgattcaggttcatcatgccgtttgtgatggcttccatgtcggcagaatgcttaatgaattacaacagtactgcgatgagtggcagggcggggcgtaatttttttaaggcagttattggtgcccttctagtagttttgctgaaatactcgattcacaaaaatatcaacttatggttgttttgtgagatatcaatatatggttgttttgtggttaagttgctgattataaataattattaaatatcactttatggttgcatcaacaggtaccgagctcgaattcactggccgtcgttttacaacgtcgtgactgggaaaaccctggcgttacccaacttaatcgccttgcagcacatccccctttcgccagctggcgtaatagcgaagaggcccgcaccgatcgcccttcccaacagttgcgcagcctgaatggcgaatggcgcctgatgcggtattttctccttacgcatctgtgcggtatttcacaccgcatatggtgcactctcagtacaatctgctctgatgccgcatagttaagccagccccgacacccgccaacacccgctgacgcgccctgacgggcttgtctgctcccggcatccgcttacagacaagctgtgaccgtctccgggagctgcatgtgtcagaggttttcaccgtcatcaccgaaacgcgcgagacgaaagggcctcgtgatacgcctatttttataggttaatgtcatgataataatggtttcttagacgtcaggtggcacttttcggggaaatgtgcgcggaacccctatttgtttatttttctaaatacattcaaatatgtatccgctcatgagacaataaccctgataaatgcttcaataatattgaaaaaggaagagtatgagtattcaacatttccgtgtcgcccttattcccttttttgcggcattttgccttcctgtttttgctcacccagaaacgctggtgaaagtaaaagatgctgaagatcagttgggtgcacgagtgggttacatcgaactggatctcaacagcggtaagatccttgagagttttcgccccgaagaacgttttccaatgatgagcacttttaaagttctgctatgtggcgcggtattatcccgtattgacgccgggcaagagcaactcggtcgccgcatacactattctcagaatgacttggttgagtactcaccagtcacagaaaagcatcttacggatggcatgacagtaagagaattatgcagtgctgccataaccatgagtgataacactgcggccaacttacttctgacaacgatcggaggaccgaaggagctaaccgcttttttgcacaacatgggggatcatgtaactcgccttgatcgttgggaaccggagctgaatgaagccataccaaacgacgagcgtgacaccacgatgcctgtagcaatggcaacaacgttgcgcaaactattaactggcgaactacttactctagcttcccggcaacaattaatagactggatggaggcggataaagttgcaggaccacttctgcgctcggcccttccggctggctggtttattgctgataaatctggagccggtgagcgtgggtctcgcggtatcattgcagcactggggccagatggtaagccctcccgtatcgtagttatctacacgacggggagtcaggcaactatggatgaacgaaatagacagatcgctgagataggtgcctcactgattaagcattggtaactgtcagaccaagtttactcatatatactttagattgatttaaaacttcatttttaatttaaaaggatctaggtgaagatcctttttgataatctcatgaccaaaatcccttaacgtgagttttcgttccactgagcgtcagaccccgtagaaaagatcaaaggatcttcttgagatcctttttttctgcgcgtaatctgctgcttgcaaacaaaaaaaccaccgctaccagcggtggtttgtttgccggatcaagagctaccaactctttttccgaaggtaactggcttcagcagagcgcagataccaaatactgttcttctagtgtagccgtagttaggccaccacttcaagaactctgtagcaccgcctacatacctcgctctgctaatcctgttaccagtggctgctgccagtggcgataagtcgtgtcttaccgggttggactcaagacgatagttaccggataaggcgcagcggtcgggctgaacggggggttcgtgcacacagcccagcttggagcgaacgaccta

SEQ ID NO: 71 - DNA, 3606 bp, Synthetic construct
  source 1..3606: mol_type = other DNA
tgaaagtaaaagatgctgaagatcagttgggtgcacgagtgggttacatcgaactggatctcaacagcggtaagatccttgagagttttcgccccgaagaacgttttccaatgatgagcacttttaaagttctgctatgtggcgcggtattatcccgtattgacgccgggcaagagcaactcggtcgccgcatacactattctcagaatgacttggttgagtactcaccagtcacagaaaagcatcttacggatggcatgacagtaagagaattatgcagtgctgccataaccatgagtgataacactgcggccaacttacttctgacaacgatcggaggaccgaaggagctaaccgcttttttgcacaacatgggggatcatgtaactcgccttgatcgttgggaaccggagctgaatgaagccataccaaacgacgagcgtgacaccacgatgcctgtagcaatggcaacaacgttgcgcaaactattaactggcgaactacttactctagcttcccggcaacaattaatagactggatggaggcggataaagttgcaggaccacttctgcgctcggcccttccggctggctggtttattgctgataaatctggagccggtgagcgtgggtctcgcggtatcattgcagcactggggccagatggtaagccctcccgtatcgtagttatctacacgacggggagtcaggcaactatggatgaacgaaatagacagatcgctgagataggtgcctcactgattaagcattggtaactgtcagaccaagtttactcatatatactttagattgatttaaaacttcatttttaatttaaaaggatctaggtgaagatcctttttgataatctcatgaccaaaatcccttaacgtgagttttcgttccactgagcgtcagaccccgtagaaaagatcaaaggatcttcttgagatcctttttttctgcgcgtaatctgctgcttgcaaacaaaaaaaccaccgctaccagcggtggtttgtttgccggatcaagagctaccaactctttttccgaaggtaactggcttcagcagagcgcagataccaaatactgttcttctagtgtagccgtagttaggccaccacttcaagaactctgtagcaccgcctacatacctcgctctgctaatcctgttaccagtggctgctgccagtggcgataagtcgtgtcttaccgggttggactcaagacgatagttaccggataaggcgcagcggtcgggctgaacggggggttcgtgcacacagcccagcttggagcgaacgacctacaccgaactgagatacctacagcgtgagctatgagaaagcgccacgcttcccgaagggagaaaggcggacaggtatccggtaagcggcagggtcggaacaggagagcgcacgagggagcttccagggggaaacgcctggtatctttatagtcctgtcgggtttcgccacctctgacttgagcgtcgatttttgtgatgctcgtcaggggggcggagcctatggaaaaacgccagcaacgcggcctttttacggttcctggccttttgctggccttttgctcacatgttctttcctgcgttatcccctgattctgtggataaccgtattaccgcctttgagtgagctgataccgctcgccgcagccgaacgaccgagcgcagcgagtcagtgagcgaggaagcggaagagcgcccaatacgcaaaccgcctctccccgcgcgttggccgattcattaatgcagctggcacgacaggtttcccgactggaaagcgggcagtgagcgcaacgcaattaatgtgagttagctcactcattaggcaccccaggctttacactttatgcttccggctcgtatgttgtgtggaattgtgagcggataacaatttcacacaggaaacagctatgaccatgattacgccaagctttgttgatacaaccataaaatgataattacacccataaattgataattatcacacccataaattgatattgcctcttcatggtctaaacttcagtaagtttacgacattttcatgaagaggtcatttccggggatccatggagaaaaaaatcactggatataccaccgttgatatatcccaatggcatcgtaaagaacattttgaggcatttcagtcagttgctcaatgtacctataaccagaccgttcagctggatattacggcctttttaaagaccgtaaagaaaaataagcacaagttttatccggcctttattcacattcttgcccgcctgatgaatgctcatccggagttccgtatggcaatgaaagacggtgagctggtgatatgggatagtgttcacccttgttacaccgttttccatgagcaaactgaaacgttttcatcgctctggagtgaataccacgacgatttccggcagtttctacacatatattcgcaagatgtggcgtgttacggtgaaaacctggcctatttccctaaagggtttattgagaatatgtttttcgtctcagccaatccctgggtgagtttcaccagttttgatttaaacgtggccaatatggacaacttcttcgcccccgttttcactatgggcaaatattatacgcaaggcgacaaggtgctgatgccgctggcgattcaggttcatcatgccgtttgtgatggcttccatgtcggcagaatgcttaatgaattacaacagtactgcgatgagtggcagggcggggcgtaatttttttaaggcagttattggtgcccttctaggaaatactcgattcacaaaaatatcaacttatggttgttttgtgagatatcaatatatggttgttttgtggttaagttgctgattataaataattattaaatatcactttatggttgcatcaacaggtaccgagctcgaattcactggccgtcgttttacaacgtcgtgactgggaaaaccctggcgttacccaacttaatcgccttgcagcacatccccctttcgccagctggcgtaatagcgaagaggcccgcaccgatcgcccttcccaacagttgcgcagcctgaatggcgaatggcgcctgatgcggtattttctccttacgcatctgtgcggtatttcacaccgcatatggtgcactctcagtacaatctgctctgatgccgcatagttaagccagccccgacacccgccaacacccgctgacgcgccctgacgggcttgtctgctcccggcatccgcttacagacaagctgtgaccgtctccgggagctgcatgtgtcagaggttttcaccgtcatcaccgaaacgcgcgagacgaaagggcctcgtgatacgcctatttttataggttaatgtcatgataataatggtttcttagacgtcaggtggcacttttcggggaaatgtgcgcggaacccctatttgtttatttttctaaatacattcaaatatgtatccgctcatgagacaataaccctgataaatgcttcaataatattgaaaaaggaagagtatgagtattcaacatttccgtgtcgcccttattcccttttttgcggcattttgccttcctgtttttgctcacccagaaacgctgg

SEQ ID NO: 72 - DNA, 3596 bp, Synthetic construct
  source 1..3596: mol_type = other DNA
cgaacgacctacaccgaactgagatacctacagcgtgagctatgagaaagcgccacgcttcccgaagggagaaaggcggacaggtatccggtaagcggcagggtcggaacaggagagcgcacgagggagcttccagggggaaacgcctggtatctttatagtcctgtcgggtttcgccacctctgacttgagcgtcgatttttgtgatgctcgtcaggggggcggagcctatggaaaaacgccagcaacgcggcctttttacggttcctggccttttgctggccttttgctcacatgttctttcctgcgttatcccctgattctgtggataaccgtattaccgcctttgagtgagctgataccgctcgccgcagccgaacgaccgagcgcagcgagtcagtgagcgaggaagcggaagagcgcccaatacgcaaaccgcctctccccgcgcgttggccgattcattaatgcagctggcacgacaggtttcccgactggaaagcgggcagtgagcgcaacgcaattaatgtgagttagctcactcattaggcaccccaggctttacactttatgcttccggctcgtatgttgtgtggaattgtgagcggataacaatttcacacaggaaacagctatgaccatgattacgccaagctttgttgatacaaccataaaatgataattacacccataaattgataattatcacacccataaattgatattgcctcttcatggtctaaacttcagtaagtttacgacattttcatgaagaggtcatttccggggatccatggagaaaaaaatcactggatataccaccgttgatatatcccaatggcatcgtaaagaacattttgaggcatttcagtcagttgctcaatgtacctataaccagaccgttcagctggatattacggcctttttaaagaccgtaaagaaaaataagcacaagttttatccggcctttattcacattcttgcccgcctgatgaatgctcatccggagttccgtatggcaatgaaagacggtgagctggtgatatgggatagtgttcacccttgttacaccgttttccatgagcaaactgaaacgttttcatcgctctggagtgaataccacgacgatttccggcagtttctacacatatattcgcaagatgtggcgtgttacggtgaaaacctggcctatttccctaaagggtttattgagaatatgtttttcgtctcagccaatccctgggtgagtttcaccagttttgatttaaacgtggccaatatggacaacttcttcgcccccgttttcactatgggcaaatattatacgcaaggcgacaaggtgctgatgccgctggcgattcaggttcatcatgccgtttgtgatggcttccatgtcggcagaatgcttaatgaattacaacagtactgcgatgagtggcagggcggggcgtaatttttttaaggcagttattggtgcccttctagattcacaaaaatatcaacttatggttgttttgtgagatatcaatatatggttgttttgtggttaagttgctgattataaataattattaaatatcactttatggttgcatcaacaggtaccgagctcgaattcactggccgtcgttttacaacgtcgtgactgggaaaaccctggcgttacccaacttaatcgccttgcagcacatccccctttcgccagctggcgtaatagcgaagaggcccgcaccgatcgcccttcccaacagttgcgcagcctgaatggcgaatggcgcctgatgcggtattttctccttacgcatctgtgcggtatttcacaccgcatatggtgcactctcagtacaatctgctctgatgccgcatagttaagccagccccgacacccgccaacacccgctgacgcgccctgacgggcttgtctgctcccggcatccgcttacagacaagctgtgaccgtctccgggagctgcatgtgtcagaggttttcaccgtcatcaccgaaacgcgcgagacgaaagggcctcgtgatacgcctatttttataggttaatgtcatgataataatggtttcttagacgtcaggtggcacttttcggggaaatgtgcgcggaacccctatttgtttatttttctaaatacattcaaatatgtatccgctcatgagacaataaccctgataaatgcttcaataatattgaaaaaggaagagtatgagtattcaacatttccgtgtcgcccttattcccttttttgcggcattttgccttcctgtttttgctcacccagaaacgctggtgaaagtaaaagatgctgaagatcagttgggtgcacgagtgggttacatcgaactggatctcaacagcggtaagatccttgagagttttcgccccgaagaacgttttccaatgatgagcacttttaaagttctgctatgtggcgcggtattatcccgtattgacgccgggcaagagcaactcggtcgccgcatacactattctcagaatgacttggttgagtactcaccagtcacagaaaagcatcttacggatggcatgacagtaagagaattatgcagtgctgccataaccatgagtgataacactgcggccaacttacttctgacaacgatcggaggaccgaaggagctaaccgcttttttgcacaacatgggggatcatgtaactcgccttgatcgttgggaaccggagctgaatgaagccataccaaacgacgagcgtgacaccacgatgcctgtagcaatggcaacaacgttgcgcaaactattaactggcgaactacttactctagcttcccggcaacaattaatagactggatggaggcggataaagttgcaggaccacttctgcgctcggcccttccggctggctggtttattgctgataaatctggagccggtgagcgtgggtctcgcggtatcattgcagcactggggccagatggtaagccctcccgtatcgtagttatctacacgacggggagtcaggcaactatggatgaacgaaatagacagatcgctgagataggtgcctcactgattaagcattggtaactgtcagaccaagtttactcatatatactttagattgatttaaaacttcatttttaatttaaaaggatctaggtgaagatcctttttgataatctcatgaccaaaatcccttaacgtgagttttcgttccactgagcgtcagaccccgtagaaaagatcaaaggatcttcttgagatcctttttttctgcgcgtaatctgctgcttgcaaacaaaaaaaccaccgctaccagcggtggtttgtttgccggatcaagagctaccaactctttttccgaaggtaactggcttcagcagagcgcagataccaaatactgttcttctagtgtagccgtagttaggccaccacttcaagaactctgtagcaccgcctacatacctcgctctgctaatcctgttaccagtggctgctgccagtggcgataagtcgtgtcttaccgggttggactcaagacgatagttaccggataaggcgcagcggtcgggctgaacggggggttcgtgcacacagcccagcttggag

SEQ ID NO: 73 - DNA, 3586 bp, Synthetic construct
  source 1..3586: mol_type = other DNA
attgcagcactggggccagatggtaagccctcccgtatcgtagttatctacacgacggggagtcaggcaactatggatgaacgaaatagacagatcgctgagataggtgcctcactgattaagcattggtaactgtcagaccaagtttactcatatatactttagattgatttaaaacttcatttttaatttaaaaggatctaggtgaagatcctttttgataatctcatgaccaaaatcccttaacgtgagttttcgttccactgagcgtcagaccccgtagaaaagatcaaaggatcttcttgagatcctttttttctgcgcgtaatctgctgcttgcaaacaaaaaaaccaccgctaccagcggtggtttgtttgccggatcaagagctaccaactctttttccgaaggtaactggcttcagcagagcgcagataccaaatactgttcttctagtgtagccgtagttaggccaccacttcaagaactctgtagcaccgcctacatacctcgctctgctaatcctgttaccagtggctgctgccagtggcgataagtcgtgtcttaccgggttggactcaagacgatagttaccggataaggcgcagcggtcgggctgaacggggggttcgtgcacacagcccagcttggagcgaacgacctacaccgaactgagatacctacagcgtgagctatgagaaagcgccacgcttcccgaagggagaaaggcggacaggtatccggtaagcggcagggtcggaacaggagagcgcacgagggagcttccagggggaaacgcctggtatctttatagtcctgtcgggtttcgccacctctgacttgagcgtcgatttttgtgatgctcgtcaggggggcggagcctatggaaaaacgccagcaacgcggcctttttacggttcctggccttttgctggccttttgctcacatgttctttcctgcgttatcccctgattctgtggataaccgtattaccgcctttgagtgagctgataccgctcgccgcagccgaacgaccgagcgcagcgagtcagtgagcgaggaagcggaagagcgcccaatacgcaaaccgcctctccccgcgcgttggccgattcattaatgcagctggcacgacaggtttcccgactggaaagcgggcagtgagcgcaacgcaattaatgtgagttagctcactcattaggcaccccaggctttacactttatgcttccggctcgtatgttgtgtggaattgtgagcggataacaatttcacacaggaaacagctatgaccatgattacgccaagctttgttgatacaaccataaaatgataattacacccataaattgataattatcacacccataaattgatattgcctcttcatggtctaaacttcagtaagtttacgacattttcatgaagaggtcatttccggggatccatggagaaaaaaatcactggatataccaccgttgatatatcccaatggcatcgtaaagaacattttgaggcatttcagtcagttgctcaatgtacctataaccagaccgttcagctggatattacggcctttttaaagaccgtaaagaaaaataagcacaagttttatccggcctttattcacattcttgcccgcctgatgaatgctcatccggagttccgtatggcaatgaaagacggtgagctggtgatatgggatagtgttcacccttgttacaccgttttccatgagcaaactgaaacgttttcatcgctctggagtgaataccacgacgatttccggcagtttctacacatatattcgcaagatgtggcgtgttacggtgaaaacctggcctatttccctaaagggtttattgagaatatgtttttcgtctcagccaatccctgggtgagtttcaccagttttgatttaaacgtggccaatatggacaacttcttcgcccccgttttcactatgggcaaatattatacgcaaggcgacaaggtgctgatgccgctggcgattcaggttcatcatgccgtttgtgatggcttccatgtcggcagaatgcttaatgaattacaacagtactgcgatgagtggcagggcggggcgtaatttttttaaggcagttattggtgcccttctagatatcaacttatggttgttttgtgagatatcaatatatggttgttttgtggttaagttgctgattataaataattattaaatatcactttatggttgcatcaacaggtaccgagctcgaattcactggccgtcgttttacaacgtcgtgactgggaaaaccctggcgttacccaacttaatcgccttgcagcacatccccctttcgccagctggcgtaatagcgaagaggcccgcaccgatcgcccttcccaacagttgcgcagcctgaatggcgaatggcgcctgatgcggtattttctccttacgcatctgtgcggtatttcacaccgcatatggtgcactctcagtacaatctgctctgatgccgcatagttaagccagccccgacacccgccaacacccgctgacgcgccctgacgggcttgtctgctcccggcatccgcttacagacaagctgtgaccgtctccgggagctgcatgtgtcagaggttttcaccgtcatcaccgaaacgcgcgagacgaaagggcctcgtgatacgcctatttttataggttaatgtcatgataataatggtttcttagacgtcaggtggcacttttcggggaaatgtgcgcggaacccctatttgtttatttttctaaatacattcaaatatgtatccgctcatgagacaataaccctgataaatgcttcaataatattgaaaaaggaagagtatgagtattcaacatttccgtgtcgcccttattcccttttttgcggcattttgccttcctgtttttgctcacccagaaacgctggtgaaagtaaaagatgctgaagatcagttgggtgcacgagtgggttacatcgaactggatctcaacagcggtaagatccttgagagttttcgccccgaagaacgttttccaatgatgagcacttttaaagttctgctatgtggcgcggtattatcccgtattgacgccgggcaagagcaactcggtcgccgcatacactattctcagaatgacttggttgagtactcaccagtcacagaaaagcatcttacggatggcatgacagtaagagaattatgcagtgctgccataaccatgagtgataacactgcggccaacttacttctgacaacgatcggaggaccgaaggagctaaccgcttttttgcacaacatgggggatcatgtaactcgccttgatcgttgggaaccggagctgaatgaagccataccaaacgacgagcgtgacaccacgatgcctgtagcaatggcaacaacgttgcgcaaactattaactggcgaactacttactctagcttcccggcaacaattaatagactggatggaggcggataaagttgcaggaccacttctgcgctcggcccttccggctggctggtttattgctgataaatctggagccggtgagcgtgggtctcgcggtatc

SEQ ID NO: 74 - DNA, 3576 bp, Synthetic construct
  source 1..3576: mol_type = other DNA
attgcagcactggggccagatggtaagccctcccgtatcgtagttatctacacgacggggagtcaggcaactatggatgaacgaaatagacagatcgctgagataggtgcctcactgattaagcattggtaactgtcagaccaagtttactcatatatactttagattgatttaaaacttcatttttaatttaaaaggatctaggtgaagatcctttttgataatctcatgaccaaaatcccttaacgtgagttttcgttccactgagcgtcagaccccgtagaaaagatcaaaggatcttcttgagatcctttttttctgcgcgtaatctgctgcttgcaaacaaaaaaaccaccgctaccagcggtggtttgtttgccggatcaagagctaccaactctttttccgaaggtaactggcttcagcagagcgcagataccaaatactgttcttctagtgtagccgtagttaggccaccacttcaagaactctgtagcaccgcctacatacctcgctctgctaatcctgttaccagtggctgctgccagtggcgataagtcgtgtcttaccgggttggactcaagacgatagttaccggataaggcgcagcggtcgggctgaacggggggttcgtgcacacagcccagcttggagcgaacgacctacaccgaactgagatacctacagcgtgagctatgagaaagcgccacgcttcccgaagggagaaaggcggacaggtatccggtaagcggcagggtcggaacaggagagcgcacgagggagcttccagggggaaacgcctggtatctttatagtcctgtcgggtttcgccacctctgacttgagcgtcgatttttgtgatgctcgtcaggggggcggagcctatggaaaaacgccagcaacgcggcctttttacggttcctggccttttgctggccttttgctcacatgttctttcctgcgttatcccctgattctgtggataaccgtattaccgcctttgagtgagctgataccgctcgccgcagccgaacgaccgagcgcagcgagtcagtgagcgaggaagcggaagagcgcccaatacgcaaaccgcctctccccgcgcgttggccgattcattaatgcagctggcacgacaggtttcccgactggaaagcgggcagtgagcgcaacgcaattaatgtgagttagctcactcattaggcaccccaggctttacactttatgcttccggctcgtatgttgtgtggaattgtgagcggataacaatttcacacaggaaacagctatgaccatgattacgccaagctttgttgatacaaccataaaatgataattacacccataaattgataattatcacacccataaattgatattgcctcttcatggtctaaacttcagtaagtttacgacattttcatgaagaggtcatttccggggatccatggagaaaaaaatcactggatataccaccgttgatatatcccaatggcatcgtaaagaacattttgaggcatttcagtcagttgctcaatgtacctataaccagaccgttcagctggatattacggcctttttaaagaccgtaaagaaaaataagcacaagttttatccggcctttattcacattcttgcccgcctgatgaatgctcatccggagttccgtatggcaatgaaagacggtgagctggtgatatgggatagtgttcacccttgttacaccgttttccatgagcaaactgaaacgttttcatcgctctggagtgaataccacgacgatttccggcagtttctacacatatattcgcaagatgtggcgtgttacggtgaaaacctggcctatttccctaaagggtttattgagaatatgtttttcgtctcagccaatccctgggtgagtttcaccagttttgatttaaacgtggccaatatggacaacttcttcgcccccgttttcactatgggcaaatattatacgcaaggcgacaaggtgctgatgccgctggcgattcaggttcatcatgccgtttgtgatggcttccatgtcggcagaatgcttaatgaattacaacagtactgcgatgagtggcagggcggggcgtaatttttttaaggcagttattggtgcccttctagatggttgttttgtgagatatcaatatatggttgttttgtggttaagttgctgattataaataattattaaatatcactttatggttgcatcaacaggtaccgagctcgaattcactggccgtcgttttacaacgtcgtgactgggaaaaccctggcgttacccaacttaatcgccttgcagcacatccccctttcgccagctggcgtaatagcgaagaggcccgcaccgatcgcccttcccaacagttgcgcagcctgaatggcgaatggcgcctgatgcggtattttctccttacgcatctgtgcggtatttcacaccgcatatggtgcactctcagtacaatctgctctgatgccgcatagttaagccagccccgacacccgccaacacccgctgacgcgccctgacgggcttgtctgctcccggcatccgcttacagacaagctgtgaccgtctccgggagctgcatgtgtcagaggttttcaccgtcatcaccgaaacgcgcgagacgaaagggcctcgtgatacgcctatttttataggttaatgtcatgataataatggtttcttagacgtcaggtggcacttttcggggaaatgtgcgcggaacccctatttgtttatttttctaaatacattcaaatatgtatccgctcatgagacaataaccctgataaatgcttcaataatattgaaaaaggaagagtatgagtattcaacatttccgtgtcgcccttattcccttttttgcggcattttgccttcctgtttttgctcacccagaaacgctggtgaaagtaaaagatgctgaagatcagttgggtgcacgagtgggttacatcgaactggatctcaacagcggtaagatccttgagagttttcgccccgaagaacgttttccaatgatgagcacttttaaagttctgctatgtggcgcggtattatcccgtattgacgccgggcaagagcaactcggtcgccgcatacactattctcagaatgacttggttgagtactcaccagtcacagaaaagcatcttacggatggcatgacagtaagagaattatgcagtgctgccataaccatgagtgataacactgcggccaacttacttctgacaacgatcggaggaccgaaggagctaaccgcttttttgcacaacatgggggatcatgtaactcgccttgatcgttgggaaccggagctgaatgaagccataccaaacgacgagcgtgacaccacgatgcctgtagcaatggcaacaacgttgcgcaaactattaactggcgaactacttactctagcttcccggcaacaattaatagactggatggaggcggataaagttgcaggaccacttctgcgctcggcccttccggctggctggtttattgctgataaatctggagccggtgagcgtgggtctcgcggtatc

SEQ ID NO: 75 - DNA, 3566 bp, Synthetic construct
  source 1..3566: mol_type = other DNA
attgcagcactggggccagatggtaagccctcccgtatcgtagttatctacacgacggggagtcaggcaactatggatgaacgaaatagacagatcgctgagataggtgcctcactgattaagcattggtaactgtcagaccaagtttactcatatatactttagattgatttaaaacttcatttttaatttaaaaggatctaggtgaagatcctttttgataatctcatgaccaaaatcccttaacgtgagttttcgttccactgagcgtcagaccccgtagaaaagatcaaaggatcttcttgagatcctttttttctgcgcgtaatctgctgcttgcaaacaaaaaaaccaccgctaccagcggtggtttgtttgccggatcaagagctaccaactctttttccgaaggtaactggcttcagcagagcgcagataccaaatactgttcttctagtgtagccgtagttaggccaccacttcaagaactctgtagcaccgcctacatacctcgctctgctaatcctgttaccagtggctgctgccagtggcgataagtcgtgtcttaccgggttggactcaagacgatagttaccggataaggcgcagcggtcgggctgaacggggggttcgtgcacacagcccagcttggagcgaacgacctacaccgaactgagatacctacagcgtgagctatgagaaagcgccacgcttcccgaagggagaaaggcggacaggtatccggtaagcggcagggtcggaacaggagagcgcacgagggagcttccagggggaaacgcctggtatctttatagtcctgtcgggtttcgccacctctgacttgagcgtcgatttttgtgatgctcgtcaggggggcggagcctatggaaaaacgccagcaacgcggcctttttacggttcctggccttttgctggccttttgctcacatgttctttcctgcgttatcccctgattctgtggataaccgtattaccgcctttgagtgagctgataccgctcgccgcagccgaacgaccgagcgcagcgagtcagtgagcgaggaagcggaagagcgcccaatacgcaaaccgcctctccccgcgcgttggccgattcattaatgcagctggcacgacaggtttcccgactggaaagcgggcagtgagcgcaacgcaattaatgtgagttagctcactcattaggcaccccaggctttacactttatgcttccggctcgtatgttgtgtggaattgtgagcggataacaatttcacacaggaaacagctatgaccatgattacgccaagctttgttgatacaaccataaaatgataattacacccataaattgataattatcacacccataaattgatattgcctcttcatggtctaaacttcagtaagtttacgacattttcatgaagaggtcatttccggggatccatggagaaaaaaatcactggatataccaccgttgatatatcccaatggcatcgtaaagaacattttgaggcatttcagtcagttgctcaatgtacctataaccagaccgttcagctggatattacggcctttttaaagaccgtaaagaaaaataagcacaagttttatccggcctttattcacattcttgcccgcctgatgaatgctcatccggagttccgtatggcaatgaaagacggtgagctggtgatatgggatagtgttcacccttgttacaccgttttccatgagcaaactgaaacgttttcatcgctctggagtgaataccacgacgatttccggcagtttctacacatatattcgcaagatgtggcgtgttacggtgaaaacctggcctatttccctaaagggtttattgagaatatgtttttcgtctcagccaatccctgggtgagtttcaccagttttgatttaaacgtggccaatatggacaacttcttcgcccccgttttcactatgggcaaatattatacgcaaggcgacaaggtgctgatgccgctggcgattcaggttcatcatgccgtttgtgatggcttccatgtcggcagaatgcttaatgaattacaacagtactgcgatgagtggcagggcggggcgtaatttttttaaggcagttattggtgcccttctagtgtgagatatcaatatatggttgttttgtggttaagttgctgattataaataattattaaatatcactttatggttgcatcaacaggtaccgagctcgaattcactggccgtcgttttacaacgtcgtgactgggaaaaccctggcgttacccaacttaatcgccttgcagcacatccccctttcgccagctggcgtaatagcgaagaggcccgcaccgatcgcccttcccaacagttgcgcagcctgaatggcgaatggcgcctgatgcggtattttctccttacgcatctgtgcggtatttcacaccgcatatggtgcactctcagtacaatctgctctgatgccgcatagttaagccagccccgacacccgccaacacccgctgacgcgccctgacgggcttgtctgctcccggcatccgcttacagacaagctgtgaccgtctccgggagctgcatgtgtcagaggttttcaccgtcatcaccgaaacgcgcgagacgaaagggcctcgtgatacgcctatttttataggttaatgtcatgataataatggtttcttagacgtcaggtggcacttttcggggaaatgtgcgcggaacccctatttgtttatttttctaaatacattcaaatatgtatccgctcatgagacaataaccctgataaatgcttcaataatattgaaaaaggaagagtatgagtattcaacatttccgtgtcgcccttattcccttttttgcggcattttgccttcctgtttttgctcacccagaaacgctggtgaaagtaaaagatgctgaagatcagttgggtgcacgagtgggttacatcgaactggatctcaacagcggtaagatccttgagagttttcgccccgaagaacgttttccaatgatgagcacttttaaagttctgctatgtggcgcggtattatcccgtattgacgccgggcaagagcaactcggtcgccgcatacactattctcagaatgacttggttgagtactcaccagtcacagaaaagcatcttacggatggcatgacagtaagagaattatgcagtgctgccataaccatgagtgataacactgcggccaacttacttctgacaacgatcggaggaccgaaggagctaaccgcttttttgcacaacatgggggatcatgtaactcgccttgatcgttgggaaccggagctgaatgaagccataccaaacgacgagcgtgacaccacgatgcctgtagcaatggcaacaacgttgcgcaaactattaactggcgaactacttactctagcttcccggcaacaattaatagactggatggaggcggataaagttgcaggaccacttctgcgctcggcccttccggctggctggtttattgctgataaatctggagccggtgagcgtgggtctcgcggtatc

SEQ ID NO: 76 - DNA, 3556 bp, Synthetic construct
  source 1..3556: mol_type = other DNA
caggaaacagctatgaccatgattacgccaagctttgttgatacaaccataaaatgataattacacccataaattgataattatcacacccataaattgatattgcctcttcatggtctaaacttcagtaagtttacgacattttcatgaagaggtcatttccggggatccatggagaaaaaaatcactggatataccaccgttgatatatcccaatggcatcgtaaagaacattttgaggcatttcagtcagttgctcaatgtacctataaccagaccgttcagctggatattacggcctttttaaagaccgtaaagaaaaataagcacaagttttatccggcctttattcacattcttgcccgcctgatgaatgctcatccggagttccgtatggcaatgaaagacggtgagctggtgatatgggatagtgttcacccttgttacaccgttttccatgagcaaactgaaacgttttcatcgctctggagtgaataccacgacgatttccggcagtttctacacatatattcgcaagatgtggcgtgttacggtgaaaacctggcctatttccctaaagggtttattgagaatatgtttttcgtctcagccaatccctgggtgagtttcaccagttttgatttaaacgtggccaatatggacaacttcttcgcccccgttttcactatgggcaaatattatacgcaaggcgacaaggtgctgatgccgctggcgattcaggttcatcatgccgtttgtgatggcttccatgtcggcagaatgcttaatgaattacaacagtactgcgatgagtggcagggcggggcgtaatttttttaaggcagttattggtgcccttctagcaatatatggttgttttgtggttaagttgctgattataaataattattaaatatcactttatggttgcatcaacaggtaccgagctcgaattcactggccgtcgttttacaacgtcgtgactgggaaaaccctggcgttacccaacttaatcgccttgcagcacatccccctttcgccagctggcgtaatagcgaagaggcccgcaccgatcgcccttcccaacagttgcgcagcctgaatggcgaatggcgcctgatgcggtattttctccttacgcatctgtgcggtatttcacaccgcatatggtgcactctcagtacaatctgctctgatgccgcatagttaagccagccccgacacccgccaacacccgctgacgcgccctgacgggcttgtctgctcccggcatccgcttacagacaagctgtgaccgtctccgggagctgcatgtgtcagaggttttcaccgtcatcaccgaaacgcgcgagacgaaagggcctcgtgatacgcctatttttataggttaatgtcatgataataatggtttcttagacgtcaggtggcacttttcggggaaatgtgcgcggaacccctatttgtttatttttctaaatacattcaaatatgtatccgctcatgagacaataaccctgataaatgcttcaataatattgaaaaaggaagagtatgagtattcaacatttccgtgtcgcccttattcccttttttgcggcattttgccttcctgtttttgctcacccagaaacgctggtgaaagtaaaagatgctgaagatcagttgggtgcacgagtgggttacatcgaactggatctcaacagcggtaagatccttgagagttttcgccccgaagaacgttttccaatgatgagcacttttaaagttctgctatgtggcgcggtattatcccgtattgacgccgggcaagagcaactcggtcgccgcatacactattctcagaatgacttggttgagtactcaccagtcacagaaaagcatcttacggatggcatgacagtaagagaattatgcagtgctgccataaccatgagtgataacactgcggccaacttacttctgacaacgatcggaggaccgaaggagctaaccgcttttttgcacaacatgggggatcatgtaactcgccttgatcgttgggaaccggagctgaatgaagccataccaaacgacgagcgtgacaccacgatgcctgtagcaatggcaacaacgttgcgcaaactattaactggcgaactacttactctagcttcccggcaacaattaatagactggatggaggcggataaagttgcaggaccacttctgcgctcggcccttccggctggctggtttattgctgataaatctggagccggtgagcgtgggtctcgcggtatcattgcagcactggggccagatggtaagccctcccgtatcgtagttatctacacgacggggagtcaggcaactatggatgaacgaaatagacagatcgctgagataggtgcctcactgattaagcattggtaactgtcagaccaagtttactcatatatactttagattgatttaaaacttcatttttaatttaaaaggatctaggtgaagatcctttttgataatctcatgaccaaaatcccttaacgtgagttttcgttccactgagcgtcagaccccgtagaaaagatcaaaggatcttcttgagatcctttttttctgcgcgtaatctgctgcttgcaaacaaaaaaaccaccgctaccagcggtggtttgtttgccggatcaagagctaccaactctttttccgaaggtaactggcttcagcagagcgcagataccaaatactgttcttctagtgtagccgtagttaggccaccacttcaagaactctgtagcaccgcctacatacctcgctctgctaatcctgttaccagtggctgctgccagtggcgataagtcgtgtcttaccgggttggactcaagacgatagttaccggataaggcgcagcggtcgggctgaacggggggttcgtgcacacagcccagcttggagcgaacgacctacaccgaactgagatacctacagcgtgagctatgagaaagcgccacgcttcccgaagggagaaaggcggacaggtatccggtaagcggcagggtcggaacaggagagcgcacgagggagcttccagggggaaacgcctggtatctttatagtcctgtcgggtttcgccacctctgacttgagcgtcgatttttgtgatgctcgtcaggggggcggagcctatggaaaaacgccagcaacgcggcctttttacggttcctggccttttgctggccttttgctcacatgttctttcctgcgttatcccctgattctgtggataaccgtattaccgcctttgagtgagctgataccgctcgccgcagccgaacgaccgagcgcagcgagtcagtgagcgaggaagcggaagagcgcccaatacgcaaaccgcctctccccgcgcgttggccgattcattaatgcagctggcacgacaggtttcccgactggaaagcgggcagtgagcgcaacgcaattaatgtgagttagctcactcattaggcaccccaggctttacactttatgcttccggctcgtatgttgtgtggaattgtgagcggataacaatttcaca

SEQ ID NO: 77 - DNA, 3546 bp, Synthetic construct
  source 1..3546: mol_type = other DNA
cccctgattctgtggataaccgtattaccgcctttgagtgagctgataccgctcgccgcagccgaacgaccgagcgcagcgagtcagtgagcgaggaagcggaagagcgcccaatacgcaaaccgcctctccccgcgcgttggccgattcattaatgcagctggcacgacaggtttcccgactggaaagcgggcagtgagcgcaacgcaattaatgtgagttagctcactcattaggcaccccaggctttacactttatgcttccggctcgtatgttgtgtggaattgtgagcggataacaatttcacacaggaaacagctatgaccatgattacgccaagctttgttgatacaaccataaaatgataattacacccataaattgataattatcacacccataaattgatattgcctcttcatggtctaaacttcagtaagtttacgacattttcatgaagaggtcatttccggggatccatggagaaaaaaatcactggatataccaccgttgatatatcccaatggcatcgtaaagaacattttgaggcatttcagtcagttgctcaatgtacctataaccagaccgttcagctggatattacggcctttttaaagaccgtaaagaaaaataagcacaagttttatccggcctttattcacattcttgcccgcctgatgaatgctcatccggagttccgtatggcaatgaaagacggtgagctggtgatatgggatagtgttcacccttgttacaccgttttccatgagcaaactgaaacgttttcatcgctctggagtgaataccacgacgatttccggcagtttctacacatatattcgcaagatgtggcgtgttacggtgaaaacctggcctatttccctaaagggtttattgagaatatgtttttcgtctcagccaatccctgggtgagtttcaccagttttgatttaaacgtggccaatatggacaacttcttcgcccccgttttcactatgggcaaatattatacgcaaggcgacaaggtgctgatgccgctggcgattcaggttcatcatgccgtttgtgatggcttccatgtcggcagaatgcttaatgaattacaacagtactgcgatgagtggcagggcggggcgtaatttttttaaggcagttattggtgcccttctagttgttttgtggttaagttgctgattataaataattattaaatatcactttatggttgcatcaacaggtaccgagctcgaattcactggccgtcgttttacaacgtcgtgactgggaaaaccctggcgttacccaacttaatcgccttgcagcacatccccctttcgccagctggcgtaatagcgaagaggcccgcaccgatcgcccttcccaacagttgcgcagcctgaatggcgaatggcgcctgatgcggtattttctccttacgcatctgtgcggtatttcacaccgcatatggtgcactctcagtacaatctgctctgatgccgcatagttaagccagccccgacacccgccaacacccgctgacgcgccctgacgggcttgtctgctcccggcatccgcttacagacaagctgtgaccgtctccgggagctgcatgtgtcagaggttttcaccgtcatcaccgaaacgcgcgagacgaaagggcctcgtgatacgcctatttttataggttaatgtcatgataataatggtttcttagacgtcaggtggcacttttcggggaaatgtgcgcggaacccctatttgtttatttttctaaatacattcaaatatgtatccgctcatgagacaataaccctgataaatgcttcaataatattgaaaaaggaagagtatgagtattcaacatttccgtgtcgcccttattcccttttttgcggcattttgccttcctgtttttgctcacccagaaacgctggtgaaagtaaaagatgctgaagatcagttgggtgcacgagtgggttacatcgaactggatctcaacagcggtaagatccttgagagttttcgccccgaagaacgttttccaatgatgagcacttttaaagttctgctatgtggcgcggtattatcccgtattgacgccgggcaagagcaactcggtcgccgcatacactattctcagaatgacttggttgagtactcaccagtcacagaaaagcatcttacggatggcatgacagtaagagaattatgcagtgctgccataaccatgagtgataacactgcggccaacttacttctgacaacgatcggaggaccgaaggagctaaccgcttttttgcacaacatgggggatcatgtaactcgccttgatcgttgggaaccggagctgaatgaagccataccaaacgacgagcgtgacaccacgatgcctgtagcaatggcaacaacgttgcgcaaactattaactggcgaactacttactctagcttcccggcaacaattaatagactggatggaggcggataaagttgcaggaccacttctgcgctcggcccttccggctggctggtttattgctgataaatctggagccggtgagcgtgggtctcgcggtatcattgcagcactggggccagatggtaagccctcccgtatcgtagttatctacacgacggggagtcaggcaactatggatgaacgaaatagacagatcgctgagataggtgcctcactgattaagcattggtaactgtcagaccaagtttactcatatatactttagattgatttaaaacttcatttttaatttaaaaggatctaggtgaagatcctttttgataatctcatgaccaaaatcccttaacgtgagttttcgttccactgagcgtcagaccccgtagaaaagatcaaaggatcttcttgagatcctttttttctgcgcgtaatctgctgcttgcaaacaaaaaaaccaccgctaccagcggtggtttgtttgccggatcaagagctaccaactctttttccgaaggtaactggcttcagcagagcgcagataccaaatactgttcttctagtgtagccgtagttaggccaccacttcaagaactctgtagcaccgcctacatacctcgctctgctaatcctgttaccagtggctgctgccagtggcgataagtcgtgtcttaccgggttggactcaagacgatagttaccggataaggcgcagcggtcgggctgaacggggggttcgtgcacacagcccagcttggagcgaacgacctacaccgaactgagatacctacagcgtgagctatgagaaagcgccacgcttcccgaagggagaaaggcggacaggtatccggtaagcggcagggtcggaacaggagagcgcacgagggagcttccagggggaaacgcctggtatctttatagtcctgtcgggtttcgccacctctgacttgagcgtcgatttttgtgatgctcgtcaggggggcggagcctatggaaaaacgccagcaacgcggcctttttacggttcctggccttttgctggccttttgctcacatgttctttcctgcgttat

SEQ ID NO: 78 - DNA, 3536 bp, Synthetic construct
  source 1..3536: mol_type = other DNA
cccctgattctgtggataaccgtattaccgcctttgagtgagctgataccgctcgccgcagccgaacgaccgagcgcagcgagtcagtgagcgaggaagcggaagagcgcccaatacgcaaaccgcctctccccgcgcgttggccgattcattaatgcagctggcacgacaggtttcccgactggaaagcgggcagtgagcgcaacgcaattaatgtgagttagctcactcattaggcaccccaggctttacactttatgcttccggctcgtatgttgtgtggaattgtgagcggataacaatttcacacaggaaacagctatgaccatgattacgccaagctttgttgatacaaccataaaatgataattacacccataaattgataattatcacacccataaattgatattgcctcttcatggtctaaacttcagtaagtttacgacattttcatgaagaggtcatttccggggatccatggagaaaaaaatcactggatataccaccgttgatatatcccaatggcatcgtaaagaacattttgaggcatttcagtcagttgctcaatgtacctataaccagaccgttcagctggatattacggcctttttaaagaccgtaaagaaaaataagcacaagttttatccggcctttattcacattcttgcccgcctgatgaatgctcatccggagttccgtatggcaatgaaagacggtgagctggtgatatgggatagtgttcacccttgttacaccgttttccatgagcaaactgaaacgttttcatcgctctggagtgaataccacgacgatttccggcagtttctacacatatattcgcaagatgtggcgtgttacggtgaaaacctggcctatttccctaaagggtttattgagaatatgtttttcgtctcagccaatccctgggtgagtttcaccagttttgatttaaacgtggccaatatggacaacttcttcgcccccgttttcactatgggcaaatattatacgcaaggcgacaaggtgctgatgccgctggcgattcaggttcatcatgccgtttgtgatggcttccatgtcggcagaatgcttaatgaattacaacagtactgcgatgagtggcagggcggggcgtaatttttttaaggcagttattggtgcccttctaggttaagttgctgattataaataattattaaatatcactttatggttgcatcaacaggtaccgagctcgaattcactggccgtcgttttacaacgtcgtgactgggaaaaccctggcgttacccaacttaatcgccttgcagcacatccccctttcgccagctggcgtaatagcgaagaggcccgcaccgatcgcccttcccaacagttgcgcagcctgaatggcgaatggcgcctgatgcggtattttctccttacgcatctgtgcggtatttcacaccgcatatggtgcactctcagtacaatctgctctgatgccgcatagttaagccagccccgacacccgccaacacccgctgacgcgccctgacgggcttgtctgctcccggcatccgcttacagacaagctgtgaccgtctccgggagctgcatgtgtcagaggttttcaccgtcatcaccgaaacgcgcgagacgaaagggcctcgtgatacgcctatttttataggttaatgtcatgataataatggtttcttagacgtcaggtggcacttttcggggaaatgtgcgcggaacccctatttgtttatttttctaaatacattcaaatatgtatccgctcatgagacaataaccctgataaatgcttcaataatattgaaaaaggaagagtatgagtattcaacatttccgtgtcgcccttattcccttttttgcggcattttgccttcctgtttttgctcacccagaaacgctggtgaaagtaaaagatgctgaagatcagttgggtgcacgagtgggttacatcgaactggatctcaacagcggtaagatccttgagagttttcgccccgaagaacgttttccaatgatgagcacttttaaagttctgctatgtggcgcggtattatcccgtattgacgccgggcaagagcaactcggtcgccgcatacactattctcagaatgacttggttgagtactcaccagtcacagaaaagcatcttacggatggcatgacagtaagagaattatgcagtgctgccataaccatgagtgataacactgcggccaacttacttctgacaacgatcggaggaccgaaggagctaaccgcttttttgcacaacatgggggatcatgtaactcgccttgatcgttgggaaccggagctgaatgaagccataccaaacgacgagcgtgacaccacgatgcctgtagcaatggcaacaacgttgcgcaaactattaactggcgaactacttactctagcttcccggcaacaattaatagactggatggaggcggataaagttgcaggaccacttctgcgctcggcccttccggctggctggtttattgctgataaatctggagccggtgagcgtgggtctcgcggtatcattgcagcactggggccagatggtaagccctcccgtatcgtagttatctacacgacggggagtcaggcaactatggatgaacgaaatagacagatcgctgagataggtgcctcactgattaagcattggtaactgtcagaccaagtttactcatatatactttagattgatttaaaacttcatttttaatttaaaaggatctaggtgaagatcctttttgataatctcatgaccaaaatcccttaacgtgagttttcgttccactgagcgtcagaccccgtagaaaagatcaaaggatcttcttgagatcctttttttctgcgcgtaatctgctgcttgcaaacaaaaaaaccaccgctaccagcggtggtttgtttgccggatcaagagctaccaactctttttccgaaggtaactggcttcagcagagcgcagataccaaatactgttcttctagtgtagccgtagttaggccaccacttcaagaactctgtagcaccgcctacatacctcgctctgctaatcctgttaccagtggctgctgccagtggcgataagtcgtgtcttaccgggttggactcaagacgatagttaccggataaggcgcagcggtcgggctgaacggggggttcgtgcacacagcccagcttggagcgaacgacctacaccgaactgagatacctacagcgtgagctatgagaaagcgccacgcttcccgaagggagaaaggcggacaggtatccggtaagcggcagggtcggaacaggagagcgcacgagggagcttccagggggaaacgcctggtatctttatagtcctgtcgggtttcgccacctctgacttgagcgtcgatttttgtgatgctcgtcaggggggcggagcctatggaaaaacgccagcaacgcggcctttttacggttcctggccttttgctggccttttgctcacatgttctttcctgcgttat

SEQ ID NO: 79 - DNA, 3526 bp, Synthetic construct
  source 1..3526: mol_type = other DNA
cccctgattctgtggataaccgtattaccgcctttgagtgagctgataccgctcgccgcagccgaacgaccgagcgcagcgagtcagtgagcgaggaagcggaagagcgcccaatacgcaaaccgcctctccccgcgcgttggccgattcattaatgcagctggcacgacaggtttcccgactggaaagcgggcagtgagcgcaacgcaattaatgtgagttagctcactcattaggcaccccaggctttacactttatgcttccggctcgtatgttgtgtggaattgtgagcggataacaatttcacacaggaaacagctatgaccatgattacgccaagctttgttgatacaaccataaaatgataattacacccataaattgataattatcacacccataaattgatattgcctcttcatggtctaaacttcagtaagtttacgacattttcatgaagaggtcatttccggggatccatggagaaaaaaatcactggatataccaccgttgatatatcccaatggcatcgtaaagaacattttgaggcatttcagtcagttgctcaatgtacctataaccagaccgttcagctggatattacggcctttttaaagaccgtaaagaaaaataagcacaagttttatccggcctttattcacattcttgcccgcctgatgaatgctcatccggagttccgtatggcaatgaaagacggtgagctggtgatatgggatagtgttcacccttgttacaccgttttccatgagcaaactgaaacgttttcatcgctctggagtgaataccacgacgatttccggcagtttctacacatatattcgcaagatgtggcgtgttacggtgaaaacctggcctatttccctaaagggtttattgagaatatgtttttcgtctcagccaatccctgggtgagtttcaccagttttgatttaaacgtggccaatatggacaacttcttcgcccccgttttcactatgggcaaatattatacgcaaggcgacaaggtgctgatgccgctggcgattcaggttcatcatgccgtttgtgatggcttccatgtcggcagaatgcttaatgaattacaacagtactgcgatgagtggcagggcggggcgtaatttttttaaggcagttattggtgcccttctagtgattataaataattattaaatatcactttatggttgcatcaacaggtaccgagctcgaattcactggccgtcgttttacaacgtcgtgactgggaaaaccctggcgttacccaacttaatcgccttgcagcacatccccctttcgccagctggcgtaatagcgaagaggcccgcaccgatcgcccttcccaacagttgcgcagcctgaatggcgaatggcgcctgatgcggtattttctccttacgcatctgtgcggtatttcacaccgcatatggtgcactctcagtacaatctgctctgatgccgcatagttaagccagccccgacacccgccaacacccgctgacgcgccctgacgggcttgtctgctcccggcatccgcttacagacaagctgtgaccgtctccgggagctgcatgtgtcagaggttttcaccgtcatcaccgaaacgcgcgagacgaaagggcctcgtgatacgcctatttttataggttaatgtcatgataataatggtttcttagacgtcaggtggcacttttcggggaaatgtgcgcggaacccctatttgtttatttttctaaatacattcaaatatgtatccgctcatgagacaataaccctgataaatgcttcaataatattgaaaaaggaagagtatgagtattcaacatttccgtgtcgcccttattcccttttttgcggcattttgccttcctgtttttgctcacccagaaacgctggtgaaagtaaaagatgctgaagatcagttgggtgcacgagtgggttacatcgaactggatctcaacagcggtaagatccttgagagttttcgccccgaagaacgttttccaatgatgagcacttttaaagttctgctatgtggcgcggtattatcccgtattgacgccgggcaagagcaactcggtcgccgcatacactattctcagaatgacttggttgagtactcaccagtcacagaaaagcatcttacggatggcatgacagtaagagaattatgcagtgctgccataaccatgagtgataacactgcggccaacttacttctgacaacgatcggaggaccgaaggagctaaccgcttttttgcacaacatgggggatcatgtaactcgccttgatcgttgggaaccggagctgaatgaagccataccaaacgacgagcgtgacaccacgatgcctgtagcaatggcaacaacgttgcgcaaactattaactggcgaactacttactctagcttcccggcaacaattaatagactggatggaggcggataaagttgcaggaccacttctgcgctcggcccttccggctggctggtttattgctgataaatctggagccggtgagcgtgggtctcgcggtatcattgcagcactggggccagatggtaagccctcccgtatcgtagttatctacacgacggggagtcaggcaactatggatgaacgaaatagacagatcgctgagataggtgcctcactgattaagcattggtaactgtcagaccaagtttactcatatatactttagattgatttaaaacttcatttttaatttaaaaggatctaggtgaagatcctttttgataatctcatgaccaaaatcccttaacgtgagttttcgttccactgagcgtcagaccccgtagaaaagatcaaaggatcttcttgagatcctttttttctgcgcgtaatctgctgcttgcaaacaaaaaaaccaccgctaccagcggtggtttgtttgccggatcaagagctaccaactctttttccgaaggtaactggcttcagcagagcgcagataccaaatactgttcttctagtgtagccgtagttaggccaccacttcaagaactctgtagcaccgcctacatacctcgctctgctaatcctgttaccagtggctgctgccagtggcgataagtcgtgtcttaccgggttggactcaagacgatagttaccggataaggcgcagcggtcgggctgaacggggggttcgtgcacacagcccagcttggagcgaacgacctacaccgaactgagatacctacagcgtgagctatgagaaagcgccacgcttcccgaagggagaaaggcggacaggtatccggtaagcggcagggtcggaacaggagagcgcacgagggagcttccagggggaaacgcctggtatctttatagtcctgtcgggtttcgccacctctgacttgagcgtcgatttttgtgatgctcgtcaggggggcggagcctatggaaaaacgccagcaacgcggcctttttacggttcctggccttttgctggccttttgctcacatgttctttcctgcgttat

SEQ ID NO: 80 - DNA, 3516 bp, Synthetic construct
  source 1..3516: mol_type = other DNA
cccctgattctgtggataaccgtattaccgcctttgagtgagctgataccgctcgccgcagccgaacgaccgagcgcagcgagtcagtgagcgaggaagcggaagagcgcccaatacgcaaaccgcctctccccgcgcgttggccgattcattaatgcagctggcacgacaggtttcccgactggaaagcgggcagtgagcgcaacgcaattaatgtgagttagctcactcattaggcaccccaggctttacactttatgcttccggctcgtatgttgtgtggaattgtgagcggataacaatttcacacaggaaacagctatgaccatgattacgccaagctttgttgatacaaccataaaatgataattacacccataaattgataattatcacacccataaattgatattgcctcttcatggtctaaacttcagtaagtttacgacattttcatgaagaggtcatttccggggatccatggagaaaaaaatcactggatataccaccgttgatatatcccaatggcatcgtaaagaacattttgaggcatttcagtcagttgctcaatgtacctataaccagaccgttcagctggatattacggcctttttaaagaccgtaaagaaaaataagcacaagttttatccggcctttattcacattcttgcccgcctgatgaatgctcatccggagttccgtatggcaatgaaagacggtgagctggtgatatgggatagtgttcacccttgttacaccgttttccatgagcaaactgaaacgttttcatcgctctggagtgaataccacgacgatttccggcagtttctacacatatattcgcaagatgtggcgtgttacggtgaaaacctggcctatttccctaaagggtttattgagaatatgtttttcgtctcagccaatccctgggtgagtttcaccagttttgatttaaacgtggccaatatggacaacttcttcgcccccgttttcactatgggcaaatattatacgcaaggcgacaaggtgctgatgccgctggcgattcaggttcatcatgccgtttgtgatggcttccatgtcggcagaatgcttaatgaattacaacagtactgcgatgagtggcagggcggggcgtaatttttttaaggcagttattggtgcccttctagtaattattaaatatcactttatggttgcatcaacaggtaccgagctcgaattcactggccgtcgttttacaacgtcgtgactgggaaaaccctggcgttacccaacttaatcgccttgcagcacatccccctttcgccagctggcgtaatagcgaagaggcccgcaccgatcgcccttcccaacagttgcgcagcctgaatggcgaatggcgcctgatgcggtattttctccttacgcatctgtgcggtatttcacaccgcatatggtgcactctcagtacaatctgctctgatgccgcatagttaagccagccccgacacccgccaacacccgctgacgcgccctgacgggcttgtctgctcccggcatccgcttacagacaagctgtgaccgtctccgggagctgcatgtgtcagaggttttcaccgtcatcaccgaaacgcgcgagacgaaagggcctcgtgatacgcctatttttataggttaatgtcatgataataatggtttcttagacgtcaggtggcacttttcggggaaatgtgcgcggaacccctatttgtttatttttctaaatacattcaaatatgtatccgctcatgagacaataaccctgataaatgcttcaataatattgaaaaaggaagagtatgagtattcaacatttccgtgtcgcccttattcccttttttgcggcattttgccttcctgtttttgctcacccagaaacgctggtgaaagtaaaagatgctgaagatcagttgggtgcacgagtgggttacatcgaactggatctcaacagcggtaagatccttgagagttttcgccccgaagaacgttttccaatgatgagcacttttaaagttctgctatgtggcgcggtattatcccgtattgacgccgggcaagagcaactcggtcgccgcatacactattctcagaatgacttggttgagtactcaccagtcacagaaaagcatcttacggatggcatgacagtaagagaattatgcagtgctgccataaccatgagtgataacactgcggccaacttacttctgacaacgatcggaggaccgaaggagctaaccgcttttttgcacaacatgggggatcatgtaactcgccttgatcgttgggaaccggagctgaatgaagccataccaaacgacgagcgtgacaccacgatgcctgtagcaatggcaacaacgttgcgcaaactattaactggcgaactacttactctagcttcccggcaacaattaatagactggatggaggcggataaagttgcaggaccacttctgcgctcggcccttccggctggctggtttattgctgataaatctggagccggtgagcgtgggtctcgcggtatcattgcagcactggggccagatggtaagccctcccgtatcgtagttatctacacgacggggagtcaggcaactatggatgaacgaaatagacagatcgctgagataggtgcctcactgattaagcattggtaactgtcagaccaagtttactcatatatactttagattgatttaaaacttcatttttaatttaaaaggatctaggtgaagatcctttttgataatctcatgaccaaaatcccttaacgtgagttttcgttccactgagcgtcagaccccgtagaaaagatcaaaggatcttcttgagatcctttttttctgcgcgtaatctgctgcttgcaaacaaaaaaaccaccgctaccagcggtggtttgtttgccggatcaagagctaccaactctttttccgaaggtaactggcttcagcagagcgcagataccaaatactgttcttctagtgtagccgtagttaggccaccacttcaagaactctgtagcaccgcctacatacctcgctctgctaatcctgttaccagtggctgctgccagtggcgataagtcgtgtcttaccgggttggactcaagacgatagttaccggataaggcgcagcggtcgggctgaacggggggttcgtgcacacagcccagcttggagcgaacgacctacaccgaactgagatacctacagcgtgagctatgagaaagcgccacgcttcccgaagggagaaaggcggacaggtatccggtaagcggcagggtcggaacaggagagcgcacgagggagcttccagggggaaacgcctggtatctttatagtcctgtcgggtttcgccacctctgacttgagcgtcgatttttgtgatgctcgtcaggggggcggagcctatggaaaaacgccagcaacgcggcctttttacggttcctggccttttgctggccttttgctcacatgttctttcctgcgttat

SEQ ID NO: 81 - DNA, 3506 bp, Synthetic construct
  source 1..3506: mol_type = other DNA
cccctgattctgtggataaccgtattaccgcctttgagtgagctgataccgctcgccgcagccgaacgaccgagcgcagcgagtcagtgagcgaggaagcggaagagcgcccaatacgcaaaccgcctctccccgcgcgttggccgattcattaatgcagctggcacgacaggtttcccgactggaaagcgggcagtgagcgcaacgcaattaatgtgagttagctcactcattaggcaccccaggctttacactttatgcttccggctcgtatgttgtgtggaattgtgagcggataacaatttcacacaggaaacagctatgaccatgattacgccaagctttgttgatacaaccataaaatgataattacacccataaattgataattatcacacccataaattgatattgcctcttcatggtctaaacttcagtaagtttacgacattttcatgaagaggtcatttccggggatccatggagaaaaaaatcactggatataccaccgttgatatatcccaatggcatcgtaaagaacattttgaggcatttcagtcagttgctcaatgtacctataaccagaccgttcagctggatattacggcctttttaaagaccgtaaagaaaaataagcacaagttttatccggcctttattcacattcttgcccgcctgatgaatgctcatccggagttccgtatggcaatgaaagacggtgagctggtgatatgggatagtgttcacccttgttacaccgttttccatgagcaaactgaaacgttttcatcgctctggagtgaataccacgacgatttccggcagtttctacacatatattcgcaagatgtggcgtgttacggtgaaaacctggcctatttccctaaagggtttattgagaatatgtttttcgtctcagccaatccctgggtgagtttcaccagttttgatttaaacgtggccaatatggacaacttcttcgcccccgttttcactatgggcaaatattatacgcaaggcgacaaggtgctgatgccgctggcgattcaggttcatcatgccgtttgtgatggcttccatgtcggcagaatgcttaatgaattacaacagtactgcgatgagtggcagggcggggcgtaatttttttaaggcagttattggtgcccttctagatatcactttatggttgcatcaacaggtaccgagctcgaattcactggccgtcgttttacaacgtcgtgactgggaaaaccctggcgttacccaacttaatcgccttgcagcacatccccctttcgccagctggcgtaatagcgaagaggcccgcaccgatcgcccttcccaacagttgcgcagcctgaatggcgaatggcgcctgatgcggtattttctccttacgcatctgtgcggtatttcacaccgcatatggtgcactctcagtacaatctgctctgatgccgcatagttaagccagccccgacacccgccaacacccgctgacgcgccctgacgggcttgtctgctcccggcatccgcttacagacaagctgtgaccgtctccgggagctgcatgtgtcagaggttttcaccgtcatcaccgaaacgcgcgagacgaaagggcctcgtgatacgcctatttttataggttaatgtcatgataataatggtttcttagacgtcaggtggcacttttcggggaaatgtgcgcggaacccctatttgtttatttttctaaatacattcaaatatgtatccgctcatgagacaataaccctgataaatgcttcaataatattgaaaaaggaagagtatgagtattcaacatttccgtgtcgcccttattcccttttttgcggcattttgccttcctgtttttgctcacccagaaacgctggtgaaagtaaaagatgctgaagatcagttgggtgcacgagtgggttacatcgaactggatctcaacagcggtaagatccttgagagttttcgccccgaagaacgttttccaatgatgagcacttttaaagttctgctatgtggcgcggtattatcccgtattgacgccgggcaagagcaactcggtcgccgcatacactattctcagaatgacttggttgagtactcaccagtcacagaaaagcatcttacggatggcatgacagtaagagaattatgcagtgctgccataaccatgagtgataacactgcggccaacttacttctgacaacgatcggaggaccgaaggagctaaccgcttttttgcacaacatgggggatcatgtaactcgccttgatcgttgggaaccggagctgaatgaagccataccaaacgacgagcgtgacaccacgatgcctgtagcaatggcaacaacgttgcgcaaactattaactggcgaactacttactctagcttcccggcaacaattaatagactggatggaggcggataaagttgcaggaccacttctgcgctcggcccttccggctggctggtttattgctgataaatctggagccggtgagcgtgggtctcgcggtatcattgcagcactggggccagatggtaagccctcccgtatcgtagttatctacacgacggggagtcaggcaactatggatgaacgaaatagacagatcgctgagataggtgcctcactgattaagcattggtaactgtcagaccaagtttactcatatatactttagattgatttaaaacttcatttttaatttaaaaggatctaggtgaagatcctttttgataatctcatgaccaaaatcccttaacgtgagttttcgttccactgagcgtcagaccccgtagaaaagatcaaaggatcttcttgagatcctttttttctgcgcgtaatctgctgcttgcaaacaaaaaaaccaccgctaccagcggtggtttgtttgccggatcaagagctaccaactctttttccgaaggtaactggcttcagcagagcgcagataccaaatactgttcttctagtgtagccgtagttaggccaccacttcaagaactctgtagcaccgcctacatacctcgctctgctaatcctgttaccagtggctgctgccagtggcgataagtcgtgtcttaccgggttggactcaagacgatagttaccggataaggcgcagcggtcgggctgaacggggggttcgtgcacacagcccagcttggagcgaacgacctacaccgaactgagatacctacagcgtgagctatgagaaagcgccacgcttcccgaagggagaaaggcggacaggtatccggtaagcggcagggtcggaacaggagagcgcacgagggagcttccagggggaaacgcctggtatctttatagtcctgtcgggtttcgccacctctgacttgagcgtcgatttttgtgatgctcgtcaggggggcggagcctatggaaaaacgccagcaacgcggcctttttacggttcctggccttttgctggccttttgctcacatgttctttcctgcgttat

SEQ ID NO: 82 - DNA, 3496 bp, Synthetic construct
  source 1..3496: mol_type = other DNA
cccctgattctgtggataaccgtattaccgcctttgagtgagctgataccgctcgccgcagccgaacgaccgagcgcagcgagtcagtgagcgaggaagcggaagagcgcccaatacgcaaaccgcctctccccgcgcgttggccgattcattaatgcagctggcacgacaggtttcccgactggaaagcgggcagtgagcgcaacgcaattaatgtgagttagctcactcattaggcaccccaggctttacactttatgcttccggctcgtatgttgtgtggaattgtgagcggataacaatttcacacaggaaacagctatgaccatgattacgccaagctttgttgatacaaccataaaatgataattacacccataaattgataattatcacacccataaattgatattgcctcttcatggtctaaacttcagtaagtttacgacattttcatgaagaggtcatttccggggatccatggagaaaaaaatcactggatataccaccgttgatatatcccaatggcatcgtaaagaacattttgaggcatttcagtcagttgctcaatgtacctataaccagaccgttcagctggatattacggcctttttaaagaccgtaaagaaaaataagcacaagttttatccggcctttattcacattcttgcccgcctgatgaatgctcatccggagttccgtatggcaatgaaagacggtgagctggtgatatgggatagtgttcacccttgttacaccgttttccatgagcaaactgaaacgttttcatcgctctggagtgaataccacgacgatttccggcagtttctacacatatattcgcaagatgtggcgtgttacggtgaaaacctggcctatttccctaaagggtttattgagaatatgtttttcgtctcagccaatccctgggtgagtttcaccagttttgatttaaacgtggccaatatggacaacttcttcgcccccgttttcactatgggcaaatattatacgcaaggcgacaaggtgctgatgccgctggcgattcaggttcatcatgccgtttgtgatggcttccatgtcggcagaatgcttaatgaattacaacagtactgcgatgagtggcagggcggggcgtaatttttttaaggcagttattggtgcccttctagatggttgcatcaacaggtaccgagctcgaattcactggccgtcgttttacaacgtcgtgactgggaaaaccctggcgttacccaacttaatcgccttgcagcacatccccctttcgccagctggcgtaatagcgaagaggcccgcaccgatcgcccttcccaacagttgcgcagcctgaatggcgaatggcgcctgatgcggtattttctccttacgcatctgtgcggtatttcacaccgcatatggtgcactctcagtacaatctgctctgatgccgcatagttaagccagccccgacacccgccaacacccgctgacgcgccctgacgggcttgtctgctcccggcatccgcttacagacaagctgtgaccgtctccgggagctgcatgtgtcagaggttttcaccgtcatcaccgaaacgcgcgagacgaaagggcctcgtgatacgcctatttttataggttaatgtcatgataataatggtttcttagacgtcaggtggcacttttcggggaaatgtgcgcggaacccctatttgtttatttttctaaatacattcaaatatgtatccgctcatgagacaataaccctgataaatgcttcaataatattgaaaaaggaagagtatgagtattcaacatttccgtgtcgcccttattcccttttttgcggcattttgccttcctgtttttgctcacccagaaacgctggtgaaagtaaaagatgctgaagatcagttgggtgcacgagtgggttacatcgaactggatctcaacagcggtaagatccttgagagttttcgccccgaagaacgttttccaatgatgagcacttttaaagttctgctatgtggcgcggtattatcccgtattgacgccgggcaagagcaactcggtcgccgcatacactattctcagaatgacttggttgagtactcaccagtcacagaaaagcatcttacggatggcatgacagtaagagaattatgcagtgctgccataaccatgagtgataacactgcggccaacttacttctgacaacgatcggaggaccgaaggagctaaccgcttttttgcacaacatgggggatcatgtaactcgccttgatcgttgggaaccggagctgaatgaagccataccaaacgacgagcgtgacaccacgatgcctgtagcaatggcaacaacgttgcgcaaactattaactggcgaactacttactctagcttcccggcaacaattaatagactggatggaggcggataaagttgcaggaccacttctgcgctcggcccttccggctggctggtttattgctgataaatctggagccggtgagcgtgggtctcgcggtatcattgcagcactggggccagatggtaagccctcccgtatcgtagttatctacacgacggggagtcaggcaactatggatgaacgaaatagacagatcgctgagataggtgcctcactgattaagcattggtaactgtcagaccaagtttactcatatatactttagattgatttaaaacttcatttttaatttaaaaggatctaggtgaagatcctttttgataatctcatgaccaaaatcccttaacgtgagttttcgttccactgagcgtcagaccccgtagaaaagatcaaaggatcttcttgagatcctttttttctgcgcgtaatctgctgcttgcaaacaaaaaaaccaccgctaccagcggtggtttgtttgccggatcaagagctaccaactctttttccgaaggtaactggcttcagcagagcgcagataccaaatactgttcttctagtgtagccgtagttaggccaccacttcaagaactctgtagcaccgcctacatacctcgctctgctaatcctgttaccagtggctgctgccagtggcgataagtcgtgtcttaccgggttggactcaagacgatagttaccggataaggcgcagcggtcgggctgaacggggggttcgtgcacacagcccagcttggagcgaacgacctacaccgaactgagatacctacagcgtgagctatgagaaagcgccacgcttcccgaagggagaaaggcggacaggtatccggtaagcggcagggtcggaacaggagagcgcacgagggagcttccagggggaaacgcctggtatctttatagtcctgtcgggtttcgccacctctgacttgagcgtcgatttttgtgatgctcgtcaggggggcggagcctatggaaaaacgccagcaacgcggcctttttacggttcctggccttttgctggccttttgctcacatgttctttcctgcgttat

SEQ ID NO: 83 - DNA, 3486 bp, Synthetic construct
  source 1..3486: mol_type = other DNA
cccctgattctgtggataaccgtattaccgcctttgagtgagctgataccgctcgccgcagccgaacgaccgagcgcagcgagtcagtgagcgaggaagcggaagagcgcccaatacgcaaaccgcctctccccgcgcgttggccgattcattaatgcagctggcacgacaggtttcccgactggaaagcgggcagtgagcgcaacgcaattaatgtgagttagctcactcattaggcaccccaggctttacactttatgcttccggctcgtatgttgtgtggaattgtgagcggataacaatttcacacaggaaacagctatgaccatgattacgccaagctttgttgatacaaccataaaatgataattacacccataaattgataattatcacacccataaattgatattgcctcttcatggtctaaacttcagtaagtttacgacattttcatgaagaggtcatttccggggatccatggagaaaaaaatcactggatataccaccgttgatatatcccaatggcatcgtaaagaacattttgaggcatttcagtcagttgctcaatgtacctataaccagaccgttcagctggatattacggcctttttaaagaccgtaaagaaaaataagcacaagttttatccggcctttattcacattcttgcccgcctgatgaatgctcatccggagttccgtatggcaatgaaagacggtgagctggtgatatgggatagtgttcacccttgttacaccgttttccatgagcaaactgaaacgttttcatcgctctggagtgaataccacgacgatttccggcagtttctacacatatattcgcaagatgtggcgtgttacggtgaaaacctggcctatttccctaaagggtttattgagaatatgtttttcgtctcagccaatccctgggtgagtttcaccagttttgatttaaacgtggccaatatggacaacttcttcgcccccgttttcactatgggcaaatattatacgcaaggcgacaaggtgctgatgccgctggcgattcaggttcatcatgccgtttgtgatggcttccatgtcggcagaatgcttaatgaattacaacagtactgcgatgagtggcagggcggggcgtaatttttttaaggcagttattggtgcccttctagcaacaggtaccgagctcgaattcactggccgtcgttttacaacgtcgtgactgggaaaaccctggcgttacccaacttaatcgccttgcagcacatccccctttcgccagctggcgtaatagcgaagaggcccgcaccgatcgcccttcccaacagttgcgcagcctgaatggcgaatggcgcctgatgcggtattttctccttacgcatctgtgcggtatttcacaccgcatatggtgcactctcagtacaatctgctctgatgccgcatagttaagccagccccgacacccgccaacacccgctgacgcgccctgacgggcttgtctgctcccggcatccgcttacagacaagctgtgaccgtctccgggagctgcatgtgtcagaggttttcaccgtcatcaccgaaacgcgcgagacgaaagggcctcgtgatacgcctatttttataggttaatgtcatgataataatggtttcttagacgtcaggtggcacttttcggggaaatgtgcgcggaacccctatttgtttatttttctaaatacattcaaatatgtatccgctcatgagacaataaccctgataaatgcttcaataatattgaaaaaggaagagtatgagtattcaacatttccgtgtcgcccttattcccttttttgcggcattttgccttcctgtttttgctcacccagaaacgctggtgaaagtaaaagatgctgaagatcagttgggtgcacgagtgggttacatcgaactggatctcaacagcggtaagatccttgagagttttcgccccgaagaacgttttccaatgatgagcacttttaaagttctgctatgtggcgcggtattatcccgtattgacgccgggcaagagcaactcggtcgccgcatacactattctcagaatgacttggttgagtactcaccagtcacagaaaagcatcttacggatggcatgacagtaagagaattatgcagtgctgccataaccatgagtgataacactgcggccaacttacttctgacaacgatcggaggaccgaaggagctaaccgcttttttgcacaacatgggggatcatgtaactcgccttgatcgttgggaaccggagctgaatgaagccataccaaacgacgagcgtgacaccacgatgcctgtagcaatggcaacaacgttgcgcaaactattaactggcgaactacttactctagcttcccggcaacaattaatagactggatggaggcggataaagttgcaggaccacttctgcgctcggcccttccggctggctggtttattgctgataaatctggagccggtgagcgtgggtctcgcggtatcattgcagcactggggccagatggtaagccctcccgtatcgtagttatctacacgacggggagtcaggcaactatggatgaacgaaatagacagatcgctgagataggtgcctcactgattaagcattggtaactgtcagaccaagtttactcatatatactttagattgatttaaaacttcatttttaatttaaaaggatctaggtgaagatcctttttgataatctcatgaccaaaatcccttaacgtgagttttcgttccactgagcgtcagaccccgtagaaaagatcaaaggatcttcttgagatcctttttttctgcgcgtaatctgctgcttgcaaacaaaaaaaccaccgctaccagcggtggtttgtttgccggatcaagagctaccaactctttttccgaaggtaactggcttcagcagagcgcagataccaaatactgttcttctagtgtagccgtagttaggccaccacttcaagaactctgtagcaccgcctacatacctcgctctgctaatcctgttaccagtggctgctgccagtggcgataagtcgtgtcttaccgggttggactcaagacgatagttaccggataaggcgcagcggtcgggctgaacggggggttcgtgcacacagcccagcttggagcgaacgacctacaccgaactgagatacctacagcgtgagctatgagaaagcgccacgcttcccgaagggagaaaggcggacaggtatccggtaagcggcagggtcggaacaggagagcgcacgagggagcttccagggggaaacgcctggtatctttatagtcctgtcgggtttcgccacctctgacttgagcgtcgatttttgtgatgctcgtcaggggggcggagcctatggaaaaacgccagcaacgcggcctttttacggttcctggccttttgctggccttttgctcacatgttctttcctgcgttat

SEQ ID NO: 84 - DNA, 8445 bp, Synthetic construct
  source 1..8445: mol_type = other DNA
attcaccaccctgaattgactctcttccgggcgctatcatgccataccgcgaaaggttttgcgccattcgatggtgtccgggatctcgacgctctcccttatgcgactcctgcattaggaaattaatacgactcactataggggaattgtgagcggataacaattcccctgtagaaataattttgtttaactttaataaggagatataccatgggtgaactgccgagtaggtagctgataacgtacagcgcggctgaaatcatcattaaagcgagtgaactgccgagtaggtagctgataacggatccgaattcgagctcggcgcgcctgcaggtcgacaagcttgcggccgcataatgcttaagtcgaacagaaagtaatcgtattgtacacggccgcataatcgaaattaatacgactcactataggggaattgtgagcggataacaattccccatcttagtatattagttaagtataagaaggagatatacatatgtttttgcaaagacctaaaccttacagcgatgaaagtttagaaagtttctttatccgagtggctaacaaaaatggctacggtgatgtccatcgcttcctagaagccactaaacgattccttcaagacattgaccataatggctatcaaacctttccgactgatataactcggataaacccatactcagctaaaaacagttccagcgcacgaactgcgtcattcctgaaacttgcacaattgacatttaatgaaccgccagagctacttgggttggcaattaacagaacaaacatgaaatactcgccgtcaactagcgcggttgttagaggtgcagaagtctttcctcgcagtttactacggacgcactccatcccctgctgtcctttgtgtctgcgagaaaatggctacgcctcctacctttggcactttcaggggtacgaatactgccacagccataacgtacctttaattaccacttgtagctgtggtaaggagtttgactaccgagtatctgggttaaagggcatttgctgcaaatgcaaggagcctatcaccttaaccagcagggagaacggtcatgaggcagcgtgtactgtttcaaactggcttgctggccatgaatctaaacctctgccaaatcttcctaaaagctaccgatggggtttagttcattggtggatgggtattaaagatagcgagttcgatcacttttcgttcgttcaatttttctcaaactggccaaggtcattccactcgataatcgaagatgaagtagagttcaaccttgagcatgctgttgtcagcacgtctgaattacgactaaaagatcttcttggtcgattgtttttcggttcaattcggttacctgagcggaatcttcaacacaatatcatccttggtgagcttctctgctatttagaaaatcgtttatggcaagacaagggattaatcgccaacctcaaaatgaacgcgttagaggcgactgtaatgttaaattgtagcctcgatcagattgcatcaatggttgaacaacgcatcttgaagccaaatcgaaaaagcaagcccaacagccctcttgatgttaccgattatctatttcatttcggcgatattttctgtctttggttagctgagttccaaagcgatgagtttaaccgttcgttttatgtgtcgaggtggtaaatgcaaactctgaaagaactaatcgcatccaatcctgacgacttaacaactgaacttaagagagcatttcgtccactcacaccgcatattgcaattgatggtaatgaacttgacgcactgacgatattagtcaatttaaccgataagactgatgatcagaaagacctgctcgatcgagccaaatgcaagcaaaaacttcgagatgaaaaatggtgggctagctgcataaattgcgttaattacagacaaagccataacccaaaattcccggatatacgttctgaaggcgtgattcgaacccaagccctgggtgaattaccgagtttcctactctcgtcctcaaaaatcccaccataccattggtcatatagccatgattcaaaatacgtcaacaaaagcgcattcctcaccaatgagttttgttgggatggtgagatctcatgtttgggtgagcttcttaaagatgcagatcacccactttggaatactttgaaaaagttaggttgttctcaaaaaacttgcaaagcaatggcaaaacaactagctgatattactctcacgactatcaatgtcacactcgcaccaaattacctgactcaaatatctctccccgatagtgatacatcctacatttcactctctcctgttgcatcgctatcgatgcaaagccactttcatcagaggctccaagatgaaaatcggcatagcgcgataacgcggtttagccgaactaccaacatgggggtcactgcgatgacatgtggcggcgcatttagaatgttaaagtctggcgctaagttttccagcccccctcatcaccgattaaacagtaaacgaagttggttgacgtcagagcatgttcagtcattaaaacagtaccagcgcctcaacaaaagcctcatacctgaaaactctcggattgcactccgtagaaaatacaaaatcgagcttcaaaatatggtcagatcttggtttgcaatgcaagaccatacccttgattcgaacatacttatccaacatttgaatcatgacctatcttacttaggagccacaaaacgttttgcatacgatccagcgatgaccaagctctttactgagcttttgaaacgagagttatcaaattcaatcaataatggtgagcaacacactaatggatcgtttttagtcctaccgaatatcagggtttgtggcgcaacagctttaagctccccggtaacggtggggattccatcacttacagctttctttggcttcgttcacgcatttgaacggaatataaatcgcaccacctcatcgtttcgtgttgaatcctttgcgatatgcgtccatcaactacatgtcgagaagcgaggtttgacagcagagtttgtggaaaaaggcgacgggactatatccgctcccgcgacccgggatgactggcagtgtgatgtcgtatttagccttattttgaacaccaactttgctcaacatattgaccaagatacgttagttacatcactaccaaagcgattggctcggggttcagcaaaaattgcgattgatgactttaaacatatcaactcattctcgacattagaaacagcgatcgaatctctgccaatagaagctggtaggtggttatcactttacgcacagtcaaacaataatctaagtgatctattagcagccatgacagaggaccatcagctcatggcaagctgcgtcggttaccacttgttagaagagcccaaagataaaccaaactccctcagaggttacaaacacgctatcgccgagtgcatcattggactcattaactcaatcacctttagctcagagactgatcccaacacaatcttttggtcgctaaagaactatcaaaactacctagtggtacagccaaggagtatcaacgatgaaactaccgacaaatctagcctatgagcgctctatcgacccatcagatgtctgtttttttgtcgtctggcccgatgatagaaaaacacctttaacctacaattctcgtactctgctcgggcaaatggaagcggcatcattagcctatgatgtctcaggtcaaccaataaaaagtgccaccgctgaggcgttagctcaagggaaccctcatcaagttgatttctgccacgttccatacggtgcgagtcatattgaatgcagtttctccgtctcgttttcttctgaactacgtcaaccatataagtgtaactcaagcaaagttaaacaaacgctagtgcaattagtcgagctctacgaaacgaaaatcggctggactgagctagcaacccgatatttgatgaacatttgcaacggtaaatggctgtggaaaaatacccgtaaagcctattgctggaacattgtacttacaccttggccttggaacggggaaaaggttggatttgaagatattcgtactaactacacctcacggcaagactttaaaaataataaaaattggtctgctatagttgaaatgatcaaaaccgcattttctagtactgatgggctggcgatatttgaagtcagggccaccttgcacttgccaacgaatgctatggtgcggccaagccaagttttcacagaaaaagaaagtggcagtaaaagtaaatctaaaactcaaaacagtcgagtttttcagagtacaactattgatggtgaacgatcgccaatactaggggcctttaaaacgggagcagctattgcaaccattgacgactggtatcctgaagccactgagccactaagggtcggacggtttggggttcatcgcgaagatgtcacttgctaccgtcatccgtctaccggaaaagattttttctcgatattacaacaagcagagcactatattgaagtgttgagcgccaacaaaactcccgctcaagaaactatcaacgacatgcactttttaatggctaacctgattaagggtgggatgttccagcataaaggagactgactgtgaaatggtattataagacaatcacctttctgccagagttgtgcaacaacgagtcactggctgcaaagtgtctccgcgttctgcatggatttaactatcagtatgagacacgaaatatcggcgtttcatttccgctttggtgtgatgcaacggttggaaaaaagatttcatttgtcagcaagaacaagatagaactcgacttactacttaaacaacactatttcgtccaaatggaacaacttcaatactttcatatatccaacactgttctcgtcccagaagattgtacatacgtttcctttagacgctgtcaatctatagataagctcacagcagcagggctggcaaggaaaatcagacgcctggagaaacgtgctctatctagaggcgagcaatttgacccatcatcttttgctcaaaaagagcatactgcaatagcgcactaccactcacttggggagtccagcaaacagacgaaccgcaactttcgactcaatatcaggatgctctcggagcaaccccgtgaggggaactcgatttttagtagctatggcttatcaaattcagaaaactcgtttcagcctgtacccttaatctgacctaggctgctgccaccgctgagcaataactagcataaccccttggggcctctaaacgggtcttgaggggttttttgctgaaacctcaggcatttgagaagcacacggtcacactgcttccggtagtcaataaaccggtaaaccagcaatagacataagcggctatttaacgaccctgccctgaaccgacgaccgggtcatcgtggccggatcttgcggcccctcggcttgaacgaattgttagacattatttgccgactaccttggtgatctcgcctttcacgtagtggacaaattcttccaactgatctgcgcgcgaggccaagcgatcttcttcttgtccaagataagcctgtctagcttcaagtatgacgggctgatactgggccggcaggcgctccattgcccagtcggcagcgacatccttcggcgcgattttgccggttactgcgctgtaccaaatgcgggacaacgtaagcactacatttcgctcatcgccagcccagtcgggcggcgagttccatagcgttaaggtttcatttagcgcctcaaatagatcctgttcaggaaccggatcaaagagttcctccgccgctggacctaccaaggcaacgctatgttctcttgcttttgtcagcaagatagccagatcaatgtcgatcgtggctggctcgaagatacctgcaagaatgtcattgcgctgccattctccaaattgcagttcgcgcttagctggataacgccacggaatgatgtcgtcgtgcacaacaatggtgacttctacagcgcggagaatctcgctctctccaggggaagccgaagtttccaaaaggtcgttgatcaaagctcgccgcgttgtttcatcaagccttacggtcaccgtaaccagcaaatcaatatcactgtgtggcttcaggccgccatccactgcggagccgtacaaatgtacggccagcaacgtcggttcgagatggcgctcgatgacgccaactacctctgatagttgagtcgatacttcggcgatcaccgcttccctcatactcttcctttttcaatattattgaagcatttatcagggttattgtctcatgagcggatacatatttgaatgtatttagaaaaataaacaaatagctagctcactcggtcgctacgctccgggcgtgagactgcggcgggcgctgcggacacatacaaagttacccacagattccgtggataagcaggggactaacatgtgaggcaaaacagcagggccgcgccggtggcgtttttccataggctccgccctcctgccagagttcacataaacagacgcttttccggtgcatctgtgggagccgtgaggctcaaccatgaatctgacagtacgggcgaaacccgacaggacttaaagatccccaccgtttccggcgggtcgctccctcttgcgctctcctgttccgaccctgccgtttaccggatacctgttccgcctttctcccttacgggaagtgtggcgctttctcatagctcacacactggtatctcggctcggtgtaggtcgttcgctccaagctgggctgtaagcaagaactccccgttcagcccgactgctgcgccttatccggtaactgttcacttgagtccaacccggaaaagcacggtaaaacgccactggcagcagccattggtaactgggagttcgcagaggatttgtttagctaaacacgcggttgctcttgaagtgtgcgccaaagtccggctacactggaaggacagatttggttgctgtgctctgcgaaagccagttaccacggttaagcagttccccaactgacttaaccttcgatcaaaccacctccccaggtggttttttcgtttacagggcaaaagattacgcgcagaaaaaaaggatctcaagaagatcctttgatcttttctactgaaccgctctagatttcagtgcaatttatctcttcaaatgtagcacctgaagtcagccccatacgatataagttgtaattctcatgttagtcatgccccgcgcccaccggaaggagctgactgggttgaaggctctcaagggcatcggtcgagatcccggtgcctaatgagtgagctaacttacattaattgcgttgcgctcactgcccgctttccagtcgggaaacctgtcgtgccagctgcattaatgaatcggccaacgcgcggggagaggcggtttgcgtattgggcgccagggtggtttttcttttcaccagtgagacgggcaacagctgattgcccttcaccgcctggccctgagagagttgcagcaagcggtccacgctggtttgccccagcaggcgaaaatcctgtttgatggtggttaacggcgggatataacatgagctgtcttcggtatcgtcgtatcccactaccgagatgtccgcaccaacgcgcagcccggactcggtaatggcgcgcattgcgcccagcgccatctgatcgttggcaaccagcatcgcagtgggaacgatgccctcattcagcatttgcatggtttgttgaaaaccggacatggcactccagtcgccttcccgttccgctatcggctgaatttgattgcgagtgagatatttatgccagccagccagacgcagacgcgccgagacagaacttaatgggcccgctaacagcgcgatttgctggtgacccaatgcgaccagatgctccacgcccagtcgcgtaccgtcttcatgggagaaaataatactgttgatgggtgtctggtcagagacatcaagaaataacgccggaacattagtgcaggcagcttccacagcaatggcatcctggtcatccagcggatagttaatgatcagcccactgacgcgttgcgcgagaagattgtgcaccgccgctttacaggcttcgacgccgcttcgttctaccatcgacaccaccacgctggcacccagttgatcggcgcgagatttaatcgccgcgacaatttgcgacggcgcgtgcagggccagactggaggtggcaacgccaatcagcaacgactgtttgcccgccagttgttgtgccacgcggttgggaatgtaattcagctccgccatcgccgcttccactttttcccgcgttttcgcagaaacgtggctggcctggttcaccacgcgggaaacggtctgataagagacaccggcatactctgcgacatcgtataacgttactggtttcac

SEQ ID NO: 85 - DNA, 8445 bp, Synthetic construct
  source 1..8445: mol_type = other DNA
attcaccaccctgaattgactctcttccgggcgctatcatgccataccgcgaaaggttttgcgccattcgatggtgtccgggatctcgacgctctcccttatgcgactcctgcattaggaaattaatacgactcactataggggaattgtgagcggataacaattcccctgtagaaataattttgtttaactttaataaggagatataccatgggtgaactgccgagtaggtagctgataactacagcgcggctgaaatcatcattaaagcgaggtgaactgccgagtaggtagctgataacggatccgaattcgagctcggcgcgcctgcaggtcgacaagcttgcggccgcataatgcttaagtcgaacagaaagtaatcgtattgtacacggccgcataatcgaaattaatacgactcactataggggaattgtgagcggataacaattccccatcttagtatattagttaagtataagaaggagatatacatatgtttttgcaaagacctaaaccttacagcgatgaaagtttagaaagtttctttatccgagtggctaacaaaaatggctacggtgatgtccatcgcttcctagaagccactaaacgattccttcaagacattgaccataatggctatcaaacctttccgactgatataactcggataaacccatactcagctaaaaacagttccagcgcacgaactgcgtcattcctgaaacttgcacaattgacatttaatgaaccgccagagctacttgggttggcaattaacagaacaaacatgaaatactcgccgtcaactagcgcggttgttagaggtgcagaagtctttcctcgcagtttactacggacgcactccatcccctgctgtcctttgtgtctgcgagaaaatggctacgcctcctacctttggcactttcaggggtacgaatactgccacagccataacgtacctttaattaccacttgtagctgtggtaaggagtttgactaccgagtatctgggttaaagggcatttgctgcaaatgcaaggagcctatcaccttaaccagcagggagaacggtcatgaggcagcgtgtactgtttcaaactggcttgctggccatgaatctaaacctctgccaaatcttcctaaaagctaccgatggggtttagttcattggtggatgggtattaaagatagcgagttcgatcacttttcgttcgttcaatttttctcaaactggccaaggtcattccactcgataatcgaagatgaagtagagttcaaccttgagcatgctgttgtcagcacgtctgaattacgactaaaagatcttcttggtcgattgtttttcggttcaattcggttacctgagcggaatcttcaacacaatatcatccttggtgagcttctctgctatttagaaaatcgtttatggcaagacaagggattaatcgccaacctcaaaatgaacgcgttagaggcgactgtaatgttaaattgtagcctcgatcagattgcatcaatggttgaacaacgcatcttgaagccaaatcgaaaaagcaagcccaacagccctcttgatgttaccgattatctatttcatttcggcgatattttctgtctttggttagctgagttccaaagcgatgagtttaaccgttcgttttatgtgtcgaggtggtaaatgcaaactctgaaagaactaatcgcatccaatcctgacgacttaacaactgaacttaagagagcatttcgtccactcacaccgcatattgcaattgatggtaatgaacttgacgcactgacgatattagtcaatttaaccgataagactgatgatcagaaagacctgctcgatcgagccaaatgcaagcaaaaacttcgagatgaaaaatggtgggctagctgcataaattgcgttaattacagacaaagccataacccaaaattcccggatatacgttctgaaggcgtgattcgaacccaagccctgggtgaattaccgagtttcctactctcgtcctcaaaaatcccaccataccattggtcatatagccatgattcaaaatacgtcaacaaaagcgcattcctcaccaatgagttttgttgggatggtgagatctcatgtttgggtgagcttcttaaagatgcagatcacccactttggaatactttgaaaaagttaggttgttctcaaaaaacttgcaaagcaatggcaaaacaactagctgatattactctcacgactatcaatgtcacactcgcaccaaattacctgactcaaatatctctccccgatagtgatacatcctacatttcactctctcctgttgcatcgctatcgatgcaaagccactttcatcagaggctccaagatgaaaatcggcatagcgcgataacgcggtttagccgaactaccaacatgggggtcactgcgatgacatgtggcggcgcatttagaatgttaaagtctggcgctaagttttccagcccccctcatcaccgattaaacagtaaacgaagttggttgacgtcagagcatgttcagtcattaaaacagtaccagcgcctcaacaaaagcctcatacctgaaaactctcggattgcactccgtagaaaatacaaaatcgagcttcaaaatatggtcagatcttggtttgcaatgcaagaccatacccttgattcgaacatacttatccaacatttgaatcatgacctatcttacttaggagccacaaaacgttttgcatacgatccagcgatgaccaagctctttactgagcttttgaaacgagagttatcaaattcaatcaataatggtgagcaacacactaatggatcgtttttagtcctaccgaatatcagggtttgtggcgcaacagctttaagctccccggtaacggtggggattccatcacttacagctttctttggcttcgttcacgcatttgaacggaatataaatcgcaccacctcatcgtttcgtgttgaatcctttgcgatatgcgtccatcaactacatgtcgagaagcgaggtttgacagcagagtttgtggaaaaaggcgacgggactatatccgctcccgcgacccgggatgactggcagtgtgatgtcgtatttagccttattttgaacaccaactttgctcaacatattgaccaagatacgttagttacatcactaccaaagcgattggctcggggttcagcaaaaattgcgattgatgactttaaacatatcaactcattctcgacattagaaacagcgatcgaatctctgccaatagaagctggtaggtggttatcactttacgcacagtcaaacaataatctaagtgatctattagcagccatgacagaggaccatcagctcatggcaagctgcgtcggttaccacttgttagaagagcccaaagataaaccaaactccctcagaggttacaaacacgctatcgccgagtgcatcattggactcattaactcaatcacctttagctcagagactgatcccaacacaatcttttggtcgctaaagaactatcaaaactacctagtggtacagccaaggagtatcaacgatgaaactaccgacaaatctagcctatgagcgctctatcgacccatcagatgtctgtttttttgtcgtctggcccgatgatagaaaaacacctttaacctacaattctcgtactctgctcgggcaaatggaagcggcatcattagcctatgatgtctcaggtcaaccaataaaaagtgccaccgctgaggcgttagctcaagggaaccctcatcaagttgatttctgccacgttccatacggtgcgagtcatattgaatgcagtttctccgtctcgttttcttctgaactacgtcaaccatataagtgtaactcaagcaaagttaaacaaacgctagtgcaattagtcgagctctacgaaacgaaaatcggctggactgagctagcaacccgatatttgatgaacatttgcaacggtaaatggctgtggaaaaatacccgtaaagcctattgctggaacattgtacttacaccttggccttggaacggggaaaaggttggatttgaagatattcgtactaactacacctcacggcaagactttaaaaataataaaaattggtctgctatagttgaaatgatcaaaaccgcattttctagtactgatgggctggcgatatttgaagtcagggccaccttgcacttgccaacgaatgctatggtgcggccaagccaagttttcacagaaaaagaaagtggcagtaaaagtaaatctaaaactcaaaacagtcgagtttttcagagtacaactattgatggtgaacgatcgccaatactaggggcctttaaaacgggagcagctattgcaaccattgacgactggtatcctgaagccactgagccactaagggtcggacggtttggggttcatcgcgaagatgtcacttgctaccgtcatccgtctaccggaaaagattttttctcgatattacaacaagcagagcactatattgaagtgttgagcgccaacaaaactcccgctcaagaaactatcaacgacatgcactttttaatggctaacctgattaagggtgggatgttccagcataaaggagactgactgtgaaatggtattataagacaatcacctttctgccagagttgtgcaacaacgagtcactggctgcaaagtgtctccgcgttctgcatggatttaactatcagtatgagacacgaaatatcggcgtttcatttccgctttggtgtgatgcaacggttggaaaaaagatttcatttgtcagcaagaacaagatagaactcgacttactacttaaacaacactatttcgtccaaatggaacaacttcaatactttcatatatccaacactgttctcgtcccagaagattgtacatacgtttcctttagacgctgtcaatctatagataagctcacagcagcagggctggcaaggaaaatcagacgcctggagaaacgtgctctatctagaggcgagcaatttgacccatcatcttttgctcaaaaagagcatactgcaatagcgcactaccactcacttggggagtccagcaaacagacgaaccgcaactttcgactcaatatcaggatgctctcggagcaaccccgtgaggggaactcgatttttagtagctatggcttatcaaattcagaaaactcgtttcagcctgtacccttaatctgacctaggctgctgccaccgctgagcaataactagcataaccccttggggcctctaaacgggtcttgaggggttttttgctgaaacctcaggcatttgagaagcacacggtcacactgcttccggtagtcaataaaccggtaaaccagcaatagacataagcggctatttaacgaccctgccctgaaccgacgaccgggtcatcgtggccggatcttgcggcccctcggcttgaacgaattgttagacattatttgccgactaccttggtgatctcgcctttcacgtagtggacaaattcttccaactgatctgcgcgcgaggccaagcgatcttcttcttgtccaagataagcctgtctagcttcaagtatgacgggctgatactgggccggcaggcgctccattgcccagtcggcagcgacatccttcggcgcgattttgccggttactgcgctgtaccaaatgcgggacaacgtaagcactacatttcgctcatcgccagcccagtcgggcggcgagttccatagcgttaaggtttcatttagcgcctcaaatagatcctgttcaggaaccggatcaaagagttcctccgccgctggacctaccaaggcaacgctatgttctcttgcttttgtcagcaagatagccagatcaatgtcgatcgtggctggctcgaagatacctgcaagaatgtcattgcgctgccattctccaaattgcagttcgcgcttagctggataacgccacggaatgatgtcgtcgtgcacaacaatggtgacttctacagcgcggagaatctcgctctctccaggggaagccgaagtttccaaaaggtcgttgatcaaagctcgccgcgttgtttcatcaagccttacggtcaccgtaaccagcaaatcaatatcactgtgtggcttcaggccgccatccactgcggagccgtacaaatgtacggccagcaacgtcggttcgagatggcgctcgatgacgccaactacctctgatagttgagtcgatacttcggcgatcaccgcttccctcatactcttcctttttcaatattattgaagcatttatcagggttattgtctcatgagcggatacatatttgaatgtatttagaaaaataaacaaatagctagctcactcggtcgctacgctccgggcgtgagactgcggcgggcgctgcggacacatacaaagttacccacagattccgtggataagcaggggactaacatgtgaggcaaaacagcagggccgcgccggtggcgtttttccataggctccgccctcctgccagagttcacataaacagacgcttttccggtgcatctgtgggagccgtgaggctcaaccatgaatctgacagtacgggcgaaacccgacaggacttaaagatccccaccgtttccggcgggtcgctccctcttgcgctctcctgttccgaccctgccgtttaccggatacctgttccgcctttctcccttacgggaagtgtggcgctttctcatagctcacacactggtatctcggctcggtgtaggtcgttcgctccaagctgggctgtaagcaagaactccccgttcagcccgactgctgcgccttatccggtaactgttcacttgagtccaacccggaaaagcacggtaaaacgccactggcagcagccattggtaactgggagttcgcagaggatttgtttagctaaacacgcggttgctcttgaagtgtgcgccaaagtccggctacactggaaggacagatttggttgctgtgctctgcgaaagccagttaccacggttaagcagttccccaactgacttaaccttcgatcaaaccacctccccaggtggttttttcgtttacagggcaaaagattacgcgcagaaaaaaaggatctcaagaagatcctttgatcttttctactgaaccgctctagatttcagtgcaatttatctcttcaaatgtagcacctgaagtcagccccatacgatataagttgtaattctcatgttagtcatgccccgcgcccaccggaaggagctgactgggttgaaggctctcaagggcatcggtcgagatcccggtgcctaatgagtgagctaacttacattaattgcgttgcgctcactgcccgctttccagtcgggaaacctgtcgtgccagctgcattaatgaatcggccaacgcgcggggagaggcggtttgcgtattgggcgccagggtggtttttcttttcaccagtgagacgggcaacagctgattgcccttcaccgcctggccctgagagagttgcagcaagcggtccacgctggtttgccccagcaggcgaaaatcctgtttgatggtggttaacggcgggatataacatgagctgtcttcggtatcgtcgtatcccactaccgagatgtccgcaccaacgcgcagcccggactcggtaatggcgcgcattgcgcccagcgccatctgatcgttggcaaccagcatcgcagtgggaacgatgccctcattcagcatttgcatggtttgttgaaaaccggacatggcactccagtcgccttcccgttccgctatcggctgaatttgattgcgagtgagatatttatgccagccagccagacgcagacgcgccgagacagaacttaatgggcccgctaacagcgcgatttgctggtgacccaatgcgaccagatgctccacgcccagtcgcgtaccgtcttcatgggagaaaataatactgttgatgggtgtctggtcagagacatcaagaaataacgccggaacattagtgcaggcagcttccacagcaatggcatcctggtcatccagcggatagttaatgatcagcccactgacgcgttgcgcgagaagattgtgcaccgccgctttacaggcttcgacgccgcttcgttctaccatcgacaccaccacgctggcacccagttgatcggcgcgagatttaatcgccgcgacaatttgcgacggcgcgtgcagggccagactggaggtggcaacgccaatcagcaacgactgtttgcccgccagttgttgtgccacgcggttgggaatgtaattcagctccgccatcgccgcttccactttttcccgcgttttcgcagaaacgtggctggcctggttcaccacgcgggaaacggtctgataagagacaccggcatactctgcgacatcgtataacgttactggtttcac

SEQ ID NO: 86 - DNA, 8445 bp, Synthetic construct
  source 1..8445: mol_type = other DNA
attcaccaccctgaattgactctcttccgggcgctatcatgccataccgcgaaaggttttgcgccattcgatggtgtccgggatctcgacgctctcccttatgcgactcctgcattaggaaattaatacgactcactataggggaattgtgagcggataacaattcccctgtagaaataattttgtttaactttaataaggagatataccatgggtgaactgccgagtaggtagctgataacacagcgcggctgaaatcatcattaaagcgagtgtgaactgccgagtaggtagctgataacggatccgaattcgagctcggcgcgcctgcaggtcgacaagcttgcggccgcataatgcttaagtcgaacagaaagtaatcgtattgtacacggccgcataatcgaaattaatacgactcactataggggaattgtgagcggataacaattccccatcttagtatattagttaagtataagaaggagatatacatatgtttttgcaaagacctaaaccttacagcgatgaaagtttagaaagtttctttatccgagtggctaacaaaaatggctacggtgatgtccatcgcttcctagaagccactaaacgattccttcaagacattgaccataatggctatcaaacctttccgactgatataactcggataaacccatactcagctaaaaacagttccagcgcacgaactgcgtcattcctgaaacttgcacaattgacatttaatgaaccgccagagctacttgggttggcaattaacagaacaaacatgaaatactcgccgtcaactagcgcggttgttagaggtgcagaagtctttcctcgcagtttactacggacgcactccatcccctgctgtcctttgtgtctgcgagaaaatggctacgcctcctacctttggcactttcaggggtacgaatactgccacagccataacgtacctttaattaccacttgtagctgtggtaaggagtttgactaccgagtatctgggttaaagggcatttgctgcaaatgcaaggagcctatcaccttaaccagcagggagaacggtcatgaggcagcgtgtactgtttcaaactggcttgctggccatgaatctaaacctctgccaaatcttcctaaaagctaccgatggggtttagttcattggtggatgggtattaaagatagcgagttcgatcacttttcgttcgttcaatttttctcaaactggccaaggtcattccactcgataatcgaagatgaagtagagttcaaccttgagcatgctgttgtcagcacgtctgaattacgactaaaagatcttcttggtcgattgtttttcggttcaattcggttacctgagcggaatcttcaacacaatatcatccttggtgagcttctctgctatttagaaaatcgtttatggcaagacaagggattaatcgccaacctcaaaatgaacgcgttagaggcgactgtaatgttaaattgtagcctcgatcagattgcatcaatggttgaacaacgcatcttgaagccaaatcgaaaaagcaagcccaacagccctcttgatgttaccgattatctatttcatttcggcgatattttctgtctttggttagctgagttccaaagcgatgagtttaaccgttcgttttatgtgtcgaggtggtaaatgcaaactctgaaagaactaatcgcatccaatcctgacgacttaacaactgaacttaagagagcatttcgtccactcacaccgcatattgcaattgatggtaatgaacttgacgcactgacgatattagtcaatttaaccgataagactgatgatcagaaagacctgctcgatcgagccaaatgcaagcaaaaacttcgagatgaaaaatggtgggctagctgcataaattgcgttaattacagacaaagccataacccaaaattcccggatatacgttctgaaggcgtgattcgaacccaagccctgggtgaattaccgagtttcctactctcgtcctcaaaaatcccaccataccattggtcatatagccatgattcaaaatacgtcaacaaaagcgcattcctcaccaatgagttttgttgggatggtgagatctcatgtttgggtgagcttcttaaagatgcagatcacccactttggaatactttgaaaaagttaggttgttctcaaaaaacttgcaaagcaatggcaaaacaactagctgatattactctcacgactatcaatgtcacactcgcaccaaattacctgactcaaatatctctccccgatagtgatacatcctacatttcactctctcctgttgcatcgctatcgatgcaaagccactttcatcagaggctccaagatgaaaatcggcatagcgcgataacgcggtttagccgaactaccaacatgggggtcactgcgatgacatgtggcggcgcatttagaatgttaaagtctggcgctaagttttccagcccccctcatcaccgattaaacagtaaacgaagttggttgacgtcagagcatgttcagtcattaaaacagtaccagcgcctcaacaaaagcctcatacctgaaaactctcggattgcactccgtagaaaatacaaaatcgagcttcaaaatatggtcagatcttggtttgcaatgcaagaccatacccttgattcgaacatacttatccaacatttgaatcatgacctatcttacttaggagccacaaaacgttttgcatacgatccagcgatgaccaagctctttactgagcttttgaaacgagagttatcaaattcaatcaataatggtgagcaacacactaatggatcgtttttagtcctaccgaatatcagggtttgtggcgcaacagctttaagctccccggtaacggtggggattccatcacttacagctttctttggcttcgttcacgcatttgaacggaatataaatcgcaccacctcatcgtttcgtgttgaatcctttgcgatatgcgtccatcaactacatgtcgagaagcgaggtttgacagcagagtttgtggaaaaaggcgacgggactatatccgctcccgcgacccgggatgactggcagtgtgatgtcgtatttagccttattttgaacaccaactttgctcaacatattgaccaagatacgttagttacatcactaccaaagcgattggctcggggttcagcaaaaattgcgattgatgactttaaacatatcaactcattctcgacattagaaacagcgatcgaatctctgccaatagaagctggtaggtggttatcactttacgcacagtcaaacaataatctaagtgatctattagcagccatgacagaggaccatcagctcatggcaagctgcgtcggttaccacttgttagaagagcccaaagataaaccaaactccctcagaggttacaaacacgctatcgccgagtgcatcattggactcattaactcaatcacctttagctcagagactgatcccaacacaatcttttggtcgctaaagaactatcaaaactacctagtggtacagccaaggagtatcaacgatgaaactaccgacaaatctagcctatgagcgctctatcgacccatcagatgtctgtttttttgtcgtctggcccgatgatagaaaaacacctttaacctacaattctcgtactctgctcgggcaaatggaagcggcatcattagcctatgatgtctcaggtcaaccaataaaaagtgccaccgctgaggcgttagctcaagggaaccctcatcaagttgatttctgccacgttccatacggtgcgagtcatattgaatgcagtttctccgtctcgttttcttctgaactacgtcaaccatataagtgtaactcaagcaaagttaaacaaacgctagtgcaattagtcgagctctacgaaacgaaaatcggctggactgagctagcaacccgatatttgatgaacatttgcaacggtaaatggctgtggaaaaatacccgtaaagcctattgctggaacattgtacttacaccttggccttggaacggggaaaaggttggatttgaagatattcgtactaactacacctcacggcaagactttaaaaataataaaaattggtctgctatagttgaaatgatcaaaaccgcattttctagtactgatgggctggcgatatttgaagtcagggccaccttgcacttgccaacgaatgctatggtgcggccaagccaagttttcacagaaaaagaaagtggcagtaaaagtaaatctaaaactcaaaacagtcgagtttttcagagtacaactattgatggtgaacgatcgccaatactaggggcctttaaaacgggagcagctattgcaaccattgacgactggtatcctgaagccactgagccactaagggtcggacggtttggggttcatcgcgaagatgtcacttgctaccgtcatccgtctaccggaaaagattttttctcgatattacaacaagcagagcactatattgaagtgttgagcgccaacaaaactcccgctcaagaaactatcaacgacatgcactttttaatggctaacctgattaagggtgggatgttccagcataaaggagactgactgtgaaatggtattataagacaatcacctttctgccagagttgtgcaacaacgagtcactggctgcaaagtgtctccgcgttctgcatggatttaactatcagtatgagacacgaaatatcggcgtttcatttccgctttggtgtgatgcaacggttggaaaaaagatttcatttgtcagcaagaacaagatagaactcgacttactacttaaacaacactatttcgtccaaatggaacaacttcaatactttcatatatccaacactgttctcgtcccagaagattgtacatacgtttcctttagacgctgtcaatctatagataagctcacagcagcagggctggcaaggaaaatcagacgcctggagaaacgtgctctatctagaggcgagcaatttgacccatcatcttttgctcaaaaagagcatactgcaatagcgcactaccactcacttggggagtccagcaaacagacgaaccgcaactttcgactcaatatcaggatgctctcggagcaaccccgtgaggggaactcgatttttagtagctatggcttatcaaattcagaaaactcgtttcagcctgtacccttaatctgacctaggctgctgccaccgctgagcaataactagcataaccccttggggcctctaaacgggtcttgaggggttttttgctgaaacctcaggcatttgagaagcacacggtcacactgcttccggtagtcaataaaccggtaaaccagcaatagacataagcggctatttaacgaccctgccctgaaccgacgaccgggtcatcgtggccggatcttgcggcccctcggcttgaacgaattgttagacattatttgccgactaccttggtgatctcgcctttcacgtagtggacaaattcttccaactgatctgcgcgcgaggccaagcgatcttcttcttgtccaagataagcctgtctagcttcaagtatgacgggctgatactgggccggcaggcgctccattgcccagtcggcagcgacatccttcggcgcgattttgccggttactgcgctgtaccaaatgcgggacaacgtaagcactacatttcgctcatcgccagcccagtcgggcggcgagttccatagcgttaaggtttcatttagcgcctcaaatagatcctgttcaggaaccggatcaaagagttcctccgccgctggacctaccaaggcaacgctatgttctcttgcttttgtcagcaagatagccagatcaatgtcgatcgtggctggctcgaagatacctgcaagaatgtcattgcgctgccattctccaaattgcagttcgcgcttagctggataacgccacggaatgatgtcgtcgtgcacaacaatggtgacttctacagcgcggagaatctcgctctctccaggggaagccgaagtttccaaaaggtcgttgatcaaagctcgccgcgttgtttcatcaagccttacggtcaccgtaaccagcaaatcaatatcactgtgtggcttcaggccgccatccactgcggagccgtacaaatgtacggccagcaacgtcggttcgagatggcgctcgatgacgccaactacctctgatagttgagtcgatacttcggcgatcaccgcttccctcatactcttcctttttcaatattattgaagcatttatcagggttattgtctcatgagcggatacatatttgaatgtatttagaaaaataaacaaatagctagctcactcggtcgctacgctccgggcgtgagactgcggcgggcgctgcggacacatacaaagttacccacagattccgtggataagcaggggactaacatgtgaggcaaaacagcagggccgcgccggtggcgtttttccataggctccgccctcctgccagagttcacataaacagacgcttttccggtgcatctgtgggagccgtgaggctcaaccatgaatctgacagtacgggcgaaacccgacaggacttaaagatccccaccgtttccggcgggtcgctccctcttgcgctctcctgttccgaccctgccgtttaccggatacctgttccgcctttctcccttacgggaagtgtggcgctttctcatagctcacacactggtatctcggctcggtgtaggtcgttcgctccaagctgggctgtaagcaagaactccccgttcagcccgactgctgcgccttatccggtaactgttcacttgagtccaacccggaaaagcacggtaaaacgccactggcagcagccattggtaactgggagttcgcagaggatttgtttagctaaacacgcggttgctcttgaagtgtgcgccaaagtccggctacactggaaggacagatttggttgctgtgctctgcgaaagccagttaccacggttaagcagttccccaactgacttaaccttcgatcaaaccacctccccaggtggttttttcgtttacagggcaaaagattacgcgcagaaaaaaaggatctcaagaagatcctttgatcttttctactgaaccgctctagatttcagtgcaatttatctcttcaaatgtagcacctgaagtcagccccatacgatataagttgtaattctcatgttagtcatgccccgcgcccaccggaaggagctgactgggttgaaggctctcaagggcatcggtcgagatcccggtgcctaatgagtgagctaacttacattaattgcgttgcgctcactgcccgctttccagtcgggaaacctgtcgtgccagctgcattaatgaatcggccaacgcgcggggagaggcggtttgcgtattgggcgccagggtggtttttcttttcaccagtgagacgggcaacagctgattgcccttcaccgcctggccctgagagagttgcagcaagcggtccacgctggtttgccccagcaggcgaaaatcctgtttgatggtggttaacggcgggatataacatgagctgtcttcggtatcgtcgtatcccactaccgagatgtccgcaccaacgcgcagcccggactcggtaatggcgcgcattgcgcccagcgccatctgatcgttggcaaccagcatcgcagtgggaacgatgccctcattcagcatttgcatggtttgttgaaaaccggacatggcactccagtcgccttcccgttccgctatcggctgaatttgattgcgagtgagatatttatgccagccagccagacgcagacgcgccgagacagaacttaatgggcccgctaacagcgcgatttgctggtgacccaatgcgaccagatgctccacgcccagtcgcgtaccgtcttcatgggagaaaataatactgttgatgggtgtctggtcagagacatcaagaaataacgccggaacattagtgcaggcagcttccacagcaatggcatcctggtcatccagcggatagttaatgatcagcccactgacgcgttgcgcgagaagattgtgcaccgccgctttacaggcttcgacgccgcttcgttctaccatcgacaccaccacgctggcacccagttgatcggcgcgagatttaatcgccgcgacaatttgcgacggcgcgtgcagggccagactggaggtggcaacgccaatcagcaacgactgtttgcccgccagttgttgtgccacgcggttgggaatgtaattcagctccgccatcgccgcttccactttttcccgcgttttcgcagaaacgtggctggcctggttcaccacgcgggaaacggtctgataagagacaccggcatactctgcgacatcgtataacgttactggtttcac

SEQ ID NO: 87 - DNA, 8445 bp, Synthetic construct
  source 1..8445: mol_type = other DNA
attcaccaccctgaattgactctcttccgggcgctatcatgccataccgcgaaaggttttgcgccattcgatggtgtccgggatctcgacgctctcccttatgcgactcctgcattaggaaattaatacgactcactataggggaattgtgagcggataacaattcccctgtagaaataattttgtttaactttaataaggagatataccatgggtgaactgccgagtaggtagctgataaccagcgcggctgaaatcatcattaaagcgagtggtgaactgccgagtaggtagctgataacggatccgaattcgagctcggcgcgcctgcaggtcgacaagcttgcggccgcataatgcttaagtcgaacagaaagtaatcgtattgtacacggccgcataatcgaaattaatacgactcactataggggaattgtgagcggataacaattccccatcttagtatattagttaagtataagaaggagatatacatatgtttttgcaaagacctaaaccttacagcgatgaaagtttagaaagtttctttatccgagtggctaacaaaaatggctacggtgatgtccatcgcttcctagaagccactaaacgattccttcaagacattgaccataatggctatcaaacctttccgactgatataactcggataaacccatactcagctaaaaacagttccagcgcacgaactgcgtcattcctgaaacttgcacaattgacatttaatgaaccgccagagctacttgggttggcaattaacagaacaaacatgaaatactcgccgtcaactagcgcggttgttagaggtgcagaagtctttcctcgcagtttactacggacgcactccatcccctgctgtcctttgtgtctgcgagaaaatggctacgcctcctacctttggcactttcaggggtacgaatactgccacagccataacgtacctttaattaccacttgtagctgtggtaaggagtttgactaccgagtatctgggttaaagggcatttgctgcaaatgcaaggagcctatcaccttaaccagcagggagaacggtcatgaggcagcgtgtactgtttcaaactggcttgctggccatgaatctaaacctctgccaaatcttcctaaaagctaccgatggggtttagttcattggtggatgggtattaaagatagcgagttcgatcacttttcgttcgttcaatttttctcaaactggccaaggtcattccactcgataatcgaagatgaagtagagttcaaccttgagcatgctgttgtcagcacgtctgaattacgactaaaagatcttcttggtcgattgtttttcggttcaattcggttacctgagcggaatcttcaacacaatatcatccttggtgagcttctctgctatttagaaaatcgtttatggcaagacaagggattaatcgccaacctcaaaatgaacgcgttagaggcgactgtaatgttaaattgtagcctcgatcagattgcatcaatggttgaacaacgcatcttgaagccaaatcgaaaaagcaagcccaacagccctcttgatgttaccgattatctatttcatttcggcgatattttctgtctttggttagctgagttccaaagcgatgagtttaaccgttcgttttatgtgtcgaggtggtaaatgcaaactctgaaagaactaatcgcatccaatcctgacgacttaacaactgaacttaagagagcatttcgtccactcacaccgcatattgcaattgatggtaatgaacttgacgcactgacgatattagtcaatttaaccgataagactgatgatcagaaagacctgctcgatcgagccaaatgcaagcaaaaacttcgagatgaaaaatggtgggctagctgcataaattgcgttaattacagacaaagccataacccaaaattcccggatatacgttctgaaggcgtgattcgaacccaagccctgggtgaattaccgagtttcctactctcgtcctcaaaaatcccaccataccattggtcatatagccatgattcaaaatacgtcaacaaaagcgcattcctcaccaatgagttttgttgggatggtgagatctcatgtttgggtgagcttcttaaagatgcagatcacccactttggaatactttgaaaaagttaggttgttctcaaaaaacttgcaaagcaatggcaaaacaactagctgatattactctcacgactatcaatgtcacactcgcaccaaattacctgactcaaatatctctccccgatagtgatacatcctacatttcactctctcctgttgcatcgctatcgatgcaaagccactttcatcagaggctccaagatgaaaatcggcatagcgcgataacgcggtttagccgaactaccaacatgggggtcactgcgatgacatgtggcggcgcatttagaatgttaaagtctggcgctaagttttccagcccccctcatcaccgattaaacagtaaacgaagttggttgacgtcagagcatgttcagtcattaaaacagtaccagcgcctcaacaaaagcctcatacctgaaaactctcggattgcactccgtagaaaatacaaaatcgagcttcaaaatatggtcagatcttggtttgcaatgcaagaccatacccttgattcgaacatacttatccaacatttgaatcatgacctatcttacttaggagccacaaaacgttttgcatacgatccagcgatgaccaagctctttactgagcttttgaaacgagagttatcaaattcaatcaataatggtgagcaacacactaatggatcgtttttagtcctaccgaatatcagggtttgtggcgcaacagctttaagctccccggtaacggtggggattccatcacttacagctttctttggcttcgttcacgcatttgaacggaatataaatcgcaccacctcatcgtttcgtgttgaatcctttgcgatatgcgtccatcaactacatgtcgagaagcgaggtttgacagcagagtttgtggaaaaaggcgacgggactatatccgctcccgcgacccgggatgactggcagtgtgatgtcgtatttagccttattttgaacaccaactttgctcaacatattgaccaagatacgttagttacatcactaccaaagcgattggctcggggttcagcaaaaattgcgattgatgactttaaacatatcaactcattctcgacattagaaacagcgatcgaatctctgccaatagaagctggtaggtggttatcactttacgcacagtcaaacaataatctaagtgatctattagcagccatgacagaggaccatcagctcatggcaagctgcgtcggttaccacttgttagaagagcccaaagataaaccaaactccctcagaggttacaaacacgctatcgccgagtgcatcattggactcattaactcaatcacctttagctcagagactgatcccaacacaatcttttggtcgctaaagaactatcaaaactacctagtggtacagccaaggagtatcaacgatgaaactaccgacaaatctagcctatgagcgctctatcgacccatcagatgtctgtttttttgtcgtctggcccgatgatagaaaaacacctttaacctacaattctcgtactctgctcgggcaaatggaagcggcatcattagcctatgatgtctcaggtcaaccaataaaaagtgccaccgctgaggcgttagctcaagggaaccctcatcaagttgatttctgccacgttccatacggtgcgagtcatattgaatgcagtttctccgtctcgttttcttctgaactacgtcaaccatataagtgtaactcaagcaaagttaaacaaacgctagtgcaattagtcgagctctacgaaacgaaaatcggctggactgagctagcaacccgatatttgatgaacatttgcaacggtaaatggctgtggaaaaatacccgtaaagcctattgctggaacattgtacttacaccttggccttggaacggggaaaaggttggatttgaagatattcgtactaactacacctcacggcaagactttaaaaataataaaaattggtctgctatagttgaaatgatcaaaaccgcattttctagtactgatgggctggcgatatttgaagtcagggccaccttgcacttgccaacgaatgctatggtgcggccaagccaagttttcacagaaaaagaaagtggcagtaaaagtaaatctaaaactcaaaacagtcgagtttttcagagtacaactattgatggtgaacgatcgccaatactaggggcctttaaaacgggagcagctattgcaaccattgacgactggtatcctgaagccactgagccactaagggtcggacggtttggggttcatcgcgaagatgtcacttgctaccgtcatccgtctaccggaaaagattttttctcgatattacaacaagcagagcactatattgaagtgttgagcgccaacaaaactcccgctcaagaaactatcaacgacatgcactttttaatggctaacctgattaagggtgggatgttccagcataaaggagactgactgtgaaatggtattataagacaatcacctttctgccagagttgtgcaacaacgagtcactggctgcaaagtgtctccgcgttctgcatggatttaactatcagtatgagacacgaaatatcggcgtttcatttccgctttggtgtgatgcaacggttggaaaaaagatttcatttgtcagcaagaacaagatagaactcgacttactacttaaacaacactatttcgtccaaatggaacaacttcaatactttcatatatccaacactgttctcgtcccagaagattgtacatacgtttcctttagacgctgtcaatctatagataagctcacagcagcagggctggcaaggaaaatcagacgcctggagaaacgtgctctatctagaggcgagcaatttgacccatcatcttttgctcaaaaagagcatactgcaatagcgcactaccactcacttggggagtccagcaaacagacgaaccgcaactttcgactcaatatcaggatgctctcggagcaaccccgtgaggggaactcgatttttagtagctatggcttatcaaattcagaaaactcgtttcagcctgtacccttaatctgacctaggctgctgccaccgctgagcaataactagcataaccccttggggcctctaaacgggtcttgaggggttttttgctgaaacctcaggcatttgagaagcacacggtcacactgcttccggtagtcaataaaccggtaaaccagcaatagacataagcggctatttaacgaccctgccctgaaccgacgaccgggtcatcgtggccggatcttgcggcccctcggcttgaacgaattgttagacattatttgccgactaccttggtgatctcgcctttcacgtagtggacaaattcttccaactgatctgcgcgcgaggccaagcgatcttcttcttgtccaagataagcctgtctagcttcaagtatgacgggctgatactgggccggcaggcgctccattgcccagtcggcagcgacatccttcggcgcgattttgccggttactgcgctgtaccaaatgcgggacaacgtaagcactacatttcgctcatcgccagcccagtcgggcggcgagttccatagcgttaaggtttcatttagcgcctcaaatagatcctgttcaggaaccggatcaaagagttcctccgccgctggacctaccaaggcaacgctatgttctcttgcttttgtcagcaagatagccagatcaatgtcgatcgtggctggctcgaagatacctgcaagaatgtcattgcgctgccattctccaaattgcagttcgcgcttagctggataacgccacggaatgatgtcgtcgtgcacaacaatggtgacttctacagcgcggagaatctcgctctctccaggggaagccgaagtttccaaaaggtcgttgatcaaagctcgccgcgttgtttcatcaagccttacggtcaccgtaaccagcaaatcaatatcactgtgtggcttcaggccgccatccactgcggagccgtacaaatgtacggccagcaacgtcggttcgagatggcgctcgatgacgccaactacctctgatagttgagtcgatacttcggcgatcaccgcttccctcatactcttcctttttcaatattattgaagcatttatcagggttattgtctcatgagcggatacatatttgaatgtatttagaaaaataaacaaatagctagctcactcggtcgctacgctccgggcgtgagactgcggcgggcgctgcggacacatacaaagttacccacagattccgtggataagcaggggactaacatgtgaggcaaaacagcagggccgcgccggtggcgtttttccataggctccgccctcctgccagagttcacataaacagacgcttttccggtgcatctgtgggagccgtgaggctcaaccatgaatctgacagtacgggcgaaacccgacaggacttaaagatccccaccgtttccggcgggtcgctccctcttgcgctctcctgttccgaccctgccgtttaccggatacctgttccgcctttctcccttacgggaagtgtggcgctttctcatagctcacacactggtatctcggctcggtgtaggtcgttcgctccaagctgggctgtaagcaagaactccccgttcagcccgactgctgcgccttatccggtaactgttcacttgagtccaacccggaaaagcacggtaaaacgccactggcagcagccattggtaactgggagttcgcagaggatttgtttagctaaacacgcggttgctcttgaagtgtgcgccaaagtccggctacactggaaggacagatttggttgctgtgctctgcgaaagccagttaccacggttaagcagttccccaactgacttaaccttcgatcaaaccacctccccaggtggttttttcgtttacagggcaaaagattacgcgcagaaaaaaaggatctcaagaagatcctttgatcttttctactgaaccgctctagatttcagtgcaatttatctcttcaaatgtagcacctgaagtcagccccatacgatataagttgtaattctcatgttagtcatgccccgcgcccaccggaaggagctgactgggttgaaggctctcaagggcatcggtcgagatcccggtgcctaatgagtgagctaacttacattaattgcgttgcgctcactgcccgctttccagtcgggaaacctgtcgtgccagctgcattaatgaatcggccaacgcgcggggagaggcggtttgcgtattgggcgccagggtggtttttcttttcaccagtgagacgggcaacagctgattgcccttcaccgcctggccctgagagagttgcagcaagcggtccacgctggtttgccccagcaggcgaaaatcctgtttgatggtggttaacggcgggatataacatgagctgtcttcggtatcgtcgtatcccactaccgagatgtccgcaccaacgcgcagcccggactcggtaatggcgcgcattgcgcccagcgccatctgatcgttggcaaccagcatcgcagtgggaacgatgccctcattcagcatttgcatggtttgttgaaaaccggacatggcactccagtcgccttcccgttccgctatcggctgaatttgattgcgagtgagatatttatgccagccagccagacgcagacgcgccgagacagaacttaatgggcccgctaacagcgcgatttgctggtgacccaatgcgaccagatgctccacgcccagtcgcgtaccgtcttcatgggagaaaataatactgttgatgggtgtctggtcagagacatcaagaaataacgccggaacattagtgcaggcagcttccacagcaatggcatcctggtcatccagcggatagttaatgatcagcccactgacgcgttgcgcgagaagattgtgcaccgccgctttacaggcttcgacgccgcttcgttctaccatcgacaccaccacgctggcacccagttgatcggcgcgagatttaatcgccgcgacaatttgcgacggcgcgtgcagggccagactggaggtggcaacgccaatcagcaacgactgtttgcccgccagttgttgtgccacgcggttgggaatgtaattcagctccgccatcgccgcttccactttttcccgcgttttcgcagaaacgtggctggcctggttcaccacgcgggaaacggtctgataagagacaccggcatactctgcgacatcgtataacgttactggtttcac

SEQ ID NO: 88 - DNA, 8445 bp, Synthetic construct
  source 1..8445: mol_type = other DNA
attcaccaccctgaattgactctcttccgggcgctatcatgccataccgcgaaaggttttgcgccattcgatggtgtccgggatctcgacgctctcccttatgcgactcctgcattaggaaattaatacgactcactataggggaattgtgagcggataacaattcccctgtagaaataattttgtttaactttaataaggagatataccatgggtgaactgccgagtaggtagctgataacagcgcggctgaaatcatcattaaagcgagtgggtgaactgccgagtaggtagctgataacggatccgaattcgagctcggcgcgcctgcaggtcgacaagcttgcggccgcataatgcttaagtcgaacagaaagtaatcgtattgtacacggccgcataatcgaaattaatacgactcactataggggaattgtgagcggataacaattccccatcttagtatattagttaagtataagaaggagatatacatatgtttttgcaaagacctaaaccttacagcgatgaaagtttagaaagtttctttatccgagtggctaacaaaaatggctacggtgatgtccatcgcttcctagaagccactaaacgattccttcaagacattgaccataatggctatcaaacctttccgactgatataactcggataaacccatactcagctaaaaacagttccagcgcacgaactgcgtcattcctgaaacttgcacaattgacatttaatgaaccgccagagctacttgggttggcaattaacagaacaaacatgaaatactcgccgtcaactagcgcggttgttagaggtgcagaagtctttcctcgcagtttactacggacgcactccatcccctgctgtcctttgtgtctgcgagaaaatggctacgcctcctacctttggcactttcaggggtacgaatactgccacagccataacgtacctttaattaccacttgtagctgtggtaaggagtttgactaccgagtatctgggttaaagggcatttgctgcaaatgcaaggagcctatcaccttaaccagcagggagaacggtcatgaggcagcgtgtactgtttcaaactggcttgctggccatgaatctaaacctctgccaaatcttcctaaaagctaccgatggggtttagttcattggtggatgggtattaaagatagcgagttcgatcacttttcgttcgttcaatttttctcaaactggccaaggtcattccactcgataatcgaagatgaagtagagttcaaccttgagcatgctgttgtcagcacgtctgaattacgactaaaagatcttcttggtcgattgtttttcggttcaattcggttacctgagcggaatcttcaacacaatatcatccttggtgagcttctctgctatttagaaaatcgtttatggcaagacaagggattaatcgccaacctcaaaatgaacgcgttagaggcgactgtaatgttaaattgtagcctcgatcagattgcatcaatggttgaacaacgcatcttgaagccaaatcgaaaaagcaagcccaacagccctcttgatgttaccgattatctatttcatttcggcgatattttctgtctttggttagctgagttccaaagcgatgagtttaaccgttcgttttatgtgtcgaggtggtaaatgcaaactctgaaagaactaatcgcatccaatcctgacgacttaacaactgaacttaagagagcatttcgtccactcacaccgcatattgcaattgatggtaatgaacttgacgcactgacgatattagtcaatttaaccgataagactgatgatcagaaagacctgctcgatcgagccaaatgcaagcaaaaacttcgagatgaaaaatggtgggctagctgcataaattgcgttaattacagacaaagccataacccaaaattcccggatatacgttctgaaggcgtgattcgaacccaagccctgggtgaattaccgagtttcctactctcgtcctcaaaaatcccaccataccattggtcatatagccatgattcaaaatacgtcaacaaaagcgcattcctcaccaatgagttttgttgggatggtgagatctcatgtttgggtgagcttcttaaagatgcagatcacccactttggaatactttgaaaaagttaggttgttctcaaaaaacttgcaaagcaatggcaaaacaactagctgatattactctcacgactatcaatgtcacactcgcaccaaattacctgactcaaatatctctccccgatagtgatacatcctacatttcactctctcctgttgcatcgctatcgatgcaaagccactttcatcagaggctccaagatgaaaatcggcatagcgcgataacgcggtttagccgaactaccaacatgggggtcactgcgatgacatgtggcggcgcatttagaatgttaaagtctggcgctaagttttccagcccccctcatcaccgattaaacagtaaacgaagttggttgacgtcagagcatgttcagtcattaaaacagtaccagcgcctcaacaaaagcctcatacctgaaaactctcggattgcactccgtagaaaatacaaaatcgagcttcaaaatatggtcagatcttggtttgcaatgcaagaccatacccttgattcgaacatacttatccaacatttgaatcatgacctatcttacttaggagccacaaaacgttttgcatacgatccagcgatgaccaagctctttactgagcttttgaaacgagagttatcaaattcaatcaataatggtgagcaacacactaatggatcgtttttagtcctaccgaatatcagggtttgtggcgcaacagctttaagctccccggtaacggtggggattccatcacttacagctttctttggcttcgttcacgcatttgaacggaatataaatcgcaccacctcatcgtttcgtgttgaatcctttgcgatatgcgtccatcaactacatgtcgagaagcgaggtttgacagcagagtttgtggaaaaaggcgacgggactatatccgctcccgcgacccgggatgactggcagtgtgatgtcgtatttagccttattttgaacaccaactttgctcaacatattgaccaagatacgttagttacatcactaccaaagcgattggctcggggttcagcaaaaattgcgattgatgactttaaacatatcaactcattctcgacattagaaacagcgatcgaatctctgccaatagaagctggtaggtggttatcactttacgcacagtcaaacaataatctaagtgatctattagcagccatgacagaggaccatcagctcatggcaagctgcgtcggttaccacttgttagaagagcccaaagataaaccaaactccctcagaggttacaaacacgctatcgccgagtgcatcattggactcattaactcaatcacctttagctcagagactgatcccaacacaatcttttggtcgctaaagaactatcaaaactacctagtggtacagccaaggagtatcaacgatgaaactaccgacaaatctagcctatgagcgctctatcgacccatcagatgtctgtttttttgtcgtctggcccgatgatagaaaaacacctttaacctacaattctcgtactctgctcgggcaaatggaagcggcatcattagcctatgatgtctcaggtcaaccaataaaaagtgccaccgctgaggcgttagctcaagggaaccctcatcaagttgatttctgccacgttccatacggtgcgagtcatattgaatgcagtttctccgtctcgttttcttctgaactacgtcaaccatataagtgtaactcaagcaaagttaaacaaacgctagtgcaattagtcgagctctacgaaacgaaaatcggctggactgagctagcaacccgatatttgatgaacatttgcaacggtaaatggctgtggaaaaatacccgtaaagcctattgctggaacattgtacttacaccttggccttggaacggggaaaaggttggatttgaagatattcgtactaactacacctcacggcaagactttaaaaataataaaaattggtctgctatagttgaaatgatcaaaaccgcattttctagtactgatgggctggcgatatttgaagtcagggccaccttgcacttgccaacgaatgctatggtgcggccaagccaagttttcacagaaaaagaaagtggcagtaaaagtaaatctaaaactcaaaacagtcgagtttttcagagtacaactattgatggtgaacgatcgccaatactaggggcctttaaaacgggagcagctattgcaaccattgacgactggtatcctgaagccactgagccactaagggtcggacggtttggggttcatcgcgaagatgtcacttgctaccgtcatccgtctaccggaaaagattttttctcgatattacaacaagcagagcactatattgaagtgttgagcgccaacaaaactcccgctcaagaaactatcaacgacatgcactttttaatggctaacctgattaagggtgggatgttccagcataaaggagactgactgtgaaatggtattataagacaatcacctttctgccagagttgtgcaacaacgagtcactggctgcaaagtgtctccgcgttctgcatggatttaactatcagtatgagacacgaaatatcggcgtttcatttccgctttggtgtgatgcaacggttggaaaaaagatttcatttgtcagcaagaacaagatagaactcgacttactacttaaacaacactatttcgtccaaatggaacaacttcaatactttcatatatccaacactgttctcgtcccagaagattgtacatacgtttcctttagacgctgtcaatctatagataagctcacagcagcagggctggcaaggaaaatcagacgcctggagaaacgtgctctatctagaggcgagcaatttgacccatcatcttttgctcaaaaagagcatactgcaatagcgcactaccactcacttggggagtccagcaaacagacgaaccgcaactttcgactcaatatcaggatgctctcggagcaaccccgtgaggggaactcgatttttagtagctatggcttatcaaattcagaaaactcgtttcagcctgtacccttaatctgacctaggctgctgccaccgctgagcaataactagcataaccccttggggcctctaaacgggtcttgaggggttttttgctgaaacctcaggcatttgagaagcacacggtcacactgcttccggtagtcaataaaccggtaaaccagcaatagacataagcggctatttaacgaccctgccctgaaccgacgaccgggtcatcgtggccggatcttgcggcccctcggcttgaacgaattgttagacattatttgccgactaccttggtgatctcgcctttcacgtagtggacaaattcttccaactgatctgcgcgcgaggccaagcgatcttcttcttgtccaagataagcctgtctagcttcaagtatgacgggctgatactgggccggcaggcgctccattgcccagtcggcagcgacatccttcggcgcgattttgccggttactgcgctgtaccaaatgcgggacaacgtaagcactacatttcgctcatcgccagcccagtcgggcggcgagttccatagcgttaaggtttcatttagcgcctcaaatagatcctgttcaggaaccggatcaaagagttcctccgccgctggacctaccaaggcaacgctatgttctcttgcttttgtcagcaagatagccagatcaatgtcgatcgtggctggctcgaagatacctgcaagaatgtcattgcgctgccattctccaaattgcagttcgcgcttagctggataacgccacggaatgatgtcgtcgtgcacaacaatggtgacttctacagcgcggagaatctcgctctctccaggggaagccgaagtttccaaaaggtcgttgatcaaagctcgccgcgttgtttcatcaagccttacggtcaccgtaaccagcaaatcaatatcactgtgtggcttcaggccgccatccactgcggagccgtacaaatgtacggccagcaacgtcggttcgagatggcgctcgatgacgccaactacctctgatagttgagtcgatacttcggcgatcaccgcttccctcatactcttcctttttcaatattattgaagcatttatcagggttattgtctcatgagcggatacatatttgaatgtatttagaaaaataaacaaatagctagctcactcggtcgctacgctccgggcgtgagactgcggcgggcgctgcggacacatacaaagttacccacagattccgtggataagcaggggactaacatgtgaggcaaaacagcagggccgcgccggtggcgtttttccataggctccgccctcctgccagagttcacataaacagacgcttttccggtgcatctgtgggagccgtgaggctcaaccatgaatctgacagtacgggcgaaacccgacaggacttaaagatccccaccgtttccggcgggtcgctccctcttgcgctctcctgttccgaccctgccgtttaccggatacctgttccgcctttctcccttacgggaagtgtggcgctttctcatagctcacacactggtatctcggctcggtgtaggtcgttcgctccaagctgggctgtaagcaagaactccccgttcagcccgactgctgcgccttatccggtaactgttcacttgagtccaacccggaaaagcacggtaaaacgccactggcagcagccattggtaactgggagttcgcagaggatttgtttagctaaacacgcggttgctcttgaagtgtgcgccaaagtccggctacactggaaggacagatttggttgctgtgctctgcgaaagccagttaccacggttaagcagttccccaactgacttaaccttcgatcaaaccacctccccaggtggttttttcgtttacagggcaaaagattacgcgcagaaaaaaaggatctcaagaagatcctttgatcttttctactgaaccgctctagatttcagtgcaatttatctcttcaaatgtagcacctgaagtcagccccatacgatataagttgtaattctcatgttagtcatgccccgcgcccaccggaaggagctgactgggttgaaggctctcaagggcatcggtcgagatcccggtgcctaatgagtgagctaacttacattaattgcgttgcgctcactgcccgctttccagtcgggaaacctgtcgtgccagctgcattaatgaatcggccaacgcgcggggagaggcggtttgcgtattgggcgccagggtggtttttcttttcaccagtgagacgggcaacagctgattgcccttcaccgcctggccctgagagagttgcagcaagcggtccacgctggtttgccccagcaggcgaaaatcctgtttgatggtggttaacggcgggatataacatgagctgtcttcggtatcgtcgtatcccactaccgagatgtccgcaccaacgcgcagcccggactcggtaatggcgcgcattgcgcccagcgccatctgatcgttggcaaccagcatcgcagtgggaacgatgccctcattcagcatttgcatggtttgttgaaaaccggacatggcactccagtcgccttcccgttccgctatcggctgaatttgattgcgagtgagatatttatgccagccagccagacgcagacgcgccgagacagaacttaatgggcccgctaacagcgcgatttgctggtgacccaatgcgaccagatgctccacgcccagtcgcgtaccgtcttcatgggagaaaataatactgttgatgggtgtctggtcagagacatcaagaaataacgccggaacattagtgcaggcagcttccacagcaatggcatcctggtcatccagcggatagttaatgatcagcccactgacgcgttgcgcgagaagattgtgcaccgccgctttacaggcttcgacgccgcttcgttctaccatcgacaccaccacgctggcacccagttgatcggcgcgagatttaatcgccgcgacaatttgcgacggcgcgtgcagggccagactggaggtggcaacgccaatcagcaacgactgtttgcccgccagttgttgtgccacgcggttgggaatgtaattcagctccgccatcgccgcttccactttttcccgcgttttcgcagaaacgtggctggcctggttcaccacgcgggaaacggtctgataagagacaccggcatactctgcgacatcgtataacgttactggtttcac

SEQ ID NO: 89 - DNA, 8445 bp, Synthetic construct
  source 1..8445: mol_type = other DNA
attcaccaccctgaattgactctcttccgggcgctatcatgccataccgcgaaaggttttgcgccattcgatggtgtccgggatctcgacgctctcccttatgcgactcctgcattaggaaattaatacgactcactataggggaattgtgagcggataacaattcccctgtagaaataattttgtttaactttaataaggagatataccatgggtgaactgccgagtaggtagctgataacgcgcggctgaaatcatcattaaagcgagtggcgtgaactgccgagtaggtagctgataacggatccgaattcgagctcggcgcgcctgcaggtcgacaagcttgcggccgcataatgcttaagtcgaacagaaagtaatcgtattgtacacggccgcataatcgaaattaatacgactcactataggggaattgtgagcggataacaattccccatcttagtatattagttaagtataagaaggagatatacatatgtttttgcaaagacctaaaccttacagcgatgaaagtttagaaagtttctttatccgagtggctaacaaaaatggctacggtgatgtccatcgcttcctagaagccactaaacgattccttcaagacattgaccataatggctatcaaacctttccgactgatataactcggataaacccatactcagctaaaaacagttccagcgcacgaactgcgtcattcctgaaacttgcacaattgacatttaatgaaccgccagagctacttgggttggcaattaacagaacaaacatgaaatactcgccgtcaactagcgcggttgttagaggtgcagaagtctttcctcgcagtttactacggacgcactccatcccctgctgtcctttgtgtctgcgagaaaatggctacgcctcctacctttggcactttcaggggtacgaatactgccacagccataacgtacctttaattaccacttgtagctgtggtaaggagtttgactaccgagtatctgggttaaagggcatttgctgcaaatgcaaggagcctatcaccttaaccagcagggagaacggtcatgaggcagcgtgtactgtttcaaactggcttgctggccatgaatctaaacctctgccaaatcttcctaaaagctaccgatggggtttagttcattggtggatgggtattaaagatagcgagttcgatcacttttcgttcgttcaatttttctcaaactggccaaggtcattccactcgataatcgaagatgaagtagagttcaaccttgagcatgctgttgtcagcacgtctgaattacgactaaaagatcttcttggtcgattgtttttcggttcaattcggttacctgagcggaatcttcaacacaatatcatccttggtgagcttctctgctatttagaaaatcgtttatggcaagacaagggattaatcgccaacctcaaaatgaacgcgttagaggcgactgtaatgttaaattgtagcctcgatcagattgcatcaatggttgaacaacgcatcttgaagccaaatcgaaaaagcaagcccaacagccctcttgatgttaccgattatctatttcatttcggcgatattttctgtctttggttagctgagttccaaagcgatgagtttaaccgttcgttttatgtgtcgaggtggtaaatgcaaactctgaaagaactaatcgcatccaatcctgacgacttaacaactgaacttaagagagcatttcgtccactcacaccgcatattgcaattgatggtaatgaacttgacgcactgacgatattagtcaatttaaccgataagactgatgatcagaaagacctgctcgatcgagccaaatgcaagcaaaaacttcgagatgaaaaatggtgggctagctgcataaattgcgttaattacagacaaagccataacccaaaattcccggatatacgttctgaaggcgtgattcgaacccaagccctgggtgaattaccgagtttcctactctcgtcctcaaaaatcccaccataccattggtcatatagccatgattcaaaatacgtcaacaaaagcgcattcctcaccaatgagttttgttgggatggtgagatctcatgtttgggtgagcttcttaaagatgcagatcacccactttggaatactttgaaaaagttaggttgttctcaaaaaacttgcaaagcaatggcaaaacaactagctgatattactctcacgactatcaatgtcacactcgcaccaaattacctgactcaaatatctctccccgatagtgatacatcctacatttcactctctcctgttgcatcgctatcgatgcaaagccactttcatcagaggctccaagatgaaaatcggcatagcgcgataacgcggtttagccgaactaccaacatgggggtcactgcgatgacatgtggcggcgcatttagaatgttaaagtctggcgctaagttttccagcccccctcatcaccgattaaacagtaaacgaagttggttgacgtcagagcatgttcagtcattaaaacagtaccagcgcctcaacaaaagcctcatacctgaaaactctcggattgcactccgtagaaaatacaaaatcgagcttcaaaatatggtcagatcttggtttgcaatgcaagaccatacccttgattcgaacatacttatccaacatttgaatcatgacctatcttacttaggagccacaaaacgttttgcatacgatccagcgatgaccaagctctttactgagcttttgaaacgagagttatcaaattcaatcaataatggtgagcaacacactaatggatcgtttttagtcctaccgaatatcagggtttgtggcgcaacagctttaagctccccggtaacggtggggattccatcacttacagctttctttggcttcgttcacgcatttgaacggaatataaatcgcaccacctcatcgtttcgtgttgaatcctttgcgatatgcgtccatcaactacatgtcgagaagcgaggtttgacagcagagtttgtggaaaaaggcgacgggactatatccgctcccgcgacccgggatgactggcagtgtgatgtcgtatttagccttattttgaacaccaactttgctcaacatattgaccaagatacgttagttacatcactaccaaagcgattggctcggggttcagcaaaaattgcgattgatgactttaaacatatcaactcattctcgacattagaaacagcgatcgaatctctgccaatagaagctggtaggtggttatcactttacgcacagtcaaacaataatctaagtgatctattagcagccatgacagaggaccatcagctcatggcaagctgcgtcggttaccacttgttagaagagcccaaagataaaccaaactccctcagaggttacaaacacgctatcgccgagtgcatcattggactcattaactcaatcacctttagctcagagactgatcccaacacaatcttttggtcgctaaagaactatcaaaactacctagtggtacagccaaggagtatcaacgatgaaactaccgacaaatctagcctatgagcgctctatcgacccatcagatgtctgtttttttgtcgtctggcccgatgatagaaaaacacctttaacctacaattctcgtactctgctcgggcaaatggaagcggcatcattagcctatgatgtctcaggtcaaccaataaaaagtgccaccgctgaggcgttagctcaagggaaccctcatcaagttgatttctgccacgttccatacggtgcgagtcatattgaatgcagtttctccgtctcgttttcttctgaactacgtcaaccatataagtgtaactcaagcaaagttaaacaaacgctagtgcaattagtcgagctctacgaaacgaaaatcggctggactgagctagcaacccgatatttgatgaacatttgcaacggtaaatggctgtggaaaaatacccgtaaagcctattgctggaacattgtacttacaccttggccttggaacggggaaaaggttggatttgaagatattcgtactaactacacctcacggcaagactttaaaaataataaaaattggtctgctatagttgaaatgatcaaaaccgcattttctagtactgatgggctggcgatatttgaagtcagggccaccttgcacttgccaacgaatgctatggtgcggccaagccaagttttcacagaaaaagaaagtggcagtaaaagtaaatctaaaactcaaaacagtcgagtttttcagagtacaactattgatggtgaacgatcgccaatactaggggcctttaaaacgggagcagctattgcaaccattgacgactggtatcctgaagccactgagccactaagggtcggacggtttggggttcatcgcgaagatgtcacttgctaccgtcatccgtctaccggaaaagattttttctcgatattacaacaagcagagcactatattgaagtgttgagcgccaacaaaactcccgctcaagaaactatcaacgacatgcactttttaatggctaacctgattaagggtgggatgttccagcataaaggagactgactgtgaaatggtattataagacaatcacctttctgccagagttgtgcaacaacgagtcactggctgcaaagtgtctccgcgttctgcatggatttaactatcagtatgagacacgaaatatcggcgtttcatttccgctttggtgtgatgcaacggttggaaaaaagatttcatttgtcagcaagaacaagatagaactcgacttactacttaaacaacactatttcgtccaaatggaacaacttcaatactttcatatatccaacactgttctcgtcccagaagattgtacatacgtttcctttagacgctgtcaatctatagataagctcacagcagcagggctggcaaggaaaatcagacgcctggagaaacgtgctctatctagaggcgagcaatttgacccatcatcttttgctcaaaaagagcatactgcaatagcgcactaccactcacttggggagtccagcaaacagacgaaccgcaactttcgactcaatatcaggatgctctcggagcaaccccgtgaggggaactcgatttttagtagctatggcttatcaaattcagaaaactcgtttcagcctgtacccttaatctgacctaggctgctgccaccgctgagcaataactagcataaccccttggggcctctaaacgggtcttgaggggttttttgctgaaacctcaggcatttgagaagcacacggtcacactgcttccggtagtcaataaaccggtaaaccagcaatagacataagcggctatttaacgaccctgccctgaaccgacgaccgggtcatcgtggccggatcttgcggcccctcggcttgaacgaattgttagacattatttgccgactaccttggtgatctcgcctttcacgtagtggacaaattcttccaactgatctgcgcgcgaggccaagcgatcttcttcttgtccaagataagcctgtctagcttcaagtatgacgggctgatactgggccggcaggcgctccattgcccagtcggcagcgacatccttcggcgcgattttgccggttactgcgctgtaccaaatgcgggacaacgtaagcactacatttcgctcatcgccagcccagtcgggcggcgagttccatagcgttaaggtttcatttagcgcctcaaatagatcctgttcaggaaccggatcaaagagttcctccgccgctggacctaccaaggcaacgctatgttctcttgcttttgtcagcaagatagccagatcaatgtcgatcgtggctggctcgaagatacctgcaagaatgtcattgcgctgccattctccaaattgcagttcgcgcttagctggataacgccacggaatgatgtcgtcgtgcacaacaatggtgacttctacagcgcggagaatctcgctctctccaggggaagccgaagtttccaaaaggtcgttgatcaaagctcgccgcgttgtttcatcaagccttacggtcaccgtaaccagcaaatcaatatcactgtgtggcttcaggccgccatccactgcggagccgtacaaatgtacggccagcaacgtcggttcgagatggcgctcgatgacgccaactacctctgatagttgagtcgatacttcggcgatcaccgcttccctcatactcttcctttttcaatattattgaagcatttatcagggttattgtctcatgagcggatacatatttgaatgtatttagaaaaataaacaaatagctagctcactcggtcgctacgctccgggcgtgagactgcggcgggcgctgcggacacatacaaagttacccacagattccgtggataagcaggggactaacatgtgaggcaaaacagcagggccgcgccggtggcgtttttccataggctccgccctcctgccagagttcacataaacagacgcttttccggtgcatctgtgggagccgtgaggctcaaccatgaatctgacagtacgggcgaaacccgacaggacttaaagatccccaccgtttccggcgggtcgctccctcttgcgctctcctgttccgaccctgccgtttaccggatacctgttccgcctttctcccttacgggaagtgtggcgctttctcatagctcacacactggtatctcggctcggtgtaggtcgttcgctccaagctgggctgtaagcaagaactccccgttcagcccgactgctgcgccttatccggtaactgttcacttgagtccaacccggaaaagcacggtaaaacgccactggcagcagccattggtaactgggagttcgcagaggatttgtttagctaaacacgcggttgctcttgaagtgtgcgccaaagtccggctacactggaaggacagatttggttgctgtgctctgcgaaagccagttaccacggttaagcagttccccaactgacttaaccttcgatcaaaccacctccccaggtggttttttcgtttacagggcaaaagattacgcgcagaaaaaaaggatctcaagaagatcctttgatcttttctactgaaccgctctagatttcagtgcaatttatctcttcaaatgtagcacctgaagtcagccccatacgatataagttgtaattctcatgttagtcatgccccgcgcccaccggaaggagctgactgggttgaaggctctcaagggcatcggtcgagatcccggtgcctaatgagtgagctaacttacattaattgcgttgcgctcactgcccgctttccagtcgggaaacctgtcgtgccagctgcattaatgaatcggccaacgcgcggggagaggcggtttgcgtattgggcgccagggtggtttttcttttcaccagtgagacgggcaacagctgattgcccttcaccgcctggccctgagagagttgcagcaagcggtccacgctggtttgccccagcaggcgaaaatcctgtttgatggtggttaacggcgggatataacatgagctgtcttcggtatcgtcgtatcccactaccgagatgtccgcaccaacgcgcagcccggactcggtaatggcgcgcattgcgcccagcgccatctgatcgttggcaaccagcatcgcagtgggaacgatgccctcattcagcatttgcatggtttgttgaaaaccggacatggcactccagtcgccttcccgttccgctatcggctgaatttgattgcgagtgagatatttatgccagccagccagacgcagacgcgccgagacagaacttaatgggcccgctaacagcgcgatttgctggtgacccaatgcgaccagatgctccacgcccagtcgcgtaccgtcttcatgggagaaaataatactgttgatgggtgtctggtcagagacatcaagaaataacgccggaacattagtgcaggcagcttccacagcaatggcatcctggtcatccagcggatagttaatgatcagcccactgacgcgttgcgcgagaagattgtgcaccgccgctttacaggcttcgacgccgcttcgttctaccatcgacaccaccacgctggcacccagttgatcggcgcgagatttaatcgccgcgacaatttgcgacggcgcgtgcagggccagactggaggtggcaacgccaatcagcaacgactgtttgcccgccagttgttgtgccacgcggttgggaatgtaattcagctccgccatcgccgcttccactttttcccgcgttttcgcagaaacgtggctggcctggttcaccacgcgggaaacggtctgataagagacaccggcatactctgcgacatcgtataacgttactggtttcac

SEQ ID NO: 90 - DNA, 8445 bp, Synthetic construct
  source 1..8445: mol_type = other DNA
attcaccaccctgaattgactctcttccgggcgctatcatgccataccgcgaaaggttttgcgccattcgatggtgtccgggatctcgacgctctcccttatgcgactcctgcattaggaaattaatacgactcactataggggaattgtgagcggataacaattcccctgtagaaataattttgtttaactttaataaggagatataccatgggtgaactgccgagtaggtagctgataaccgcggctgaaatcatcattaaagcgagtggcagtgaactgccgagtaggtagctgataacggatccgaattcgagctcggcgcgcctgcaggtcgacaagcttgcggccgcataatgcttaagtcgaacagaaagtaatcgtattgtacacggccgcataatcgaaattaatacgactcactataggggaattgtgagcggataacaattccccatcttagtatattagttaagtataagaaggagatatacatatgtttttgcaaagacctaaaccttacagcgatgaaagtttagaaagtttctttatccgagtggctaacaaaaatggctacggtgatgtccatcgcttcctagaagccactaaacgattccttcaagacattgaccataatggctatcaaacctttccgactgatataactcggataaacccatactcagctaaaaacagttccagcgcacgaactgcgtcattcctgaaacttgcacaattgacatttaatgaaccgccagagctacttgggttggcaattaacagaacaaacatgaaatactcgccgtcaactagcgcggttgttagaggtgcagaagtctttcctcgcagtttactacggacgcactccatcccctgctgtcctttgtgtctgcgagaaaatggctacgcctcctacctttggcactttcaggggtacgaatactgccacagccataacgtacctttaattaccacttgtagctgtggtaaggagtttgactaccgagtatctgggttaaagggcatttgctgcaaatgcaaggagcctatcaccttaaccagcagggagaacggtcatgaggcagcgtgtactgtttcaaactggcttgctggccatgaatctaaacctctgccaaatcttcctaaaagctaccgatggggtttagttcattggtggatgggtattaaagatagcgagttcgatcacttttcgttcgttcaatttttctcaaactggccaaggtcattccactcgataatcgaagatgaagtagagttcaaccttgagcatgctgttgtcagcacgtctgaattacgactaaaagatcttcttggtcgattgtttttcggttcaattcggttacctgagcggaatcttcaacacaatatcatccttggtgagcttctctgctatttagaaaatcgtttatggcaagacaagggattaatcgccaacctcaaaatgaacgcgttagaggcgactgtaatgttaaattgtagcctcgatcagattgcatcaatggttgaacaacgcatcttgaagccaaatcgaaaaagcaagcccaacagccctcttgatgttaccgattatctatttcatttcggcgatattttctgtctttggttagctgagttccaaagcgatgagtttaaccgttcgttttatgtgtcgaggtggtaaatgcaaactctgaaagaactaatcgcatccaatcctgacgacttaacaactgaacttaagagagcatttcgtccactcacaccgcatattgcaattgatggtaatgaacttgacgcactgacgatattagtcaatttaaccgataagactgatgatcagaaagacctgctcgatcgagccaaatgcaagcaaaaacttcgagatgaaaaatggtgggctagctgcataaattgcgttaattacagacaaagccataacccaaaattcccggatatacgttctgaaggcgtgattcgaacccaagccctgggtgaattaccgagtttcctactctcgtcctcaaaaatcccaccataccattggtcatatagccatgattcaaaatacgtcaacaaaagcgcattcctcaccaatgagttttgttgggatggtgagatctcatgtttgggtgagcttcttaaagatgcagatcacccactttggaatactttgaaaaagttaggttgttctcaaaaaacttgcaaagcaatggcaaaacaactagctgatattactctcacgactatcaatgtcacactcgcaccaaattacctgactcaaatatctctccccgatagtgatacatcctacatttcactctctcctgttgcatcgctatcgatgcaaagccactttcatcagaggctccaagatgaaaatcggcatagcgcgataacgcggtttagccgaactaccaacatgggggtcactgcgatgacatgtggcggcgcatttagaatgttaaagtctggcgctaagttttccagcccccctcatcaccgattaaacagtaaacgaagttggttgacgtcagagcatgttcagtcattaaaacagtaccagcgcctcaacaaaagcctcatacctgaaaactctcggattgcactccgtagaaaatacaaaatcgagcttcaaaatatggtcagatcttggtttgcaatgcaagaccatacccttgattcgaacatacttatccaacatttgaatcatgacctatcttacttaggagccacaaaacgttttgcatacgatccagcgatgaccaagctctttactgagcttttgaaacgagagttatcaaattcaatcaataatggtgagcaacacactaatggatcgtttttagtcctaccgaatatcagggtttgtggcgcaacagctttaagctccccggtaacggtggggattccatcacttacagctttctttggcttcgttcacgcatttgaacggaatataaatcgcaccacctcatcgtttcgtgttgaatcctttgcgatatgcgtccatcaactacatgtcgagaagcgaggtttgacagcagagtttgtggaaaaaggcgacgggactatatccgctcccgcgacccgggatgactggcagtgtgatgtcgtatttagccttattttgaacaccaactttgctcaacatattgaccaagatacgttagttacatcactaccaaagcgattggctcggggttcagcaaaaattgcgattgatgactttaaacatatcaactcattctcgacattagaaacagcgatcgaatctctgccaatagaagctggtaggtggttatcactttacgcacagtcaaacaataatctaagtgatctattagcagccatgacagaggaccatcagctcatggcaagctgcgtcggttaccacttgttagaagagcccaaagataaaccaaactccctcagaggttacaaacacgctatcgccgagtgcatcattggactcattaactcaatcacctttagctcagagactgatcccaacacaatcttttggtcgctaaagaactatcaaaactacctagtggtacagccaaggagtatcaacgatgaaactaccgacaaatctagcctatgagcgctctatcgacccatcagatgtctgtttttttgtcgtctggcccgatgatagaaaaacacctttaacctacaattctcgtactctgctcgggcaaatggaagcggcatcattagcctatgatgtctcaggtcaaccaataaaaagtgccaccgctgaggcgttagctcaagggaaccctcatcaagttgatttctgccacgttccatacggtgcgagtcatattgaatgcagtttctccgtctcgttttcttctgaactacgtcaaccatataagtgtaactcaagcaaagttaaacaaacgctagtgcaattagtcgagctctacgaaacgaaaatcggctggactgagctagcaacccgatatttgatgaacatttgcaacggtaaatggctgtggaaaaatacccgtaaagcctattgctggaacattgtacttacaccttggccttggaacggggaaaaggttggatttgaagatattcgtactaactacacctcacggcaagactttaaaaataataaaaattggtctgctatagttgaaatgatcaaaaccgcattttctagtactgatgggctggcgatatttgaagtcagggccaccttgcacttgccaacgaatgctatggtgcggccaagccaagttttcacagaaaaagaaagtggcagtaaaagtaaatctaaaactcaaaacagtcgagtttttcagagtacaactattgatggtgaacgatcgccaatactaggggcctttaaaacgggagcagctattgcaaccattgacgactggtatcctgaagccactgagccactaagggtcggacggtttggggttcatcgcgaagatgtcacttgctaccgtcatccgtctaccggaaaagattttttctcgatattacaacaagcagagcactatattgaagtgttgagcgccaacaaaactcccgctcaagaaactatcaacgacatgcactttttaatggctaacctgattaagggtgggatgttccagcataaaggagactgactgtgaaatggtattataagacaatcacctttctgccagagttgtgcaacaacgagtcactggctgcaaagtgtctccgcgttctgcatggatttaactatcagtatgagacacgaaatatcggcgtttcatttccgctttggtgtgatgcaacggttggaaaaaagatttcatttgtcagcaagaacaagatagaactcgacttactacttaaacaacactatttcgtccaaatggaacaacttcaatactttcatatatccaacactgttctcgtcccagaagattgtacatacgtttcctttagacgctgtcaatctatagataagctcacagcagcagggctggcaaggaaaatcagacgcctggagaaacgtgctctatctagaggcgagcaatttgacccatcatcttttgctcaaaaagagcatactgcaatagcgcactaccactcacttggggagtccagcaaacagacgaaccgcaactttcgactcaatatcaggatgctctcggagcaaccccgtgaggggaactcgatttttagtagctatggcttatcaaattcagaaaactcgtttcagcctgtacccttaatctgacctaggctgctgccaccgctgagcaataactagcataaccccttggggcctctaaacgggtcttgaggggttttttgctgaaacctcaggcatttgagaagcacacggtcacactgcttccggtagtcaataaaccggtaaaccagcaatagacataagcggctatttaacgaccctgccctgaaccgacgaccgggtcatcgtggccggatcttgcggcccctcggcttgaacgaattgttagacattatttgccgactaccttggtgatctcgcctttcacgtagtggacaaattcttccaactgatctgcgcgcgaggccaagcgatcttcttcttgtccaagataagcctgtctagcttcaagtatgacgggctgatactgggccggcaggcgctccattgcccagtcggcagcgacatccttcggcgcgattttgccggttactgcgctgtaccaaatgcgggacaacgtaagcactacatttcgctcatcgccagcccagtcgggcggcgagttccatagcgttaaggtttcatttagcgcctcaaatagatcctgttcaggaaccggatcaaagagttcctccgccgctggacctaccaaggcaacgctatgttctcttgcttttgtcagcaagatagccagatcaatgtcgatcgtggctggctcgaagatacctgcaagaatgtcattgcgctgccattctccaaattgcagttcgcgcttagctggataacgccacggaatgatgtcgtcgtgcacaacaatggtgacttctacagcgcggagaatctcgctctctccaggggaagccgaagtttccaaaaggtcgttgatcaaagctcgccgcgttgtttcatcaagccttacggtcaccgtaaccagcaaatcaatatcactgtgtggcttcaggccgccatccactgcggagccgtacaaatgtacggccagcaacgtcggttcgagatggcgctcgatgacgccaactacctctgatagttgagtcgatacttcggcgatcaccgcttccctcatactcttcctttttcaatattattgaagcatttatcagggttattgtctcatgagcggatacatatttgaatgtatttagaaaaataaacaaatagctagctcactcggtcgctacgctccgggcgtgagactgcggcgggcgctgcggacacatacaaagttacccacagattccgtggataagcaggggactaacatgtgaggcaaaacagcagggccgcgccggtggcgtttttccataggctccgccctcctgccagagttcacataaacagacgcttttccggtgcatctgtgggagccgtgaggctcaaccatgaatctgacagtacgggcgaaacccgacaggacttaaagatccccaccgtttccggcgggtcgctccctcttgcgctctcctgttccgaccctgccgtttaccggatacctgttccgcctttctcccttacgggaagtgtggcgctttctcatagctcacacactggtatctcggctcggtgtaggtcgttcgctccaagctgggctgtaagcaagaactccccgttcagcccgactgctgcgccttatccggtaactgttcacttgagtccaacccggaaaagcacggtaaaacgccactggcagcagccattggtaactgggagttcgcagaggatttgtttagctaaacacgcggttgctcttgaagtgtgcgccaaagtccggctacactggaaggacagatttggttgctgtgctctgcgaaagccagttaccacggttaagcagttccccaactgacttaaccttcgatcaaaccacctccccaggtggttttttcgtttacagggcaaaagattacgcgcagaaaaaaaggatctcaagaagatcctttgatcttttctactgaaccgctctagatttcagtgcaatttatctcttcaaatgtagcacctgaagtcagccccatacgatataagttgtaattctcatgttagtcatgccccgcgcccaccggaaggagctgactgggttgaaggctctcaagggcatcggtcgagatcccggtgcctaatgagtgagctaacttacattaattgcgttgcgctcactgcccgctttccagtcgggaaacctgtcgtgccagctgcattaatgaatcggccaacgcgcggggagaggcggtttgcgtattgggcgccagggtggtttttcttttcaccagtgagacgggcaacagctgattgcccttcaccgcctggccctgagagagttgcagcaagcggtccacgctggtttgccccagcaggcgaaaatcctgtttgatggtggttaacggcgggatataacatgagctgtcttcggtatcgtcgtatcccactaccgagatgtccgcaccaacgcgcagcccggactcggtaatggcgcgcattgcgcccagcgccatctgatcgttggcaaccagcatcgcagtgggaacgatgccctcattcagcatttgcatggtttgttgaaaaccggacatggcactccagtcgccttcccgttccgctatcggctgaatttgattgcgagtgagatatttatgccagccagccagacgcagacgcgccgagacagaacttaatgggcccgctaacagcgcgatttgctggtgacccaatgcgaccagatgctccacgcccagtcgcgtaccgtcttcatgggagaaaataatactgttgatgggtgtctggtcagagacatcaagaaataacgccggaacattagtgcaggcagcttccacagcaatggcatcctggtcatccagcggatagttaatgatcagcccactgacgcgttgcgcgagaagattgtgcaccgccgctttacaggcttcgacgccgcttcgttctaccatcgacaccaccacgctggcacccagttgatcggcgcgagatttaatcgccgcgacaatttgcgacggcgcgtgcagggccagactggaggtggcaacgccaatcagcaacgactgtttgcccgccagttgttgtgccacgcggttgggaatgtaattcagctccgccatcgccgcttccactttttcccgcgttttcgcagaaacgtggctggcctggttcaccacgcgggaaacggtctgataagagacaccggcatactctgcgacatcgtataacgttactggtttcac

SEQ ID NO: 91 - DNA, 8445 bp, Synthetic construct
  source 1..8445: mol_type = other DNA
attcaccaccctgaattgactctcttccgggcgctatcatgccataccgcgaaaggttttgcgccattcgatggtgtccgggatctcgacgctctcccttatgcgactcctgcattaggaaattaatacgactcactataggggaattgtgagcggataacaattcccctgtagaaataattttgtttaactttaataaggagatataccatgggtgaactgccgagtaggtagctgataacgcggctgaaatcatcattaaagcgagtggcaagtgaactgccgagtaggtagctgataacggatccgaattcgagctcggcgcgcctgcaggtcgacaagcttgcggccgcataatgcttaagtcgaacagaaagtaatcgtattgtacacggccgcataatcgaaattaatacgactcactataggggaattgtgagcggataacaattccccatcttagtatattagttaagtataagaaggagatatacatatgtttttgcaaagacctaaaccttacagcgatgaaagtttagaaagtttctttatccgagtggctaacaaaaatggctacggtgatgtccatcgcttcctagaagccactaaacgattccttcaagacattgaccataatggctatcaaacctttccgactgatataactcggataaacccatactcagctaaaaacagttccagcgcacgaactgcgtcattcctgaaacttgcacaattgacatttaatgaaccgccagagctacttgggttggcaattaacagaacaaacatgaaatactcgccgtcaactagcgcggttgttagaggtgcagaagtctttcctcgcagtttactacggacgcactccatcccctgctgtcctttgtgtctgcgagaaaatggctacgcctcctacctttggcactttcaggggtacgaatactgccacagccataacgtacctttaattaccacttgtagctgtggtaaggagtttgactaccgagtatctgggttaaagggcatttgctgcaaatgcaaggagcctatcaccttaaccagcagggagaacggtcatgaggcagcgtgtactgtttcaaactggcttgctggccatgaatctaaacctctgccaaatcttcctaaaagctaccgatggggtttagttcattggtggatgggtattaaagatagcgagttcgatcacttttcgttcgttcaatttttctcaaactggccaaggtcattccactcgataatcgaagatgaagtagagttcaaccttgagcatgctgttgtcagcacgtctgaattacgactaaaagatcttcttggtcgattgtttttcggttcaattcggttacctgagcggaatcttcaacacaatatcatccttggtgagcttctctgctatttagaaaatcgtttatggcaagacaagggattaatcgccaacctcaaaatgaacgcgttagaggcgactgtaatgttaaattgtagcctcgatcagattgcatcaatggttgaacaacgcatcttgaagccaaatcgaaaaagcaagcccaacagccctcttgatgttaccgattatctatttcatttcggcgatattttctgtctttggttagctgagttccaaagcgatgagtttaaccgttcgttttatgtgtcgaggtggtaaatgcaaactctgaaagaactaatcgcatccaatcctgacgacttaacaactgaacttaagagagcatttcgtccactcacaccgcatattgcaattgatggtaatgaacttgacgcactgacgatattagtcaatttaaccgataagactgatgatcagaaagacctgctcgatcgagccaaatgcaagcaaaaacttcgagatgaaaaatggtgggctagctgcataaattgcgttaattacagacaaagccataacccaaaattcccggatatacgttctgaaggcgtgattcgaacccaagccctgggtgaattaccgagtttcctactctcgtcctcaaaaatcccaccataccattggtcatatagccatgattcaaaatacgtcaacaaaagcgcattcctcaccaatgagttttgttgggatggtgagatctcatgtttgggtgagcttcttaaagatgcagatcacccactttggaatactttgaaaaagttaggttgttctcaaaaaacttgcaaagcaatggcaaaacaactagctgatattactctcacgactatcaatgtcacactcgcaccaaattacctgactcaaatatctctccccgatagtgatacatcctacatttcactctctcctgttgcatcgctatcgatgcaaagccactttcatcagaggctccaagatgaaaatcggcatagcgcgataacgcggtttagccgaactaccaacatgggggtcactgcgatgacatgtggcggcgcatttagaatgttaaagtctggcgctaagttttccagcccccctcatcaccgattaaacagtaaacgaagttggttgacgtcagagcatgttcagtcattaaaacagtaccagcgcctcaacaaaagcctcatacctgaaaactctcggattgcactccgtagaaaatacaaaatcgagcttcaaaatatggtcagatcttggtttgcaatgcaagaccatacccttgattcgaacatacttatccaacatttgaatcatgacctatcttacttaggagccacaaaacgttttgcatacgatccagcgatgaccaagctctttactgagcttttgaaacgagagttatcaaattcaatcaataatggtgagcaacacactaatggatcgtttttagtcctaccgaatatcagggtttgtggcgcaacagctttaagctccccggtaacggtggggattccatcacttacagctttctttggcttcgttcacgcatttgaacggaatataaatcgcaccacctcatcgtttcgtgttgaatcctttgcgatatgcgtccatcaactacatgtcgagaagcgaggtttgacagcagagtttgtggaaaaaggcgacgggactatatccgctcccgcgacccgggatgactggcagtgtgatgtcgtatttagccttattttgaacaccaactttgctcaacatattgaccaagatacgttagttacatcactaccaaagcgattggctcggggttcagcaaaaattgcgattgatgactttaaacatatcaactcattctcgacattagaaacagcgatcgaatctctgccaatagaagctggtaggtggttatcactttacgcacagtcaaacaataatctaagtgatctattagcagccatgacagaggaccatcagctcatggcaagctgcgtcggttaccacttgttagaagagcccaaagataaaccaaactccctcagaggttacaaacacgctatcgccgagtgcatcattggactcattaactcaatcacctttagctcagagactgatcccaacacaatcttttggtcgctaaagaactatcaaaactacctagtggtacagccaaggagtatcaacgatgaaactaccgacaaatctagcctatgagcgctctatcgacccatcagatgtctgtttttttgtcgtctggcccgatgatagaaaaacacctttaacctacaattctcgtactctgctcgggcaaatggaagcggcatcattagcctatgatgtctcaggtcaaccaataaaaagtgccaccgctgaggcgttagctcaagggaaccctcatcaagttgatttctgccacgttccatacggtgcgagtcatattgaatgcagtttctccgtctcgttttcttctgaactacgtcaaccatataagtgtaactcaagcaaagttaaacaaacgctagtgcaattagtcgagctctacgaaacgaaaatcggctggactgagctagcaacccgatatttgatgaacatttgcaacggtaaatggctgtggaaaaatacccgtaaagcctattgctggaacattgtacttacaccttggccttggaacggggaaaaggttggatttgaagatattcgtactaactacacctcacggcaagactttaaaaataataaaaattggtctgctatagttgaaatgatcaaaaccgcattttctagtactgatgggctggcgatatttgaagtcagggccaccttgcacttgccaacgaatgctatggtgcggccaagccaagttttcacagaaaaagaaagtggcagtaaaagtaaatctaaaactcaaaacagtcgagtttttcagagtacaactattgatggtgaacgatcgccaatactaggggcctttaaaacgggagcagctattgcaaccattgacgactggtatcctgaagccactgagccactaagggtcggacggtttggggttcatcgcgaagatgtcacttgctaccgtcatccgtctaccggaaaagattttttctcgatattacaacaagcagagcactatattgaagtgttgagcgccaacaaaactcccgctcaagaaactatcaacgacatgcactttttaatggctaacctgattaagggtgggatgttccagcataaaggagactgactgtgaaatggtattataagacaatcacctttctgccagagttgtgcaacaacgagtcactggctgcaaagtgtctccgcgttctgcatggatttaactatcagtatgagacacgaaatatcggcgtttcatttccgctttggtgtgatgcaacggttggaaaaaagatttcatttgtcagcaagaacaagatagaactcgacttactacttaaacaacactatttcgtccaaatggaacaacttcaatactttcatatatccaacactgttctcgtcccagaagattgtacatacgtttcctttagacgctgtcaatctatagataagctcacagcagcagggctggcaaggaaaatcagacgcctggagaaacgtgctctatctagaggcgagcaatttgacccatcatcttttgctcaaaaagagcatactgcaatagcgcactaccactcacttggggagtccagcaaacagacgaaccgcaactttcgactcaatatcaggatgctctcggagcaaccccgtgaggggaactcgatttttagtagctatggcttatcaaattcagaaaactcgtttcagcctgtacccttaatctgacctaggctgctgccaccgctgagcaataactagcataaccccttggggcctctaaacgggtcttgaggggttttttgctgaaacctcaggcatttgagaagcacacggtcacactgcttccggtagtcaataaaccggtaaaccagcaatagacataagcggctatttaacgaccctgccctgaaccgacgaccgggtcatcgtggccggatcttgcggcccctcggcttgaacgaattgttagacattatttgccgactaccttggtgatctcgcctttcacgtagtggacaaattcttccaactgatctgcgcgcgaggccaagcgatcttcttcttgtccaagataagcctgtctagcttcaagtatgacgggctgatactgggccggcaggcgctccattgcccagtcggcagcgacatccttcggcgcgattttgccggttactgcgctgtaccaaatgcgggacaacgtaagcactacatttcgctcatcgccagcccagtcgggcggcgagttccatagcgttaaggtttcatttagcgcctcaaatagatcctgttcaggaaccggatcaaagagttcctccgccgctggacctaccaaggcaacgctatgttctcttgcttttgtcagcaagatagccagatcaatgtcgatcgtggctggctcgaagatacctgcaagaatgtcattgcgctgccattctccaaattgcagttcgcgcttagctggataacgccacggaatgatgtcgtcgtgcacaacaatggtgacttctacagcgcggagaatctcgctctctccaggggaagccgaagtttccaaaaggtcgttgatcaaagctcgccgcgttgtttcatcaagccttacggtcaccgtaaccagcaaatcaatatcactgtgtggcttcaggccgccatccactgcggagccgtacaaatgtacggccagcaacgtcggttcgagatggcgctcgatgacgccaactacctctgatagttgagtcgatacttcggcgatcaccgcttccctcatactcttcctttttcaatattattgaagcatttatcagggttattgtctcatgagcggatacatatttgaatgtatttagaaaaataaacaaatagctagctcactcggtcgctacgctccgggcgtgagactgcggcgggcgctgcggacacatacaaagttacccacagattccgtggataagcaggggactaacatgtgaggcaaaacagcagggccgcgccggtggcgtttttccataggctccgccctcctgccagagttcacataaacagacgcttttccggtgcatctgtgggagccgtgaggctcaaccatgaatctgacagtacgggcgaaacccgacaggacttaaagatccccaccgtttccggcgggtcgctccctcttgcgctctcctgttccgaccctgccgtttaccggatacctgttccgcctttctcccttacgggaagtgtggcgctttctcatagctcacacactggtatctcggctcggtgtaggtcgttcgctccaagctgggctgtaagcaagaactccccgttcagcccgactgctgcgccttatccggtaactgttcacttgagtccaacccggaaaagcacggtaaaacgccactggcagcagccattggtaactgggagttcgcagaggatttgtttagctaaacacgcggttgctcttgaagtgtgcgccaaagtccggctacactggaaggacagatttggttgctgtgctctgcgaaagccagttaccacggttaagcagttccccaactgacttaaccttcgatcaaaccacctccccaggtggttttttcgtttacagggcaaaagattacgcgcagaaaaaaaggatctcaagaagatcctttgatcttttctactgaaccgctctagatttcagtgcaatttatctcttcaaatgtagcacctgaagtcagccccatacgatataagttgtaattctcatgttagtcatgccccgcgcccaccggaaggagctgactgggttgaaggctctcaagggcatcggtcgagatcccggtgcctaatgagtgagctaacttacattaattgcgttgcgctcactgcccgctttccagtcgggaaacctgtcgtgccagctgcattaatgaatcggccaacgcgcggggagaggcggtttgcgtattgggcgccagggtggtttttcttttcaccagtgagacgggcaacagctgattgcccttcaccgcctggccctgagagagttgcagcaagcggtccacgctggtttgccccagcaggcgaaaatcctgtttgatggtggttaacggcgggatataacatgagctgtcttcggtatcgtcgtatcccactaccgagatgtccgcaccaacgcgcagcccggactcggtaatggcgcgcattgcgcccagcgccatctgatcgttggcaaccagcatcgcagtgggaacgatgccctcattcagcatttgcatggtttgttgaaaaccggacatggcactccagtcgccttcccgttccgctatcggctgaatttgattgcgagtgagatatttatgccagccagccagacgcagacgcgccgagacagaacttaatgggcccgctaacagcgcgatttgctggtgacccaatgcgaccagatgctccacgcccagtcgcgtaccgtcttcatgggagaaaataatactgttgatgggtgtctggtcagagacatcaagaaataacgccggaacattagtgcaggcagcttccacagcaatggcatcctggtcatccagcggatagttaatgatcagcccactgacgcgttgcgcgagaagattgtgcaccgccgctttacaggcttcgacgccgcttcgttctaccatcgacaccaccacgctggcacccagttgatcggcgcgagatttaatcgccgcgacaatttgcgacggcgcgtgcagggccagactggaggtggcaacgccaatcagcaacgactgtttgcccgccagttgttgtgccacgcggttgggaatgtaattcagctccgccatcgccgcttccactttttcccgcgttttcgcagaaacgtggctggcctggttcaccacgcgggaaacggtctgataagagacaccggcatactctgcgacatcgtataacgttactggtttcac

SEQ ID NO: 92 - DNA, 8445 bp, Synthetic construct
  source 1..8445: mol_type = other DNA
attcaccaccctgaattgactctcttccgggcgctatcatgccataccgcgaaaggttttgcgccattcgatggtgtccgggatctcgacgctctcccttatgcgactcctgcattaggaaattaatacgactcactataggggaattgtgagcggataacaattcccctgtagaaataattttgtttaactttaataaggagatataccatgggtgaactgccgagtaggtagctgataaccggctgaaatcatcattaaagcgagtggcaacgtgaactgccgagtaggtagctgataacggatccgaattcgagctcggcgcgcctgcaggtcgacaagcttgcggccgcataatgcttaagtcgaacagaaagtaatcgtattgtacacggccgcataatcgaaattaatacgactcactataggggaattgtgagcggataacaattccccatcttagtatattagttaagtataagaaggagatatacatatgtttttgcaaagacctaaaccttacagcgatgaaagtttagaaagtttctttatccgagtggctaacaaaaatggctacggtgatgtccatcgcttcctagaagccactaaacgattccttcaagacattgaccataatggctatcaaacctttccgactgatataactcggataaacccatactcagctaaaaacagttccagcgcacgaactgcgtcattcctgaaacttgcacaattgacatttaatgaaccgccagagctacttgggttggcaattaacagaacaaacatgaaatactcgccgtcaactagcgcggttgttagaggtgcagaagtctttcctcgcagtttactacggacgcactccatcccctgctgtcctttgtgtctgcgagaaaatggctacgcctcctacctttggcactttcaggggtacgaatactgccacagccataacgtacctttaattaccacttgtagctgtggtaaggagtttgactaccgagtatctgggttaaagggcatttgctgcaaatgcaaggagcctatcaccttaaccagcagggagaacggtcatgaggcagcgtgtactgtttcaaactggcttgctggccatgaatctaaacctctgccaaatcttcctaaaagctaccgatggggtttagttcattggtggatgggtattaaagatagcgagttcgatcacttttcgttcgttcaatttttctcaaactggccaaggtcattccactcgataatcgaagatgaagtagagttcaaccttgagcatgctgttgtcagcacgtctgaattacgactaaaagatcttcttggtcgattgtttttcggttcaattcggttacctgagcggaatcttcaacacaatatcatccttggtgagcttctctgctatttagaaaatcgtttatggcaagacaagggattaatcgccaacctcaaaatgaacgcgttagaggcgactgtaatgttaaattgtagcctcgatcagattgcatcaatggttgaacaacgcatcttgaagccaaatcgaaaaagcaagcccaacagccctcttgatgttaccgattatctatttcatttcggcgatattttctgtctttggttagctgagttccaaagcgatgagtttaaccgttcgttttatgtgtcgaggtggtaaatgcaaactctgaaagaactaatcgcatccaatcctgacgacttaacaactgaacttaagagagcatttcgtccactcacaccgcatattgcaattgatggtaatgaacttgacgcactgacgatattagtcaatttaaccgataagactgatgatcagaaagacctgctcgatcgagccaaatgcaagcaaaaacttcgagatgaaaaatggtgggctagctgcataaattgcgttaattacagacaaagccataacccaaaattcccggatatacgttctgaaggcgtgattcgaacccaagccctgggtgaattaccgagtttcctactctcgtcctcaaaaatcccaccataccattggtcatatagccatgattcaaaatacgtcaacaaaagcgcattcctcaccaatgagttttgttgggatggtgagatctcatgtttgggtgagcttcttaaagatgcagatcacccactttggaatactttgaaaaagttaggttgttctcaaaaaacttgcaaagcaatggcaaaacaactagctgatattactctcacgactatcaatgtcacactcgcaccaaattacctgactcaaatatctctccccgatagtgatacatcctacatttcactctctcctgttgcatcgctatcgatgcaaagccactttcatcagaggctccaagatgaaaatcggcatagcgcgataacgcggtttagccgaactaccaacatgggggtcactgcgatgacatgtggcggcgcatttagaatgttaaagtctggcgctaagttttccagcccccctcatcaccgattaaacagtaaacgaagttggttgacgtcagagcatgttcagtcattaaaacagtaccagcgcctcaacaaaagcctcatacctgaaaactctcggattgcactccgtagaaaatacaaaatcgagcttcaaaatatggtcagatcttggtttgcaatgcaagaccatacccttgattcgaacatacttatccaacatttgaatcatgacctatcttacttaggagccacaaaacgttttgcatacgatccagcgatgaccaagctctttactgagcttttgaaacgagagttatcaaattcaatcaataatggtgagcaacacactaatggatcgtttttagtcctaccgaatatcagggtttgtggcgcaacagctttaagctccccggtaacggtggggattccatcacttacagctttctttggcttcgttcacgcatttgaacggaatataaatcgcaccacctcatcgtttcgtgttgaatcctttgcgatatgcgtccatcaactacatgtcgagaagcgaggtttgacagcagagtttgtggaaaaaggcgacgggactatatccgctcccgcgacccgggatgactggcagtgtgatgtcgtatttagccttattttgaacaccaactttgctcaacatattgaccaagatacgttagttacatcactaccaaagcgattggctcggggttcagcaaaaattgcgattgatgactttaaacatatcaactcattctcgacattagaaacagcgatcgaatctctgccaatagaagctggtaggtggttatcactttacgcacagtcaaacaataatctaagtgatctattagcagccatgacagaggaccatcagctcatggcaagctgcgtcggttaccacttgttagaagagcccaaagataaaccaaactccctcagaggttacaaacacgctatcgccgagtgcatcattggactcattaactcaatcacctttagctcagagactgatcccaacacaatcttttggtcgctaaagaactatcaaaactacctagtggtacagccaaggagtatcaacgatgaaactaccgacaaatctagcctatgagcgctctatcgacccatcagatgtctgtttttttgtcgtctggcccgatgatagaaaaacacctttaacctacaattctcgtactctgctcgggcaaatggaagcggcatcattagcctatgatgtctcaggtcaaccaataaaaagtgccaccgctgaggcgttagctcaagggaaccctcatcaagttgatttctgccacgttccatacggtgcgagtcatattgaatgcagtttctccgtctcgttttcttctgaactacgtcaaccatataagtgtaactcaagcaaagttaaacaaacgctagtgcaattagtcgagctctacgaaacgaaaatcggctggactgagctagcaacccgatatttgatgaacatttgcaacggtaaatggctgtggaaaaatacccgtaaagcctattgctggaacattgtacttacaccttggccttggaacggggaaaaggttggatttgaagatattcgtactaactacacctcacggcaagactttaaaaataataaaaattggtctgctatagttgaaatgatcaaaaccgcattttctagtactgatgggctggcgatatttgaagtcagggccaccttgcacttgccaacgaatgctatggtgcggccaagccaagttttcacagaaaaagaaagtggcagtaaaagtaaatctaaaactcaaaacagtcgagtttttcagagtacaactattgatggtgaacgatcgccaatactaggggcctttaaaacgggagcagctattgcaaccattgacgactggtatcctgaagccactgagccactaagggtcggacggtttggggttcatcgcgaagatgtcacttgctaccgtcatccgtctaccggaaaagattttttctcgatattacaacaagcagagcactatattgaagtgttgagcgccaacaaaactcccgctcaagaaactatcaacgacatgcactttttaatggctaacctgattaagggtgggatgttccagcataaaggagactgactgtgaaatggtattataagacaatcacctttctgccagagttgtgcaacaacgagtcactggctgcaaagtgtctccgcgttctgcatggatttaactatcagtatgagacacgaaatatcggcgtttcatttccgctttggtgtgatgcaacggttggaaaaaagatttcatttgtcagcaagaacaagatagaactcgacttactacttaaacaacactatttcgtccaaatggaacaacttcaatactttcatatatccaacactgttctcgtcccagaagattgtacatacgtttcctttagacgctgtcaatctatagataagctcacagcagcagggctggcaaggaaaatcagacgcctggagaaacgtgctctatctagaggcgagcaatttgacccatcatcttttgctcaaaaagagcatactgcaatagcgcactaccactcacttggggagtccagcaaacagacgaaccgcaactttcgactcaatatcaggatgctctcggagcaaccccgtgaggggaactcgatttttagtagctatggcttatcaaattcagaaaactcgtttcagcctgtacccttaatctgacctaggctgctgccaccgctgagcaataactagcataaccccttggggcctctaaacgggtcttgaggggttttttgctgaaacctcaggcatttgagaagcacacggtcacactgcttccggtagtcaataaaccggtaaaccagcaatagacataagcggctatttaacgaccctgccctgaaccgacgaccgggtcatcgtggccggatcttgcggcccctcggcttgaacgaattgttagacattatttgccgactaccttggtgatctcgcctttcacgtagtggacaaattcttccaactgatctgcgcgcgaggccaagcgatcttcttcttgtccaagataagcctgtctagcttcaagtatgacgggctgatactgggccggcaggcgctccattgcccagtcggcagcgacatccttcggcgcgattttgccggttactgcgctgtaccaaatgcgggacaacgtaagcactacatttcgctcatcgccagcccagtcgggcggcgagttccatagcgttaaggtttcatttagcgcctcaaatagatcctgttcaggaaccggatcaaagagttcctccgccgctggacctaccaaggcaacgctatgttctcttgcttttgtcagcaagatagccagatcaatgtcgatcgtggctggctcgaagatacctgcaagaatgtcattgcgctgccattctccaaattgcagttcgcgcttagctggataacgccacggaatgatgtcgtcgtgcacaacaatggtgacttctacagcgcggagaatctcgctctctccaggggaagccgaagtttccaaaaggtcgttgatcaaagctcgccgcgttgtttcatcaagccttacggtcaccgtaaccagcaaatcaatatcactgtgtggcttcaggccgccatccactgcggagccgtacaaatgtacggccagcaacgtcggttcgagatggcgctcgatgacgccaactacctctgatagttgagtcgatacttcggcgatcaccgcttccctcatactcttcctttttcaatattattgaagcatttatcagggttattgtctcatgagcggatacatatttgaatgtatttagaaaaataaacaaatagctagctcactcggtcgctacgctccgggcgtgagactgcggcgggcgctgcggacacatacaaagttacccacagattccgtggataagcaggggactaacatgtgaggcaaaacagcagggccgcgccggtggcgtttttccataggctccgccctcctgccagagttcacataaacagacgcttttccggtgcatctgtgggagccgtgaggctcaaccatgaatctgacagtacgggcgaaacccgacaggacttaaagatccccaccgtttccggcgggtcgctccctcttgcgctctcctgttccgaccctgccgtttaccggatacctgttccgcctttctcccttacgggaagtgtggcgctttctcatagctcacacactggtatctcggctcggtgtaggtcgttcgctccaagctgggctgtaagcaagaactccccgttcagcccgactgctgcgccttatccggtaactgttcacttgagtccaacccggaaaagcacggtaaaacgccactggcagcagccattggtaactgggagttcgcagaggatttgtttagctaaacacgcggttgctcttgaagtgtgcgccaaagtccggctacactggaaggacagatttggttgctgtgctctgcgaaagccagttaccacggttaagcagttccccaactgacttaaccttcgatcaaaccacctccccaggtggttttttcgtttacagggcaaaagattacgcgcagaaaaaaaggatctcaagaagatcctttgatcttttctactgaaccgctctagatttcagtgcaatttatctcttcaaatgtagcacctgaagtcagccccatacgatataagttgtaattctcatgttagtcatgccccgcgcccaccggaaggagctgactgggttgaaggctctcaagggcatcggtcgagatcccggtgcctaatgagtgagctaacttacattaattgcgttgcgctcactgcccgctttccagtcgggaaacctgtcgtgccagctgcattaatgaatcggccaacgcgcggggagaggcggtttgcgtattgggcgccagggtggtttttcttttcaccagtgagacgggcaacagctgattgcccttcaccgcctggccctgagagagttgcagcaagcggtccacgctggtttgccccagcaggcgaaaatcctgtttgatggtggttaacggcgggatataacatgagctgtcttcggtatcgtcgtatcccactaccgagatgtccgcaccaacgcgcagcccggactcggtaatggcgcgcattgcgcccagcgccatctgatcgttggcaaccagcatcgcagtgggaacgatgccctcattcagcatttgcatggtttgttgaaaaccggacatggcactccagtcgccttcccgttccgctatcggctgaatttgattgcgagtgagatatttatgccagccagccagacgcagacgcgccgagacagaacttaatgggcccgctaacagcgcgatttgctggtgacccaatgcgaccagatgctccacgcccagtcgcgtaccgtcttcatgggagaaaataatactgttgatgggtgtctggtcagagacatcaagaaataacgccggaacattagtgcaggcagcttccacagcaatggcatcctggtcatccagcggatagttaatgatcagcccactgacgcgttgcgcgagaagattgtgcaccgccgctttacaggcttcgacgccgcttcgttctaccatcgacaccaccacgctggcacccagttgatcggcgcgagatttaatcgccgcgacaatttgcgacggcgcgtgcagggccagactggaggtggcaacgccaatcagcaacgactgtttgcccgccagttgttgtgccacgcggttgggaatgtaattcagctccgccatcgccgcttccactttttcccgcgttttcgcagaaacgtggctggcctggttcaccacgcgggaaacggtctgataagagacaccggcatactctgcgacatcgtataacgttactggtttcac

SEQ ID NO: 93 - DNA, 8445 bp, Synthetic construct
  source 1..8445: mol_type = other DNA
attcaccaccctgaattgactctcttccgggcgctatcatgccataccgcgaaaggttttgcgccattcgatggtgtccgggatctcgacgctctcccttatgcgactcctgcattaggaaattaatacgactcactataggggaattgtgagcggataacaattcccctgtagaaataattttgtttaactttaataaggagatataccatgggtgaactgccgagtaggtagctgataacggctgaaatcatcattaaagcgagtggcaacagtgaactgccgagtaggtagctgataacggatccgaattcgagctcggcgcgcctgcaggtcgacaagcttgcggccgcataatgcttaagtcgaacagaaagtaatcgtattgtacacggccgcataatcgaaattaatacgactcactataggggaattgtgagcggataacaattccccatcttagtatattagttaagtataagaaggagatatacatatgtttttgcaaagacctaaaccttacagcgatgaaagtttagaaagtttctttatccgagtggctaacaaaaatggctacggtgatgtccatcgcttcctagaagccactaaacgattccttcaagacattgaccataatggctatcaaacctttccgactgatataactcggataaacccatactcagctaaaaacagttccagcgcacgaactgcgtcattcctgaaacttgcacaattgacatttaatgaaccgccagagctacttgggttggcaattaacagaacaaacatgaaatactcgccgtcaactagcgcggttgttagaggtgcagaagtctttcctcgcagtttactacggacgcactccatcccctgctgtcctttgtgtctgcgagaaaatggctacgcctcctacctttggcactttcaggggtacgaatactgccacagccataacgtacctttaattaccacttgtagctgtggtaaggagtttgactaccgagtatctgggttaaagggcatttgctgcaaatgcaaggagcctatcaccttaaccagcagggagaacggtcatgaggcagcgtgtactgtttcaaactggcttgctggccatgaatctaaacctctgccaaatcttcctaaaagctaccgatggggtttagttcattggtggatgggtattaaagatagcgagttcgatcacttttcgttcgttcaatttttctcaaactggccaaggtcattccactcgataatcgaagatgaagtagagttcaaccttgagcatgctgttgtcagcacgtctgaattacgactaaaagatcttcttggtcgattgtttttcggttcaattcggttacctgagcggaatcttcaacacaatatcatccttggtgagcttctctgctatttagaaaatcgtttatggcaagacaagggattaatcgccaacctcaaaatgaacgcgttagaggcgactgtaatgttaaattgtagcctcgatcagattgcatcaatggttgaacaacgcatcttgaagccaaatcgaaaaagcaagcccaacagccctcttgatgttaccgattatctatttcatttcggcgatattttctgtctttggttagctgagttccaaagcgatgagtttaaccgttcgttttatgtgtcgaggtggtaaatgcaaactctgaaagaactaatcgcatccaatcctgacgacttaacaactgaacttaagagagcatttcgtccactcacaccgcatattgcaattgatggtaatgaacttgacgcactgacgatattagtcaatttaaccgataagactgatgatcagaaagacctgctcgatcgagccaaatgcaagcaaaaacttcgagatgaaaaatggtgggctagctgcataaattgcgttaattacagacaaagccataacccaaaattcccggatatacgttctgaaggcgtgattcgaacccaagccctgggtgaattaccgagtttcctactctcgtcctcaaaaatcccaccataccattggtcatatagccatgattcaaaatacgtcaacaaaagcgcattcctcaccaatgagttttgttgggatggtgagatctcatgtttgggtgagcttcttaaagatgcagatcacccactttggaatactttgaaaaagttaggttgttctcaaaaaacttgcaaagcaatggcaaaacaactagctgatattactctcacgactatcaatgtcacactcgcaccaaattacctgactcaaatatctctccccgatagtgatacatcctacatttcactctctcctgttgcatcgctatcgatgcaaagccactttcatcagaggctccaagatgaaaatcggcatagcgcgataacgcggtttagccgaactaccaacatgggggtcactgcgatgacatgtggcggcgcatttagaatgttaaagtctggcgctaagttttccagcccccctcatcaccgattaaacagtaaacgaagttggttgacgtcagagcatgttcagtcattaaaacagtaccagcgcctcaacaaaagcctcatacctgaaaactctcggattgcactccgtagaaaatacaaaatcgagcttcaaaatatggtcagatcttggtttgcaatgcaagaccatacccttgattcgaacatacttatccaacatttgaatcatgacctatcttacttaggagccacaaaacgttttgcatacgatccagcgatgaccaagctctttactgagcttttgaaacgagagttatcaaattcaatcaataatggtgagcaacacactaatggatcgtttttagtcctaccgaatatcagggtttgtggcgcaacagctttaagctccccggtaacggtggggattccatcacttacagctttctttggcttcgttcacgcatttgaacggaatataaatcgcaccacctcatcgtttcgtgttgaatcctttgcgatatgcgtccatcaactacatgtcgagaagcgaggtttgacagcagagtttgtggaaaaaggcgacgggactatatccgctcccgcgacccgggatgactggcagtgtgatgtcgtatttagccttattttgaacaccaactttgctcaacatattgaccaagatacgttagttacatcactaccaaagcgattggctcggggttcagcaaaaattgcgattgatgactttaaacatatcaactcattctcgacattagaaacagcgatcgaatctctgccaatagaagctggtaggtggttatcactttacgcacagtcaaacaataatctaagtgatctattagcagccatgacagaggaccatcagctcatggcaagctgcgtcggttaccacttgttagaagagcccaaagataaaccaaactccctcagaggttacaaacacgctatcgccgagtgcatcattggactcattaactcaatcacctttagctcagagactgatcccaacacaatcttttggtcgctaaagaactatcaaaactacctagtggtacagccaaggagtatcaacgatgaaactaccgacaaatctagcctatgagcgctctatcgacccatcagatgtctgtttttttgtcgtctggcccgatgatagaaaaacacctttaacctacaattctcgtactctgctcgggcaaatggaagcggcatcattagcctatgatgtctcaggtcaaccaataaaaagtgccaccgctgaggcgttagctcaagggaaccctcatcaagttgatttctgccacgttccatacggtgcgagtcatattgaatgcagtttctccgtctcgttttcttctgaactacgtcaaccatataagtgtaactcaagcaaagttaaacaaacgctagtgcaattagtcgagctctacgaaacgaaaatcggctggactgagctagcaacccgatatttgatgaacatttgcaacggtaaatggctgtggaaaaatacccgtaaagcctattgctggaacattgtacttacaccttggccttggaacggggaaaaggttggatttgaagatattcgtactaactacacctcacggcaagactttaaaaataataaaaattggtctgctatagttgaaatgatcaaaaccgcattttctagtactgatgggctggcgatatttgaagtcagggccaccttgcacttgccaacgaatgctatggtgcggccaagccaagttttcacagaaaaagaaagtggcagtaaaagtaaatctaaaactcaaaacagtcgagtttttcagagtacaactattgatggtgaacgatcgccaatactaggggcctttaaaacgggagcagctattgcaaccattgacgactggtatcctgaagccactgagccactaagggtcggacggtttggggttcatcgcgaagatgtcacttgctaccgtcatccgtctaccggaaaagattttttctcgatattacaacaagcagagcactatattgaagtgttgagcgccaacaaaactcccgctcaagaaactatcaacgacatgcactttttaatggctaacctgattaagggtgggatgttccagcataaaggagactgactgtgaaatggtattataagacaatcacctttctgccagagttgtgcaacaacgagtcactggctgcaaagtgtctccgcgttctgcatggatttaactatcagtatgagacacgaaatatcggcgtttcatttccgctttggtgtgatgcaacggttggaaaaaagatttcatttgtcagcaagaacaagatagaactcgacttactacttaaacaacactatttcgtccaaatggaacaacttcaatactttcatatatccaacactgttctcgtcccagaagattgtacatacgtttcctttagacgctgtcaatctatagataagctcacagcagcagggctggcaaggaaaatcagacgcctggagaaacgtgctctatctagaggcgagcaatttgacccatcatcttttgctcaaaaagagcatactgcaatagcgcactaccactcacttggggagtccagcaaacagacgaaccgcaactttcgactcaatatcaggatgctctcggagcaaccccgtgaggggaactcgatttttagtagctatggcttatcaaattcagaaaactcgtttcagcctgtacccttaatctgacctaggctgctgccaccgctgagcaataactagcataaccccttggggcctctaaacgggtcttgaggggttttttgctgaaacctcaggcatttgagaagcacacggtcacactgcttccggtagtcaataaaccggtaaaccagcaatagacataagcggctatttaacgaccctgccctgaaccgacgaccgggtcatcgtggccggatcttgcggcccctcggcttgaacgaattgttagacattatttgccgactaccttggtgatctcgcctttcacgtagtggacaaattcttccaactgatctgcgcgcgaggccaagcgatcttcttcttgtccaagataagcctgtctagcttcaagtatgacgggctgatactgggccggcaggcgctccattgcccagtcggcagcgacatccttcggcgcgattttgccggttactgcgctgtaccaaatgcgggacaacgtaagcactacatttcgctcatcgccagcccagtcgggcggcgagttccatagcgttaaggtttcatttagcgcctcaaatagatcctgttcaggaaccggatcaaagagttcctccgccgctggacctaccaaggcaacgctatgttctcttgcttttgtcagcaagatagccagatcaatgtcgatcgtggctggctcgaagatacctgcaagaatgtcattgcgctgccattctccaaattgcagttcgcgcttagctggataacgccacggaatgatgtcgtcgtgcacaacaatggtgacttctacagcgcggagaatctcgctctctccaggggaagccgaagtttccaaaaggtcgttgatcaaagctcgccgcgttgtttcatcaagccttacggtcaccgtaaccagcaaatcaatatcactgtgtggcttcaggccgccatccactgcggagccgtacaaatgtacggccagcaacgtcggttcgagatggcgctcgatgacgccaactacctctgatagttgagtcgatacttcggcgatcaccgcttccctcatactcttcctttttcaatattattgaagcatttatcagggttattgtctcatgagcggatacatatttgaatgtatttagaaaaataaacaaatagctagctcactcggtcgctacgctccgggcgtgagactgcggcgggcgctgcggacacatacaaagttacccacagattccgtggataagcaggggactaacatgtgaggcaaaacagcagggccgcgccggtggcgtttttccataggctccgccctcctgccagagttcacataaacagacgcttttccggtgcatctgtgggagccgtgaggctcaaccatgaatctgacagtacgggcgaaacccgacaggacttaaagatccccaccgtttccggcgggtcgctccctcttgcgctctcctgttccgaccctgccgtttaccggatacctgttccgcctttctcccttacgggaagtgtggcgctttctcatagctcacacactggtatctcggctcggtgtaggtcgttcgctccaagctgggctgtaagcaagaactccccgttcagcccgactgctgcgccttatccggtaactgttcacttgagtccaacccggaaaagcacggtaaaacgccactggcagcagccattggtaactgggagttcgcagaggatttgtttagctaaacacgcggttgctcttgaagtgtgcgccaaagtccggctacactggaaggacagatttggttgctgtgctctgcgaaagccagttaccacggttaagcagttccccaactgacttaaccttcgatcaaaccacctccccaggtggttttttcgtttacagggcaaaagattacgcgcagaaaaaaaggatctcaagaagatcctttgatcttttctactgaaccgctctagatttcagtgcaatttatctcttcaaatgtagcacctgaagtcagccccatacgatataagttgtaattctcatgttagtcatgccccgcgcccaccggaaggagctgactgggttgaaggctctcaagggcatcggtcgagatcccggtgcctaatgagtgagctaacttacattaattgcgttgcgctcactgcccgctttccagtcgggaaacctgtcgtgccagctgcattaatgaatcggccaacgcgcggggagaggcggtttgcgtattgggcgccagggtggtttttcttttcaccagtgagacgggcaacagctgattgcccttcaccgcctggccctgagagagttgcagcaagcggtccacgctggtttgccccagcaggcgaaaatcctgtttgatggtggttaacggcgggatataacatgagctgtcttcggtatcgtcgtatcccactaccgagatgtccgcaccaacgcgcagcccggactcggtaatggcgcgcattgcgcccagcgccatctgatcgttggcaaccagcatcgcagtgggaacgatgccctcattcagcatttgcatggtttgttgaaaaccggacatggcactccagtcgccttcccgttccgctatcggctgaatttgattgcgagtgagatatttatgccagccagccagacgcagacgcgccgagacagaacttaatgggcccgctaacagcgcgatttgctggtgacccaatgcgaccagatgctccacgcccagtcgcgtaccgtcttcatgggagaaaataatactgttgatgggtgtctggtcagagacatcaagaaataacgccggaacattagtgcaggcagcttccacagcaatggcatcctggtcatccagcggatagttaatgatcagcccactgacgcgttgcgcgagaagattgtgcaccgccgctttacaggcttcgacgccgcttcgttctaccatcgacaccaccacgctggcacccagttgatcggcgcgagatttaatcgccgcgacaatttgcgacggcgcgtgcagggccagactggaggtggcaacgccaatcagcaacgactgtttgcccgccagttgttgtgccacgcggttgggaatgtaattcagctccgccatcgccgcttccactttttcccgcgttttcgcagaaacgtggctggcctggttcaccacgcgggaaacggtctgataagagacaccggcatactctgcgacatcgtataacgttactggtttcac

SEQ ID NO: 94 - DNA, 8445 bp, Synthetic construct
  source 1..8445: mol_type = other DNA
attcaccaccctgaattgactctcttccgggcgctatcatgccataccgcgaaaggttttgcgccattcgatggtgtccgggatctcgacgctctcccttatgcgactcctgcattaggaaattaatacgactcactataggggaattgtgagcggataacaattcccctgtagaaataattttgtttaactttaataaggagatataccatgggtgaactgccgagtaggtagctgataacgctgaaatcatcattaaagcgagtggcaacatgtgaactgccgagtaggtagctgataacggatccgaattcgagctcggcgcgcctgcaggtcgacaagcttgcggccgcataatgcttaagtcgaacagaaagtaatcgtattgtacacggccgcataatcgaaattaatacgactcactataggggaattgtgagcggataacaattccccatcttagtatattagttaagtataagaaggagatatacatatgtttttgcaaagacctaaaccttacagcgatgaaagtttagaaagtttctttatccgagtggctaacaaaaatggctacggtgatgtccatcgcttcctagaagccactaaacgattccttcaagacattgaccataatggctatcaaacctttccgactgatataactcggataaacccatactcagctaaaaacagttccagcgcacgaactgcgtcattcctgaaacttgcacaattgacatttaatgaaccgccagagctacttgggttggcaattaacagaacaaacatgaaatactcgccgtcaactagcgcggttgttagaggtgcagaagtctttcctcgcagtttactacggacgcactccatcccctgctgtcctttgtgtctgcgagaaaatggctacgcctcctacctttggcactttcaggggtacgaatactgccacagccataacgtacctttaattaccacttgtagctgtggtaaggagtttgactaccgagtatctgggttaaagggcatttgctgcaaatgcaaggagcctatcaccttaaccagcagggagaacggtcatgaggcagcgtgtactgtttcaaactggcttgctggccatgaatctaaacctctgccaaatcttcctaaaagctaccgatggggtttagttcattggtggatgggtattaaagatagcgagttcgatcacttttcgttcgttcaatttttctcaaactggccaaggtcattccactcgataatcgaagatgaagtagagttcaaccttgagcatgctgttgtcagcacgtctgaattacgactaaaagatcttcttggtcgattgtttttcggttcaattcggttacctgagcggaatcttcaacacaatatcatccttggtgagcttctctgctatttagaaaatcgtttatggcaagacaagggattaatcgccaacctcaaaatgaacgcgttagaggcgactgtaatgttaaattgtagcctcgatcagattgcatcaatggttgaacaacgcatcttgaagccaaatcgaaaaagcaagcccaacagccctcttgatgttaccgattatctatttcatttcggcgatattttctgtctttggttagctgagttccaaagcgatgagtttaaccgttcgttttatgtgtcgaggtggtaaatgcaaactctgaaagaactaatcgcatccaatcctgacgacttaacaactgaacttaagagagcatttcgtccactcacaccgcatattgcaattgatggtaatgaacttgacgcactgacgatattagtcaatttaaccgataagactgatgatcagaaagacctgctcgatcgagccaaatgcaagcaaaaacttcgagatgaaaaatggtgggctagctgcataaattgcgttaattacagacaaagccataacccaaaattcccggatatacgttctgaaggcgtgattcgaacccaagccctgggtgaattaccgagtttcctactctcgtcctcaaaaatcccaccataccattggtcatatagccatgattcaaaatacgtcaacaaaagcgcattcctcaccaatgagttttgttgggatggtgagatctcatgtttgggtgagcttcttaaagatgcagatcacccactttggaatactttgaaaaagttaggttgttctcaaaaaacttgcaaagcaatggcaaaacaactagctgatattactctcacgactatcaatgtcacactcgcaccaaattacctgactcaaatatctctccccgatagtgatacatcctacatttcactctctcctgttgcatcgctatcgatgcaaagccactttcatcagaggctccaagatgaaaatcggcatagcgcgataacgcggtttagccgaactaccaacatgggggtcactgcgatgacatgtggcggcgcatttagaatgttaaagtctggcgctaagttttccagcccccctcatcaccgattaaacagtaaacgaagttggttgacgtcagagcatgttcagtcattaaaacagtaccagcgcctcaacaaaagcctcatacctgaaaactctcggattgcactccgtagaaaatacaaaatcgagcttcaaaatatggtcagatcttggtttgcaatgcaagaccatacccttgattcgaacatacttatccaacatttgaatcatgacctatcttacttaggagccacaaaacgttttgcatacgatccagcgatgaccaagctctttactgagcttttgaaacgagagttatcaaattcaatcaataatggtgagcaacacactaatggatcgtttttagtcctaccgaatatcagggtttgtggcgcaacagctttaagctccccggtaacggtggggattccatcacttacagctttctttggcttcgttcacgcatttgaacggaatataaatcgcaccacctcatcgtttcgtgttgaatcctttgcgatatgcgtccatcaactacatgtcgagaagcgaggtttgacagcagagtttgtggaaaaaggcgacgggactatatccgctcccgcgacccgggatgactggcagtgtgatgtcgtatttagccttattttgaacaccaactttgctcaacatattgaccaagatacgttagttacatcactaccaaagcgattggctcggggttcagcaaaaattgcgattgatgactttaaacatatcaactcattctcgacattagaaacagcgatcgaatctctgccaatagaagctggtaggtggttatcactttacgcacagtcaaacaataatctaagtgatctattagcagccatgacagaggaccatcagctcatggcaagctgcgtcggttaccacttgttagaagagcccaaagataaaccaaactccctcagaggttacaaacacgctatcgccgagtgcatcattggactcattaactcaatcacctttagctcagagactgatcccaacacaatcttttggtcgctaaagaactatcaaaactacctagtggtacagccaaggagtatcaacgatgaaactaccgacaaatctagcctatgagcgctctatcgacccatcagatgtctgtttttttgtcgtctggcccgatgatagaaaaacacctttaacctacaattctcgtactctgctcgggcaaatggaagcggcatcattagcctatgatgtctcaggtcaaccaataaaaagtgccaccgctgaggcgttagctcaagggaaccctcatcaagttgatttctgccacgttccatacggtgcgagtcatattgaatgcagtttctccgtctcgttttcttctgaactacgtcaaccatataagtgtaactcaagcaaagttaaacaaacgctagtgcaattagtcgagctctacgaaacgaaaatcggctggactgagctagcaacccgatatttgatgaacatttgcaacggtaaatggctgtggaaaaatacccgtaaagcctattgctggaacattgtacttacaccttggccttggaacggggaaaaggttggatttgaagatattcgtactaactacacctcacggcaagactttaaaaataataaaaattggtctgctatagttgaaatgatcaaaaccgcattttctagtactgatgggctggcgatatttgaagtcagggccaccttgcacttgccaacgaatgctatggtgcggccaagccaagttttcacagaaaaagaaagtggcagtaaaagtaaatctaaaactcaaaacagtcgagtttttcagagtacaactattgatggtgaacgatcgccaatactaggggcctttaaaacgggagcagctattgcaaccattgacgactggtatcctgaagccactgagccactaagggtcggacggtttggggttcatcgcgaagatgtcacttgctaccgtcatccgtctaccggaaaagattttttctcgatattacaacaagcagagcactatattgaagtgttgagcgccaacaaaactcccgctcaagaaactatcaacgacatgcactttttaatggctaacctgattaagggtgggatgttccagcataaaggagactgactgtgaaatggtattataagacaatcacctttctgccagagttgtgcaacaacgagtcactggctgcaaagtgtctccgcgttctgcatggatttaactatcagtatgagacacgaaatatcggcgtttcatttccgctttggtgtgatgcaacggttggaaaaaagatttcatttgtcagcaagaacaagatagaactcgacttactacttaaacaacactatttcgtccaaatggaacaacttcaatactttcatatatccaacactgttctcgtcccagaagattgtacatacgtttcctttagacgctgtcaatctatagataagctcacagcagcagggctggcaaggaaaatcagacgcctggagaaacgtgctctatctagaggcgagcaatttgacccatcatcttttgctcaaaaagagcatactgcaatagcgcactaccactcacttggggagtccagcaaacagacgaaccgcaactttcgactcaatatcaggatgctctcggagcaaccccgtgaggggaactcgatttttagtagctatggcttatcaaattcagaaaactcgtttcagcctgtacccttaatctgacctaggctgctgccaccgctgagcaataactagcataaccccttggggcctctaaacgggtcttgaggggttttttgctgaaacctcaggcatttgagaagcacacggtcacactgcttccggtagtcaataaaccggtaaaccagcaatagacataagcggctatttaacgaccctgccctgaaccgacgaccgggtcatcgtggccggatcttgcggcccctcggcttgaacgaattgttagacattatttgccgactaccttggtgatctcgcctttcacgtagtggacaaattcttccaactgatctgcgcgcgaggccaagcgatcttcttcttgtccaagataagcctgtctagcttcaagtatgacgggctgatactgggccggcaggcgctccattgcccagtcggcagcgacatccttcggcgcgattttgccggttactgcgctgtaccaaatgcgggacaacgtaagcactacatttcgctcatcgccagcccagtcgggcggcgagttccatagcgttaaggtttcatttagcgcctcaaatagatcctgttcaggaaccggatcaaagagttcctccgccgctggacctaccaaggcaacgctatgttctcttgcttttgtcagcaagatagccagatcaatgtcgatcgtggctggctcgaagatacctgcaagaatgtcattgcgctgccattctccaaattgcagttcgcgcttagctggataacgccacggaatgatgtcgtcgtgcacaacaatggtgacttctacagcgcggagaatctcgctctctccaggggaagccgaagtttccaaaaggtcgttgatcaaagctcgccgcgttgtttcatcaagccttacggtcaccgtaaccagcaaatcaatatcactgtgtggcttcaggccgccatccactgcggagccgtacaaatgtacggccagcaacgtcggttcgagatggcgctcgatgacgccaactacctctgatagttgagtcgatacttcggcgatcaccgcttccctcatactcttcctttttcaatattattgaagcatttatcagggttattgtctcatgagcggatacatatttgaatgtatttagaaaaataaacaaatagctagctcactcggtcgctacgctccgggcgtgagactgcggcgggcgctgcggacacatacaaagttacccacagattccgtggataagcaggggactaacatgtgaggcaaaacagcagggccgcgccggtggcgtttttccataggctccgccctcctgccagagttcacataaacagacgcttttccggtgcatctgtgggagccgtgaggctcaaccatgaatctgacagtacgggcgaaacccgacaggacttaaagatccccaccgtttccggcgggtcgctccctcttgcgctctcctgttccgaccctgccgtttaccggatacctgttccgcctttctcccttacgggaagtgtggcgctttctcatagctcacacactggtatctcggctcggtgtaggtcgttcgctccaagctgggctgtaagcaagaactccccgttcagcccgactgctgcgccttatccggtaactgttcacttgagtccaacccggaaaagcacggtaaaacgccactggcagcagccattggtaactgggagttcgcagaggatttgtttagctaaacacgcggttgctcttgaagtgtgcgccaaagtccggctacactggaaggacagatttggttgctgtgctctgcgaaagccagttaccacggttaagcagttccccaactgacttaaccttcgatcaaaccacctccccaggtggttttttcgtttacagggcaaaagattacgcgcagaaaaaaaggatctcaagaagatcctttgatcttttctactgaaccgctctagatttcagtgcaatttatctcttcaaatgtagcacctgaagtcagccccatacgatataagttgtaattctcatgttagtcatgccccgcgcccaccggaaggagctgactgggttgaaggctctcaagggcatcggtcgagatcccggtgcctaatgagtgagctaacttacattaattgcgttgcgctcactgcccgctttccagtcgggaaacctgtcgtgccagctgcattaatgaatcggccaacgcgcggggagaggcggtttgcgtattgggcgccagggtggtttttcttttcaccagtgagacgggcaacagctgattgcccttcaccgcctggccctgagagagttgcagcaagcggtccacgctggtttgccccagcaggcgaaaatcctgtttgatggtggttaacggcgggatataacatgagctgtcttcggtatcgtcgtatcccactaccgagatgtccgcaccaacgcgcagcccggactcggtaatggcgcgcattgcgcccagcgccatctgatcgttggcaaccagcatcgcagtgggaacgatgccctcattcagcatttgcatggtttgttgaaaaccggacatggcactccagtcgccttcccgttccgctatcggctgaatttgattgcgagtgagatatttatgccagccagccagacgcagacgcgccgagacagaacttaatgggcccgctaacagcgcgatttgctggtgacccaatgcgaccagatgctccacgcccagtcgcgtaccgtcttcatgggagaaaataatactgttgatgggtgtctggtcagagacatcaagaaataacgccggaacattagtgcaggcagcttccacagcaatggcatcctggtcatccagcggatagttaatgatcagcccactgacgcgttgcgcgagaagattgtgcaccgccgctttacaggcttcgacgccgcttcgttctaccatcgacaccaccacgctggcacccagttgatcggcgcgagatttaatcgccgcgacaatttgcgacggcgcgtgcagggccagactggaggtggcaacgccaatcagcaacgactgtttgcccgccagttgttgtgccacgcggttgggaatgtaattcagctccgccatcgccgcttccactttttcccgcgttttcgcagaaacgtggctggcctggttcaccacgcgggaaacggtctgataagagacaccggcatactctgcgacatcgtataacgttactggtttcac

SEQ ID NO: 95 - DNA, 8445 bp, Synthetic construct
  source 1..8445: mol_type = other DNA
attcaccaccctgaattgactctcttccgggcgctatcatgccataccgcgaaaggttttgcgccattcgatggtgtccgggatctcgacgctctcccttatgcgactcctgcattaggaaattaatacgactcactataggggaattgtgagcggataacaattcccctgtagaaataattttgtttaactttaataaggagatataccatgggtgaactgccgagtaggtagctgataacctgaaatcatcattaaagcgagtggcaacatggtgaactgccgagtaggtagctgataacggatccgaattcgagctcggcgcgcctgcaggtcgacaagcttgcggccgcataatgcttaagtcgaacagaaagtaatcgtattgtacacggccgcataatcgaaattaatacgactcactataggggaattgtgagcggataacaattccccatcttagtatattagttaagtataagaaggagatatacatatgtttttgcaaagacctaaaccttacagcgatgaaagtttagaaagtttctttatccgagtggctaacaaaaatggctacggtgatgtccatcgcttcctagaagccactaaacgattccttcaagacattgaccataatggctatcaaacctttccgactgatataactcggataaacccatactcagctaaaaacagttccagcgcacgaactgcgtcattcctgaaacttgcacaattgacatttaatgaaccgccagagctacttgggttggcaattaacagaacaaacatgaaatactcgccgtcaactagcgcggttgttagaggtgcagaagtctttcctcgcagtttactacggacgcactccatcccctgctgtcctttgtgtctgcgagaaaatggctacgcctcctacctttggcactttcaggggtacgaatactgccacagccataacgtacctttaattaccacttgtagctgtggtaaggagtttgactaccgagtatctgggttaaagggcatttgctgcaaatgcaaggagcctatcaccttaaccagcagggagaacggtcatgaggcagcgtgtactgtttcaaactggcttgctggccatgaatctaaacctctgccaaatcttcctaaaagctaccgatggggtttagttcattggtggatgggtattaaagatagcgagttcgatcacttttcgttcgttcaatttttctcaaactggccaaggtcattccactcgataatcgaagatgaagtagagttcaaccttgagcatgctgttgtcagcacgtctgaattacgactaaaagatcttcttggtcgattgtttttcggttcaattcggttacctgagcggaatcttcaacacaatatcatccttggtgagcttctctgctatttagaaaatcgtttatggcaagacaagggattaatcgccaacctcaaaatgaacgcgttagaggcgactgtaatgttaaattgtagcctcgatcagattgcatcaatggttgaacaacgcatcttgaagccaaatcgaaaaagcaagcccaacagccctcttgatgttaccgattatctatttcatttcggcgatattttctgtctttggttagctgagttccaaagcgatgagtttaaccgttcgttttatgtgtcgaggtggtaaatgcaaactctgaaagaactaatcgcatccaatcctgacgacttaacaactgaacttaagagagcatttcgtccactcacaccgcatattgcaattgatggtaatgaacttgacgcactgacgatattagtcaatttaaccgataagactgatgatcagaaagacctgctcgatcgagccaaatgcaagcaaaaacttcgagatgaaaaatggtgggctagctgcataaattgcgttaattacagacaaagccataacccaaaattcccggatatacgttctgaaggcgtgattcgaacccaagccctgggtgaattaccgagtttcctactctcgtcctcaaaaatcccaccataccattggtcatatagccatgattcaaaatacgtcaacaaaagcgcattcctcaccaatgagttttgttgggatggtgagatctcatgtttgggtgagcttcttaaagatgcagatcacccactttggaatactttgaaaaagttaggttgttctcaaaaaacttgcaaagcaatggcaaaacaactagctgatattactctcacgactatcaatgtcacactcgcaccaaattacctgactcaaatatctctccccgatagtgatacatcctacatttcactctctcctgttgcatcgctatcgatgcaaagccactttcatcagaggctccaagatgaaaatcggcatagcgcgataacgcggtttagccgaactaccaacatgggggtcactgcgatgacatgtggcggcgcatttagaatgttaaagtctggcgctaagttttccagcccccctcatcaccgattaaacagtaaacgaagttggttgacgtcagagcatgttcagtcattaaaacagtaccagcgcctcaacaaaagcctcatacctgaaaactctcggattgcactccgtagaaaatacaaaatcgagcttcaaaatatggtcagatcttggtttgcaatgcaagaccatacccttgattcgaacatacttatccaacatttgaatcatgacctatcttacttaggagccacaaaacgttttgcatacgatccagcgatgaccaagctctttactgagcttttgaaacgagagttatcaaattcaatcaataatggtgagcaacacactaatggatcgtttttagtcctaccgaatatcagggtttgtggcgcaacagctttaagctccccggtaacggtggggattccatcacttacagctttctttggcttcgttcacgcatttgaacggaatataaatcgcaccacctcatcgtttcgtgttgaatcctttgcgatatgcgtccatcaactacatgtcgagaagcgaggtttgacagcagagtttgtggaaaaaggcgacgggactatatccgctcccgcgacccgggatgactggcagtgtgatgtcgtatttagccttattttgaacaccaactttgctcaacatattgaccaagatacgttagttacatcactaccaaagcgattggctcggggttcagcaaaaattgcgattgatgactttaaacatatcaactcattctcgacattagaaacagcgatcgaatctctgccaatagaagctggtaggtggttatcactttacgcacagtcaaacaataatctaagtgatctattagcagccatgacagaggaccatcagctcatggcaagctgcgtcggttaccacttgttagaagagcccaaagataaaccaaactccctcagaggttacaaacacgctatcgccgagtgcatcattggactcattaactcaatcacctttagctcagagactgatcccaacacaatcttttggtcgctaaagaactatcaaaactacctagtggtacagccaaggagtatcaacgatgaaactaccgacaaatctagcctatgagcgctctatcgacccatcagatgtctgtttttttgtcgtctggcccgatgatagaaaaacacctttaacctacaattctcgtactctgctcgggcaaatggaagcggcatcattagcctatgatgtctcaggtcaaccaataaaaagtgccaccgctgaggcgttagctcaagggaaccctcatcaagttgatttctgccacgttccatacggtgcgagtcatattgaatgcagtttctccgtctcgttttcttctgaactacgtcaaccatataagtgtaactcaagcaaagttaaacaaacgctagtgcaattagtcgagctctacgaaacgaaaatcggctggactgagctagcaacccgatatttgatgaacatttgcaacggtaaatggctgtggaaaaatacccgtaaagcctattgctggaacattgtacttacaccttggccttggaacggggaaaaggttggatttgaagatattcgtactaactacacctcacggcaagactttaaaaataataaaaattggtctgctatagttgaaatgatcaaaaccgcattttctagtactgatgggctggcgatatttgaagtcagggccaccttgcacttgccaacgaatgctatggtgcggccaagccaagttttcacagaaaaagaaagtggcagtaaaagtaaatctaaaactcaaaacagtcgagtttttcagagtacaactattgatggtgaacgatcgccaatactaggggcctttaaaacgggagcagctattgcaaccattgacgactggtatcctgaagccactgagccactaagggtcggacggtttggggttcatcgcgaagatgtcacttgctaccgtcatccgtctaccggaaaagattttttctcgatattacaacaagcagagcactatattgaagtgttgagcgccaacaaaactcccgctcaagaaactatcaacgacatgcactttttaatggctaacctgattaagggtgggatgttccagcataaaggagactgactgtgaaatggtattataagacaatcacctttctgccagagttgtgcaacaacgagtcactggctgcaaagtgtctccgcgttctgcatggatttaactatcagtatgagacacgaaatatcggcgtttcatttccgctttggtgtgatgcaacggttggaaaaaagatttcatttgtcagcaagaacaagatagaactcgacttactacttaaacaacactatttcgtccaaatggaacaacttcaatactttcatatatccaacactgttctcgtcccagaagattgtacatacgtttcctttagacgctgtcaatctatagataagctcacagcagcagggctggcaaggaaaatcagacgcctggagaaacgtgctctatctagaggcgagcaatttgacccatcatcttttgctcaaaaagagcatactgcaatagcgcactaccactcacttggggagtccagcaaacagacgaaccgcaactttcgactcaatatcaggatgctctcggagcaaccccgtgaggggaactcgatttttagtagctatggcttatcaaattcagaaaactcgtttcagcctgtacccttaatctgacctaggctgctgccaccgctgagcaataactagcataaccccttggggcctctaaacgggtcttgaggggttttttgctgaaacctcaggcatttgagaagcacacggtcacactgcttccggtagtcaataaaccggtaaaccagcaatagacataagcggctatttaacgaccctgccctgaaccgacgaccgggtcatcgtggccggatcttgcggcccctcggcttgaacgaattgttagacattatttgccgactaccttggtgatctcgcctttcacgtagtggacaaattcttccaactgatctgcgcgcgaggccaagcgatcttcttcttgtccaagataagcctgtctagcttcaagtatgacgggctgatactgggccggcaggcgctccattgcccagtcggcagcgacatccttcggcgcgattttgccggttactgcgctgtaccaaatgcgggacaacgtaagcactacatttcgctcatcgccagcccagtcgggcggcgagttccatagcgttaaggtttcatttagcgcctcaaatagatcctgttcaggaaccggatcaaagagttcctccgccgctggacctaccaaggcaacgctatgttctcttgcttttgtcagcaagatagccagatcaatgtcgatcgtggctggctcgaagatacctgcaagaatgtcattgcgctgccattctccaaattgcagttcgcgcttagctggataacgccacggaatgatgtcgtcgtgcacaacaatggtgacttctacagcgcggagaatctcgctctctccaggggaagccgaagtttccaaaaggtcgttgatcaaagctcgccgcgttgtttcatcaagccttacggtcaccgtaaccagcaaatcaatatcactgtgtggcttcaggccgccatccactgcggagccgtacaaatgtacggccagcaacgtcggttcgagatggcgctcgatgacgccaactacctctgatagttgagtcgatacttcggcgatcaccgcttccctcatactcttcctttttcaatattattgaagcatttatcagggttattgtctcatgagcggatacatatttgaatgtatttagaaaaataaacaaatagctagctcactcggtcgctacgctccgggcgtgagactgcggcgggcgctgcggacacatacaaagttacccacagattccgtggataagcaggggactaacatgtgaggcaaaacagcagggccgcgccggtggcgtttttccataggctccgccctcctgccagagttcacataaacagacgcttttccggtgcatctgtgggagccgtgaggctcaaccatgaatctgacagtacgggcgaaacccgacaggacttaaagatccccaccgtttccggcgggtcgctccctcttgcgctctcctgttccgaccctgccgtttaccggatacctgttccgcctttctcccttacgggaagtgtggcgctttctcatagctcacacactggtatctcggctcggtgtaggtcgttcgctccaagctgggctgtaagcaagaactccccgttcagcccgactgctgcgccttatccggtaactgttcacttgagtccaacccggaaaagcacggtaaaacgccactggcagcagccattggtaactgggagttcgcagaggatttgtttagctaaacacgcggttgctcttgaagtgtgcgccaaagtccggctacactggaaggacagatttggttgctgtgctctgcgaaagccagttaccacggttaagcagttccccaactgacttaaccttcgatcaaaccacctccccaggtggttttttcgtttacagggcaaaagattacgcgcagaaaaaaaggatctcaagaagatcctttgatcttttctactgaaccgctctagatttcagtgcaatttatctcttcaaatgtagcacctgaagtcagccccatacgatataagttgtaattctcatgttagtcatgccccgcgcccaccggaaggagctgactgggttgaaggctctcaagggcatcggtcgagatcccggtgcctaatgagtgagctaacttacattaattgcgttgcgctcactgcccgctttccagtcgggaaacctgtcgtgccagctgcattaatgaatcggccaacgcgcggggagaggcggtttgcgtattgggcgccagggtggtttttcttttcaccagtgagacgggcaacagctgattgcccttcaccgcctggccctgagagagttgcagcaagcggtccacgctggtttgccccagcaggcgaaaatcctgtttgatggtggttaacggcgggatataacatgagctgtcttcggtatcgtcgtatcccactaccgagatgtccgcaccaacgcgcagcccggactcggtaatggcgcgcattgcgcccagcgccatctgatcgttggcaaccagcatcgcagtgggaacgatgccctcattcagcatttgcatggtttgttgaaaaccggacatggcactccagtcgccttcccgttccgctatcggctgaatttgattgcgagtgagatatttatgccagccagccagacgcagacgcgccgagacagaacttaatgggcccgctaacagcgcgatttgctggtgacccaatgcgaccagatgctccacgcccagtcgcgtaccgtcttcatgggagaaaataatactgttgatgggtgtctggtcagagacatcaagaaataacgccggaacattagtgcaggcagcttccacagcaatggcatcctggtcatccagcggatagttaatgatcagcccactgacgcgttgcgcgagaagattgtgcaccgccgctttacaggcttcgacgccgcttcgttctaccatcgacaccaccacgctggcacccagttgatcggcgcgagatttaatcgccgcgacaatttgcgacggcgcgtgcagggccagactggaggtggcaacgccaatcagcaacgactgtttgcccgccagttgttgtgccacgcggttgggaatgtaattcagctccgccatcgccgcttccactttttcccgcgttttcgcagaaacgtggctggcctggttcaccacgcgggaaacggtctgataagagacaccggcatactctgcgacatcgtataacgttactggtttcac

SEQ ID NO: 96 - DNA, 8445 bp, Synthetic construct
  source 1..8445: mol_type = other DNA
attcaccaccctgaattgactctcttccgggcgctatcatgccataccgcgaaaggttttgcgccattcgatggtgtccgggatctcgacgctctcccttatgcgactcctgcattaggaaattaatacgactcactataggggaattgtgagcggataacaattcccctgtagaaataattttgtttaactttaataaggagatataccatgggtgaactgccgagtaggtagctgataactgaaatcatcattaaagcgagtggcaacatgggtgaactgccgagtaggtagctgataacggatccgaattcgagctcggcgcgcctgcaggtcgacaagcttgcggccgcataatgcttaagtcgaacagaaagtaatcgtattgtacacggccgcataatcgaaattaatacgactcactataggggaattgtgagcggataacaattccccatcttagtatattagttaagtataagaaggagatatacatatgtttttgcaaagacctaaaccttacagcgatgaaagtttagaaagtttctttatccgagtggctaacaaaaatggctacggtgatgtccatcgcttcctagaagccactaaacgattccttcaagacattgaccataatggctatcaaacctttccgactgatataactcggataaacccatactcagctaaaaacagttccagcgcacgaactgcgtcattcctgaaacttgcacaattgacatttaatgaaccgccagagctacttgggttggcaattaacagaacaaacatgaaatactcgccgtcaactagcgcggttgttagaggtgcagaagtctttcctcgcagtttactacggacgcactccatcccctgctgtcctttgtgtctgcgagaaaatggctacgcctcctacctttggcactttcaggggtacgaatactgccacagccataacgtacctttaattaccacttgtagctgtggtaaggagtttgactaccgagtatctgggttaaagggcatttgctgcaaatgcaaggagcctatcaccttaaccagcagggagaacggtcatgaggcagcgtgtactgtttcaaactggcttgctggccatgaatctaaacctctgccaaatcttcctaaaagctaccgatggggtttagttcattggtggatgggtattaaagatagcgagttcgatcacttttcgttcgttcaatttttctcaaactggccaaggtcattccactcgataatcgaagatgaagtagagttcaaccttgagcatgctgttgtcagcacgtctgaattacgactaaaagatcttcttggtcgattgtttttcggttcaattcggttacctgagcggaatcttcaacacaatatcatccttggtgagcttctctgctatttagaaaatcgtttatggcaagacaagggattaatcgccaacctcaaaatgaacgcgttagaggcgactgtaatgttaaattgtagcctcgatcagattgcatcaatggttgaacaacgcatcttgaagccaaatcgaaaaagcaagcccaacagccctcttgatgttaccgattatctatttcatttcggcgatattttctgtctttggttagctgagttccaaagcgatgagtttaaccgttcgttttatgtgtcgaggtggtaaatgcaaactctgaaagaactaatcgcatccaatcctgacgacttaacaactgaacttaagagagcatttcgtccactcacaccgcatattgcaattgatggtaatgaacttgacgcactgacgatattagtcaatttaaccgataagactgatgatcagaaagacctgctcgatcgagccaaatgcaagcaaaaacttcgagatgaaaaatggtgggctagctgcataaattgcgttaattacagacaaagccataacccaaaattcccggatatacgttctgaaggcgtgattcgaacccaagccctgggtgaattaccgagtttcctactctcgtcctcaaaaatcccaccataccattggtcatatagccatgattcaaaatacgtcaacaaaagcgcattcctcaccaatgagttttgttgggatggtgagatctcatgtttgggtgagcttcttaaagatgcagatcacccactttggaatactttgaaaaagttaggttgttctcaaaaaacttgcaaagcaatggcaaaacaactagctgatattactctcacgactatcaatgtcacactcgcaccaaattacctgactcaaatatctctccccgatagtgatacatcctacatttcactctctcctgttgcatcgctatcgatgcaaagccactttcatcagaggctccaagatgaaaatcggcatagcgcgataacgcggtttagccgaactaccaacatgggggtcactgcgatgacatgtggcggcgcatttagaatgttaaagtctggcgctaagttttccagcccccctcatcaccgattaaacagtaaacgaagttggttgacgtcagagcatgttcagtcattaaaacagtaccagcgcctcaacaaaagcctcatacctgaaaactctcggattgcactccgtagaaaatacaaaatcgagcttcaaaatatggtcagatcttggtttgcaatgcaagaccatacccttgattcgaacatacttatccaacatttgaatcatgacctatcttacttaggagccacaaaacgttttgcatacgatccagcgatgaccaagctctttactgagcttttgaaacgagagttatcaaattcaatcaataatggtgagcaacacactaatggatcgtttttagtcctaccgaatatcagggtttgtggcgcaacagctttaagctccccggtaacggtggggattccatcacttacagctttctttggcttcgttcacgcatttgaacggaatataaatcgcaccacctcatcgtttcgtgttgaatcctttgcgatatgcgtccatcaactacatgtcgagaagcgaggtttgacagcagagtttgtggaaaaaggcgacgggactatatccgctcccgcgacccgggatgactggcagtgtgatgtcgtatttagccttattttgaacaccaactttgctcaacatattgaccaagatacgttagttacatcactaccaaagcgattggctcggggttcagcaaaaattgcgattgatgactttaaacatatcaactcattctcgacattagaaacagcgatcgaatctctgccaatagaagctggtaggtggttatcactttacgcacagtcaaacaataatctaagtgatctattagcagccatgacagaggaccatcagctcatggcaagctgcgtcggttaccacttgttagaagagcccaaagataaaccaaactccctcagaggttacaaacacgctatcgccgagtgcatcattggactcattaactcaatcacctttagctcagagactgatcccaacacaatcttttggtcgctaaagaactatcaaaactacctagtggtacagccaaggagtatcaacgatgaaactaccgacaaatctagcctatgagcgctctatcgacccatcagatgtctgtttttttgtcgtctggcccgatgatagaaaaacacctttaacctacaattctcgtactctgctcgggcaaatggaagcggcatcattagcctatgatgtctcaggtcaaccaataaaaagtgccaccgctgaggcgttagctcaagggaaccctcatcaagttgatttctgccacgttccatacggtgcgagtcatattgaatgcagtttctccgtctcgttttcttctgaactacgtcaaccatataagtgtaactcaagcaaagttaaacaaacgctagtgcaattagtcgagctctacgaaacgaaaatcggctggactgagctagcaacccgatatttgatgaacatttgcaacggtaaatggctgtggaaaaatacccgtaaagcctattgctggaacattgtacttacaccttggccttggaacggggaaaaggttggatttgaagatattcgtactaactacacctcacggcaagactttaaaaataataaaaattggtctgctatagttgaaatgatcaaaaccgcattttctagtactgatgggctggcgatatttgaagtcagggccaccttgcacttgccaacgaatgctatggtgcggccaagccaagttttcacagaaaaagaaagtggcagtaaaagtaaatctaaaactcaaaacagtcgagtttttcagagtacaactattgatggtgaacgatcgccaatactaggggcctttaaaacgggagcagctattgcaaccattgacgactggtatcctgaagccactgagccactaagggtcggacggtttggggttcatcgcgaagatgtcacttgctaccgtcatccgtctaccggaaaagattttttctcgatattacaacaagcagagcactatattgaagtgttgagcgccaacaaaactcccgctcaagaaactatcaacgacatgcactttttaatggctaacctgattaagggtgggatgttccagcataaaggagactgactgtgaaatggtattataagacaatcacctttctgccagagttgtgcaacaacgagtcactggctgcaaagtgtctccgcgttctgcatggatttaactatcagtatgagacacgaaatatcggcgtttcatttccgctttggtgtgatgcaacggttggaaaaaagatttcatttgtcagcaagaacaagatagaactcgacttactacttaaacaacactatttcgtccaaatggaacaacttcaatactttcatatatccaacactgttctcgtcccagaagattgtacatacgtttcctttagacgctgtcaatctatagataagctcacagcagcagggctggcaaggaaaatcagacgcctggagaaacgtgctctatctagaggcgagcaatttgacccatcatcttttgctcaaaaagagcatactgcaatagcgcactaccactcacttggggagtccagcaaacagacgaaccgcaactttcgactcaatatcaggatgctctcggagcaaccccgtgaggggaactcgatttttagtagctatggcttatcaaattcagaaaactcgtttcagcctgtacccttaatctgacctaggctgctgccaccgctgagcaataactagcataaccccttggggcctctaaacgggtcttgaggggttttttgctgaaacctcaggcatttgagaagcacacggtcacactgcttccggtagtcaataaaccggtaaaccagcaatagacataagcggctatttaacgaccctgccctgaaccgacgaccgggtcatcgtggccggatcttgcggcccctcggcttgaacgaattgttagacattatttgccgactaccttggtgatctcgcctttcacgtagtggacaaattcttccaactgatctgcgcgcgaggccaagcgatcttcttcttgtccaagataagcctgtctagcttcaagtatgacgggctgatactgggccggcaggcgctccattgcccagtcggcagcgacatccttcggcgcgattttgccggttactgcgctgtaccaaatgcgggacaacgtaagcactacatttcgctcatcgccagcccagtcgggcggcgagttccatagcgttaaggtttcatttagcgcctcaaatagatcctgttcaggaaccggatcaaagagttcctccgccgctggacctaccaaggcaacgctatgttctcttgcttttgtcagcaagatagccagatcaatgtcgatcgtggctggctcgaagatacctgcaagaatgtcattgcgctgccattctccaaattgcagttcgcgcttagctggataacgccacggaatgatgtcgtcgtgcacaacaatggtgacttctacagcgcggagaatctcgctctctccaggggaagccgaagtttccaaaaggtcgttgatcaaagctcgccgcgttgtttcatcaagccttacggtcaccgtaaccagcaaatcaatatcactgtgtggcttcaggccgccatccactgcggagccgtacaaatgtacggccagcaacgtcggttcgagatggcgctcgatgacgccaactacctctgatagttgagtcgatacttcggcgatcaccgcttccctcatactcttcctttttcaatattattgaagcatttatcagggttattgtctcatgagcggatacatatttgaatgtatttagaaaaataaacaaatagctagctcactcggtcgctacgctccgggcgtgagactgcggcgggcgctgcggacacatacaaagttacccacagattccgtggataagcaggggactaacatgtgaggcaaaacagcagggccgcgccggtggcgtttttccataggctccgccctcctgccagagttcacataaacagacgcttttccggtgcatctgtgggagccgtgaggctcaaccatgaatctgacagtacgggcgaaacccgacaggacttaaagatccccaccgtttccggcgggtcgctccctcttgcgctctcctgttccgaccctgccgtttaccggatacctgttccgcctttctcccttacgggaagtgtggcgctttctcatagctcacacactggtatctcggctcggtgtaggtcgttcgctccaagctgggctgtaagcaagaactccccgttcagcccgactgctgcgccttatccggtaactgttcacttgagtccaacccggaaaagcacggtaaaacgccactggcagcagccattggtaactgggagttcgcagaggatttgtttagctaaacacgcggttgctcttgaagtgtgcgccaaagtccggctacactggaaggacagatttggttgctgtgctctgcgaaagccagttaccacggttaagcagttccccaactgacttaaccttcgatcaaaccacctccccaggtggttttttcgtttacagggcaaaagattacgcgcagaaaaaaaggatctcaagaagatcctttgatcttttctactgaaccgctctagatttcagtgcaatttatctcttcaaatgtagcacctgaagtcagccccatacgatataagttgtaattctcatgttagtcatgccccgcgcccaccggaaggagctgactgggttgaaggctctcaagggcatcggtcgagatcccggtgcctaatgagtgagctaacttacattaattgcgttgcgctcactgcccgctttccagtcgggaaacctgtcgtgccagctgcattaatgaatcggccaacgcgcggggagaggcggtttgcgtattgggcgccagggtggtttttcttttcaccagtgagacgggcaacagctgattgcccttcaccgcctggccctgagagagttgcagcaagcggtccacgctggtttgccccagcaggcgaaaatcctgtttgatggtggttaacggcgggatataacatgagctgtcttcggtatcgtcgtatcccactaccgagatgtccgcaccaacgcgcagcccggactcggtaatggcgcgcattgcgcccagcgccatctgatcgttggcaaccagcatcgcagtgggaacgatgccctcattcagcatttgcatggtttgttgaaaaccggacatggcactccagtcgccttcccgttccgctatcggctgaatttgattgcgagtgagatatttatgccagccagccagacgcagacgcgccgagacagaacttaatgggcccgctaacagcgcgatttgctggtgacccaatgcgaccagatgctccacgcccagtcgcgtaccgtcttcatgggagaaaataatactgttgatgggtgtctggtcagagacatcaagaaataacgccggaacattagtgcaggcagcttccacagcaatggcatcctggtcatccagcggatagttaatgatcagcccactgacgcgttgcgcgagaagattgtgcaccgccgctttacaggcttcgacgccgcttcgttctaccatcgacaccaccacgctggcacccagttgatcggcgcgagatttaatcgccgcgacaatttgcgacggcgcgtgcagggccagactggaggtggcaacgccaatcagcaacgactgtttgcccgccagttgttgtgccacgcggttgggaatgtaattcagctccgccatcgccgcttccactttttcccgcgttttcgcagaaacgtggctggcctggttcaccacgcgggaaacggtctgataagagacaccggcatactctgcgacatcgtataacgttactggtttcac

SEQ ID NO: 97 - DNA, 8445 bp, Synthetic construct
  source 1..8445: mol_type = other DNA
attcgatggtgtccgggatctcgacgctctcccttatgcgactcctgcattaggaaattaatacgactcactataggggaattgtgagcggataacaattcccctgtagaaataattttgtttaactttaataaggagatataccatgggtgaactgccgagtaggtagctgataacgaaatcatcattaaagcgagtggcaacatggagtgaactgccgagtaggtagctgataacggatccgaattcgagctcggcgcgcctgcaggtcgacaagcttgcggccgcataatgcttaagtcgaacagaaagtaatcgtattgtacacggccgcataatcgaaattaatacgactcactataggggaattgtgagcggataacaattccccatcttagtatattagttaagtataagaaggagatatacatatgtttttgcaaagacctaaaccttacagcgatgaaagtttagaaagtttctttatccgagtggctaacaaaaatggctacggtgatgtccatcgcttcctagaagccactaaacgattccttcaagacattgaccataatggctatcaaacctttccgactgatataactcggataaacccatactcagctaaaaacagttccagcgcacgaactgcgtcattcctgaaacttgcacaattgacatttaatgaaccgccagagctacttgggttggcaattaacagaacaaacatgaaatactcgccgtcaactagcgcggttgttagaggtgcagaagtctttcctcgcagtttactacggacgcactccatcccctgctgtcctttgtgtctgcgagaaaatggctacgcctcctacctttggcactttcaggggtacgaatactgccacagccataacgtacctttaattaccacttgtagctgtggtaaggagtttgactaccgagtatctgggttaaagggcatttgctgcaaatgcaaggagcctatcaccttaaccagcagggagaacggtcatgaggcagcgtgtactgtttcaaactggcttgctggccatgaatctaaacctctgccaaatcttcctaaaagctaccgatggggtttagttcattggtggatgggtattaaagatagcgagttcgatcacttttcgttcgttcaatttttctcaaactggccaaggtcattccactcgataatcgaagatgaagtagagttcaaccttgagcatgctgttgtcagcacgtctgaattacgactaaaagatcttcttggtcgattgtttttcggttcaattcggttacctgagcggaatcttcaacacaatatcatccttggtgagcttctctgctatttagaaaatcgtttatggcaagacaagggattaatcgccaacctcaaaatgaacgcgttagaggcgactgtaatgttaaattgtagcctcgatcagattgcatcaatggttgaacaacgcatcttgaagccaaatcgaaaaagcaagcccaacagccctcttgatgttaccgattatctatttcatttcggcgatattttctgtctttggttagctgagttccaaagcgatgagtttaaccgttcgttttatgtgtcgaggtggtaaatgcaaactctgaaagaactaatcgcatccaatcctgacgacttaacaactgaacttaagagagcatttcgtccactcacaccgcatattgcaattgatggtaatgaacttgacgcactgacgatattagtcaatttaaccgataagactgatgatcagaaagacctgctcgatcgagccaaatgcaagcaaaaacttcgagatgaaaaatggtgggctagctgcataaattgcgttaattacagacaaagccataacccaaaattcccggatatacgttctgaaggcgtgattcgaacccaagccctgggtgaattaccgagtttcctactctcgtcctcaaaaatcccaccataccattggtcatatagccatgattcaaaatacgtcaacaaaagcgcattcctcaccaatgagttttgttgggatggtgagatctcatgtttgggtgagcttcttaaagatgcagatcacccactttggaatactttgaaaaagttaggttgttctcaaaaaacttgcaaagcaatggcaaaacaactagctgatattactctcacgactatcaatgtcacactcgcaccaaattacctgactcaaatatctctccccgatagtgatacatcctacatttcactctctcctgttgcatcgctatcgatgcaaagccactttcatcagaggctccaagatgaaaatcggcatagcgcgataacgcggtttagccgaactaccaacatgggggtcactgcgatgacatgtggcggcgcatttagaatgttaaagtctggcgctaagttttccagcccccctcatcaccgattaaacagtaaacgaagttggttgacgtcagagcatgttcagtcattaaaacagtaccagcgcctcaacaaaagcctcatacctgaaaactctcggattgcactccgtagaaaatacaaaatcgagcttcaaaatatggtcagatcttggtttgcaatgcaagaccatacccttgattcgaacatacttatccaacatttgaatcatgacctatcttacttaggagccacaaaacgttttgcatacgatccagcgatgaccaagctctttactgagcttttgaaacgagagttatcaaattcaatcaataatggtgagcaacacactaatggatcgtttttagtcctaccgaatatcagggtttgtggcgcaacagctttaagctccccggtaacggtggggattccatcacttacagctttctttggcttcgttcacgcatttgaacggaatataaatcgcaccacctcatcgtttcgtgttgaatcctttgcgatatgcgtccatcaactacatgtcgagaagcgaggtttgacagcagagtttgtggaaaaaggcgacgggactatatccgctcccgcgacccgggatgactggcagtgtgatgtcgtatttagccttattttgaacaccaactttgctcaacatattgaccaagatacgttagttacatcactaccaaagcgattggctcggggttcagcaaaaattgcgattgatgactttaaacatatcaactcattctcgacattagaaacagcgatcgaatctctgccaatagaagctggtaggtggttatcactttacgcacagtcaaacaataatctaagtgatctattagcagccatgacagaggaccatcagctcatggcaagctgcgtcggttaccacttgttagaagagcccaaagataaaccaaactccctcagaggttacaaacacgctatcgccgagtgcatcattggactcattaactcaatcacctttagctcagagactgatcccaacacaatcttttggtcgctaaagaactatcaaaactacctagtggtacagccaaggagtatcaacgatgaaactaccgacaaatctagcctatgagcgctctatcgacccatcagatgtctgtttttttgtcgtctggcccgatgatagaaaaacacctttaacctacaattctcgtactctgctcgggcaaatggaagcggcatcattagcctatgatgtctcaggtcaaccaataaaaagtgccaccgctgaggcgttagctcaagggaaccctcatcaagttgatttctgccacgttccatacggtgcgagtcatattgaatgcagtttctccgtctcgttttcttctgaactacgtcaaccatataagtgtaactcaagcaaagttaaacaaacgctagtgcaattagtcgagctctacgaaacgaaaatcggctggactgagctagcaacccgatatttgatgaacatttgcaacggtaaatggctgtggaaaaatacccgtaaagcctattgctggaacattgtacttacaccttggccttggaacggggaaaaggttggatttgaagatattcgtactaactacacctcacggcaagactttaaaaataataaaaattggtctgctatagttgaaatgatcaaaaccgcattttctagtactgatgggctggcgatatttgaagtcagggccaccttgcacttgccaacgaatgctatggtgcggccaagccaagttttcacagaaaaagaaagtggcagtaaaagtaaatctaaaactcaaaacagtcgagtttttcagagtacaactattgatggtgaacgatcgccaatactaggggcctttaaaacgggagcagctattgcaaccattgacgactggtatcctgaagccactgagccactaagggtcggacggtttggggttcatcgcgaagatgtcacttgctaccgtcatccgtctaccggaaaagattttttctcgatattacaacaagcagagcactatattgaagtgttgagcgccaacaaaactcccgctcaagaaactatcaacgacatgcactttttaatggctaacctgattaagggtgggatgttccagcataaaggagactgactgtgaaatggtattataagacaatcacctttctgccagagttgtgcaacaacgagtcactggctgcaaagtgtctccgcgttctgcatggatttaactatcagtatgagacacgaaatatcggcgtttcatttccgctttggtgtgatgcaacggttggaaaaaagatttcatttgtcagcaagaacaagatagaactcgacttactacttaaacaacactatttcgtccaaatggaacaacttcaatactttcatatatccaacactgttctcgtcccagaagattgtacatacgtttcctttagacgctgtcaatctatagataagctcacagcagcagggctggcaaggaaaatcagacgcctggagaaacgtgctctatctagaggcgagcaatttgacccatcatcttttgctcaaaaagagcatactgcaatagcgcactaccactcacttggggagtccagcaaacagacgaaccgcaactttcgactcaatatcaggatgctctcggagcaaccccgtgaggggaactcgatttttagtagctatggcttatcaaattcagaaaactcgtttcagcctgtacccttaatctgacctaggctgctgccaccgctgagcaataactagcataaccccttggggcctctaaacgggtcttgaggggttttttgctgaaacctcaggcatttgagaagcacacggtcacactgcttccggtagtcaataaaccggtaaaccagcaatagacataagcggctatttaacgaccctgccctgaaccgacgaccgggtcatcgtggccggatcttgcggcccctcggcttgaacgaattgttagacattatttgccgactaccttggtgatctcgcctttcacgtagtggacaaattcttccaactgatctgcgcgcgaggccaagcgatcttcttcttgtccaagataagcctgtctagcttcaagtatgacgggctgatactgggccggcaggcgctccattgcccagtcggcagcgacatccttcggcgcgattttgccggttactgcgctgtaccaaatgcgggacaacgtaagcactacatttcgctcatcgccagcccagtcgggcggcgagttccatagcgttaaggtttcatttagcgcctcaaatagatcctgttcaggaaccggatcaaagagttcctccgccgctggacctaccaaggcaacgctatgttctcttgcttttgtcagcaagatagccagatcaatgtcgatcgtggctggctcgaagatacctgcaagaatgtcattgcgctgccattctccaaattgcagttcgcgcttagctggataacgccacggaatgatgtcgtcgtgcacaacaatggtgacttctacagcgcggagaatctcgctctctccaggggaagccgaagtttccaaaaggtcgttgatcaaagctcgccgcgttgtttcatcaagccttacggtcaccgtaaccagcaaatcaatatcactgtgtggcttcaggccgccatccactgcggagccgtacaaatgtacggccagcaacgtcggttcgagatggcgctcgatgacgccaactacctctgatagttgagtcgatacttcggcgatcaccgcttccctcatactcttcctttttcaatattattgaagcatttatcagggttattgtctcatgagcggatacatatttgaatgtatttagaaaaataaacaaatagctagctcactcggtcgctacgctccgggcgtgagactgcggcgggcgctgcggacacatacaaagttacccacagattccgtggataagcaggggactaacatgtgaggcaaaacagcagggccgcgccggtggcgtttttccataggctccgccctcctgccagagttcacataaacagacgcttttccggtgcatctgtgggagccgtgaggctcaaccatgaatctgacagtacgggcgaaacccgacaggacttaaagatccccaccgtttccggcgggtcgctccctcttgcgctctcctgttccgaccctgccgtttaccggatacctgttccgcctttctcccttacgggaagtgtggcgctttctcatagctcacacactggtatctcggctcggtgtaggtcgttcgctccaagctgggctgtaagcaagaactccccgttcagcccgactgctgcgccttatccggtaactgttcacttgagtccaacccggaaaagcacggtaaaacgccactggcagcagccattggtaactgggagttcgcagaggatttgtttagctaaacacgcggttgctcttgaagtgtgcgccaaagtccggctacactggaaggacagatttggttgctgtgctctgcgaaagccagttaccacggttaagcagttccccaactgacttaaccttcgatcaaaccacctccccaggtggttttttcgtttacagggcaaaagattacgcgcagaaaaaaaggatctcaagaagatcctttgatcttttctactgaaccgctctagatttcagtgcaatttatctcttcaaatgtagcacctgaagtcagccccatacgatataagttgtaattctcatgttagtcatgccccgcgcccaccggaaggagctgactgggttgaaggctctcaagggcatcggtcgagatcccggtgcctaatgagtgagctaacttacattaattgcgttgcgctcactgcccgctttccagtcgggaaacctgtcgtgccagctgcattaatgaatcggccaacgcgcggggagaggcggtttgcgtattgggcgccagggtggtttttcttttcaccagtgagacgggcaacagctgattgcccttcaccgcctggccctgagagagttgcagcaagcggtccacgctggtttgccccagcaggcgaaaatcctgtttgatggtggttaacggcgggatataacatgagctgtcttcggtatcgtcgtatcccactaccgagatgtccgcaccaacgcgcagcccggactcggtaatggcgcgcattgcgcccagcgccatctgatcgttggcaaccagcatcgcagtgggaacgatgccctcattcagcatttgcatggtttgttgaaaaccggacatggcactccagtcgccttcccgttccgctatcggctgaatttgattgcgagtgagatatttatgccagccagccagacgcagacgcgccgagacagaacttaatgggcccgctaacagcgcgatttgctggtgacccaatgcgaccagatgctccacgcccagtcgcgtaccgtcttcatgggagaaaataatactgttgatgggtgtctggtcagagacatcaagaaataacgccggaacattagtgcaggcagcttccacagcaatggcatcctggtcatccagcggatagttaatgatcagcccactgacgcgttgcgcgagaagattgtgcaccgccgctttacaggcttcgacgccgcttcgttctaccatcgacaccaccacgctggcacccagttgatcggcgcgagatttaatcgccgcgacaatttgcgacggcgcgtgcagggccagactggaggtggcaacgccaatcagcaacgactgtttgcccgccagttgttgtgccacgcggttgggaatgtaattcagctccgccatcgccgcttccactttttcccgcgttttcgcagaaacgtggctggcctggttcaccacgcgggaaacggtctgataagagacaccggcatactctgcgacatcgtataacgttactggtttcacattcaccaccctgaattgactctcttccgggcgctatcatgccataccgcgaaaggttttgcgcc

SEQ ID NO: 98 - DNA, 8445 bp, Synthetic construct
  source 1..8445: mol_type = other DNA
attcaccaccctgaattgactctcttccgggcgctatcatgccataccgcgaaaggttttgcgccattcgatggtgtccgggatctcgacgctctcccttatgcgactcctgcattaggaaattaatacgactcactataggggaattgtgagcggataacaattcccctgtagaaataattttgtttaactttaataaggagatataccatgggtgaactgccgagtaggtagctgataacaaatcatcattaaagcgagtggcaacatggaagtgaactgccgagtaggtagctgataacggatccgaattcgagctcggcgcgcctgcaggtcgacaagcttgcggccgcataatgcttaagtcgaacagaaagtaatcgtattgtacacggccgcataatcgaaattaatacgactcactataggggaattgtgagcggataacaattccccatcttagtatattagttaagtataagaaggagatatacatatgtttttgcaaagacctaaaccttacagcgatgaaagtttagaaagtttctttatccgagtggctaacaaaaatggctacggtgatgtccatcgcttcctagaagccactaaacgattccttcaagacattgaccataatggctatcaaacctttccgactgatataactcggataaacccatactcagctaaaaacagttccagcgcacgaactgcgtcattcctgaaacttgcacaattgacatttaatgaaccgccagagctacttgggttggcaattaacagaacaaacatgaaatactcgccgtcaactagcgcggttgttagaggtgcagaagtctttcctcgcagtttactacggacgcactccatcccctgctgtcctttgtgtctgcgagaaaatggctacgcctcctacctttggcactttcaggggtacgaatactgccacagccataacgtacctttaattaccacttgtagctgtggtaaggagtttgactaccgagtatctgggttaaagggcatttgctgcaaatgcaaggagcctatcaccttaaccagcagggagaacggtcatgaggcagcgtgtactgtttcaaactggcttgctggccatgaatctaaacctctgccaaatcttcctaaaagctaccgatggggtttagttcattggtggatgggtattaaagatagcgagttcgatcacttttcgttcgttcaatttttctcaaactggccaaggtcattccactcgataatcgaagatgaagtagagttcaaccttgagcatgctgttgtcagcacgtctgaattacgactaaaagatcttcttggtcgattgtttttcggttcaattcggttacctgagcggaatcttcaacacaatatcatccttggtgagcttctctgctatttagaaaatcgtttatggcaagacaagggattaatcgccaacctcaaaatgaacgcgttagaggcgactgtaatgttaaattgtagcctcgatcagattgcatcaatggttgaacaacgcatcttgaagccaaatcgaaaaagcaagcccaacagccctcttgatgttaccgattatctatttcatttcggcgatattttctgtctttggttagctgagttccaaagcgatgagtttaaccgttcgttttatgtgtcgaggtggtaaatgcaaactctgaaagaactaatcgcatccaatcctgacgacttaacaactgaacttaagagagcatttcgtccactcacaccgcatattgcaattgatggtaatgaacttgacgcactgacgatattagtcaatttaaccgataagactgatgatcagaaagacctgctcgatcgagccaaatgcaagcaaaaacttcgagatgaaaaatggtgggctagctgcataaattgcgttaattacagacaaagccataacccaaaattcccggatatacgttctgaaggcgtgattcgaacccaagccctgggtgaattaccgagtttcctactctcgtcctcaaaaatcccaccataccattggtcatatagccatgattcaaaatacgtcaacaaaagcgcattcctcaccaatgagttttgttgggatggtgagatctcatgtttgggtgagcttcttaaagatgcagatcacccactttggaatactttgaaaaagttaggttgttctcaaaaaacttgcaaagcaatggcaaaacaactagctgatattactctcacgactatcaatgtcacactcgcaccaaattacctgactcaaatatctctccccgatagtgatacatcctacatttcactctctcctgttgcatcgctatcgatgcaaagccactttcatcagaggctccaagatgaaaatcggcatagcgcgataacgcggtttagccgaactaccaacatgggggtcactgcgatgacatgtggcggcgcatttagaatgttaaagtctggcgctaagttttccagcccccctcatcaccgattaaacagtaaacgaagttggttgacgtcagagcatgttcagtcattaaaacagtaccagcgcctcaacaaaagcctcatacctgaaaactctcggattgcactccgtagaaaatacaaaatcgagcttcaaaatatggtcagatcttggtttgcaatgcaagaccatacccttgattcgaacatacttatccaacatttgaatcatgacctatcttacttaggagccacaaaacgttttgcatacgatccagcgatgaccaagctctttactgagcttttgaaacgagagttatcaaattcaatcaataatggtgagcaacacactaatggatcgtttttagtcctaccgaatatcagggtttgtggcgcaacagctttaagctccccggtaacggtggggattccatcacttacagctttctttggcttcgttcacgcatttgaacggaatataaatcgcaccacctcatcgtttcgtgttgaatcctttgcgatatgcgtccatcaactacatgtcgagaagcgaggtttgacagcagagtttgtggaaaaaggcgacgggactatatccgctcccgcgacccgggatgactggcagtgtgatgtcgtatttagccttattttgaacaccaactttgctcaacatattgaccaagatacgttagttacatcactaccaaagcgattggctcggggttcagcaaaaattgcgattgatgactttaaacatatcaactcattctcgacattagaaacagcgatcgaatctctgccaatagaagctggtaggtggttatcactttacgcacagtcaaacaataatctaagtgatctattagcagccatgacagaggaccatcagctcatggcaagctgcgtcggttaccacttgttagaagagcccaaagataaaccaaactccctcagaggttacaaacacgctatcgccgagtgcatcattggactcattaactcaatcacctttagctcagagactgatcccaacacaatcttttggtcgctaaagaactatcaaaactacctagtggtacagccaaggagtatcaacgatgaaactaccgacaaatctagcctatgagcgctctatcgacccatcagatgtctgtttttttgtcgtctggcccgatgatagaaaaacacctttaacctacaattctcgtactctgctcgggcaaatggaagcggcatcattagcctatgatgtctcaggtcaaccaataaaaagtgccaccgctgaggcgttagctcaagggaaccctcatcaagttgatttctgccacgttccatacggtgcgagtcatattgaatgcagtttctccgtctcgttttcttctgaactacgtcaaccatataagtgtaactcaagcaaagttaaacaaacgctagtgcaattagtcgagctctacgaaacgaaaatcggctggactgagctagcaacccgatatttgatgaacatttgcaacggtaaatggctgtggaaaaatacccgtaaagcctattgctggaacattgtacttacaccttggccttggaacggggaaaaggttggatttgaagatattcgtactaactacacctcacggcaagactttaaaaataataaaaattggtctgctatagttgaaatgatcaaaaccgcattttctagtactgatgggctggcgatatttgaagtcagggccaccttgcacttgccaacgaatgctatggtgcggccaagccaagttttcacagaaaaagaaagtggcagtaaaagtaaatctaaaactcaaaacagtcgagtttttcagagtacaactattgatggtgaacgatcgccaatactaggggcctttaaaacgggagcagctattgcaaccattgacgactggtatcctgaagccactgagccactaagggtcggacggtttggggttcatcgcgaagatgtcacttgctaccgtcatccgtctaccggaaaagattttttctcgatattacaacaagcagagcactatattgaagtgttgagcgccaacaaaactcccgctcaagaaactatcaacgacatgcactttttaatggctaacctgattaagggtgggatgttccagcataaaggagactgactgtgaaatggtattataagacaatcacctttctgccagagttgtgcaacaacgagtcactggctgcaaagtgtctccgcgttctgcatggatttaactatcagtatgagacacgaaatatcggcgtttcatttccgctttggtgtgatgcaacggttggaaaaaagatttcatttgtcagcaagaacaagatagaactcgacttactacttaaacaacactatttcgtccaaatggaacaacttcaatactttcatatatccaacactgttctcgtcccagaagattgtacatacgtttcctttagacgctgtcaatctatagataagctcacagcagcagggctggcaaggaaaatcagacgcctggagaaacgtgctctatctagaggcgagcaatttgacccatcatcttttgctcaaaaagagcatactgcaatagcgcactaccactcacttggggagtccagcaaacagacgaaccgcaactttcgactcaatatcaggatgctctcggagcaaccccgtgaggggaactcgatttttagtagctatggcttatcaaattcagaaaactcgtttcagcctgtacccttaatctgacctaggctgctgccaccgctgagcaataactagcataaccccttggggcctctaaacgggtcttgaggggttttttgctgaaacctcaggcatttgagaagcacacggtcacactgcttccggtagtcaataaaccggtaaaccagcaatagacataagcggctatttaacgaccctgccctgaaccgacgaccgggtcatcgtggccggatcttgcggcccctcggcttgaacgaattgttagacattatttgccgactaccttggtgatctcgcctttcacgtagtggacaaattcttccaactgatctgcgcgcgaggccaagcgatcttcttcttgtccaagataagcctgtctagcttcaagtatgacgggctgatactgggccggcaggcgctccattgcccagtcggcagcgacatccttcggcgcgattttgccggttactgcgctgtaccaaatgcgggacaacgtaagcactacatttcgctcatcgccagcccagtcgggcggcgagttccatagcgttaaggtttcatttagcgcctcaaatagatcctgttcaggaaccggatcaaagagttcctccgccgctggacctaccaaggcaacgctatgttctcttgcttttgtcagcaagatagccagatcaatgtcgatcgtggctggctcgaagatacctgcaagaatgtcattgcgctgccattctccaaattgcagttcgcgcttagctggataacgccacggaatgatgtcgtcgtgcacaacaatggtgacttctacagcgcggagaatctcgctctctccaggggaagccgaagtttccaaaaggtcgttgatcaaagctcgccgcgttgtttcatcaagccttacggtcaccgtaaccagcaaatcaatatcactgtgtggcttcaggccgccatccactgcggagccgtacaaatgtacggccagcaacgtcggttcgagatggcgctcgatgacgccaactacctctgatagttgagtcgatacttcggcgatcaccgcttccctcatactcttcctttttcaatattattgaagcatttatcagggttattgtctcatgagcggatacatatttgaatgtatttagaaaaataaacaaatagctagctcactcggtcgctacgctccgggcgtgagactgcggcgggcgctgcggacacatacaaagttacccacagattccgtggataagcaggggactaacatgtgaggcaaaacagcagggccgcgccggtggcgtttttccataggctccgccctcctgccagagttcacataaacagacgcttttccggtgcatctgtgggagccgtgaggctcaaccatgaatctgacagtacgggcgaaacccgacaggacttaaagatccccaccgtttccggcgggtcgctccctcttgcgctctcctgttccgaccctgccgtttaccggatacctgttccgcctttctcccttacgggaagtgtggcgctttctcatagctcacacactggtatctcggctcggtgtaggtcgttcgctccaagctgggctgtaagcaagaactccccgttcagcccgactgctgcgccttatccggtaactgttcacttgagtccaacccggaaaagcacggtaaaacgccactggcagcagccattggtaactgggagttcgcagaggatttgtttagctaaacacgcggttgctcttgaagtgtgcgccaaagtccggctacactggaaggacagatttggttgctgtgctctgcgaaagccagttaccacggttaagcagttccccaactgacttaaccttcgatcaaaccacctccccaggtggttttttcgtttacagggcaaaagattacgcgcagaaaaaaaggatctcaagaagatcctttgatcttttctactgaaccgctctagatttcagtgcaatttatctcttcaaatgtagcacctgaagtcagccccatacgatataagttgtaattctcatgttagtcatgccccgcgcccaccggaaggagctgactgggttgaaggctctcaagggcatcggtcgagatcccggtgcctaatgagtgagctaacttacattaattgcgttgcgctcactgcccgctttccagtcgggaaacctgtcgtgccagctgcattaatgaatcggccaacgcgcggggagaggcggtttgcgtattgggcgccagggtggtttttcttttcaccagtgagacgggcaacagctgattgcccttcaccgcctggccctgagagagttgcagcaagcggtccacgctggtttgccccagcaggcgaaaatcctgtttgatggtggttaacggcgggatataacatgagctgtcttcggtatcgtcgtatcccactaccgagatgtccgcaccaacgcgcagcccggactcggtaatggcgcgcattgcgcccagcgccatctgatcgttggcaaccagcatcgcagtgggaacgatgccctcattcagcatttgcatggtttgttgaaaaccggacatggcactccagtcgccttcccgttccgctatcggctgaatttgattgcgagtgagatatttatgccagccagccagacgcagacgcgccgagacagaacttaatgggcccgctaacagcgcgatttgctggtgacccaatgcgaccagatgctccacgcccagtcgcgtaccgtcttcatgggagaaaataatactgttgatgggtgtctggtcagagacatcaagaaataacgccggaacattagtgcaggcagcttccacagcaatggcatcctggtcatccagcggatagttaatgatcagcccactgacgcgttgcgcgagaagattgtgcaccgccgctttacaggcttcgacgccgcttcgttctaccatcgacaccaccacgctggcacccagttgatcggcgcgagatttaatcgccgcgacaatttgcgacggcgcgtgcagggccagactggaggtggcaacgccaatcagcaacgactgtttgcccgccagttgttgtgccacgcggttgggaatgtaattcagctccgccatcgccgcttccactttttcccgcgttttcgcagaaacgtggctggcctggttcaccacgcgggaaacggtctgataagagacaccggcatactctgcgacatcgtataacgttactggtttcac

SEQ ID NO: 99 - DNA, 8445 bp, Synthetic construct
  source 1..8445: mol_type = other DNA
attcaccaccctgaattgactctcttccgggcgctatcatgccataccgcgaaaggttttgcgccattcgatggtgtccgggatctcgacgctctcccttatgcgactcctgcattaggaaattaatacgactcactataggggaattgtgagcggataacaattcccctgtagaaataattttgtttaactttaataaggagatataccatgggtgaactgccgagtaggtagctgataacaatcatcattaaagcgagtggcaacatggaaagtgaactgccgagtaggtagctgataacggatccgaattcgagctcggcgcgcctgcaggtcgacaagcttgcggccgcataatgcttaagtcgaacagaaagtaatcgtattgtacacggccgcataatcgaaattaatacgactcactataggggaattgtgagcggataacaattccccatcttagtatattagttaagtataagaaggagatatacatatgtttttgcaaagacctaaaccttacagcgatgaaagtttagaaagtttctttatccgagtggctaacaaaaatggctacggtgatgtccatcgcttcctagaagccactaaacgattccttcaagacattgaccataatggctatcaaacctttccgactgatataactcggataaacccatactcagctaaaaacagttccagcgcacgaactgcgtcattcctgaaacttgcacaattgacatttaatgaaccgccagagctacttgggttggcaattaacagaacaaacatgaaatactcgccgtcaactagcgcggttgttagaggtgcagaagtctttcctcgcagtttactacggacgcactccatcccctgctgtcctttgtgtctgcgagaaaatggctacgcctcctacctttggcactttcaggggtacgaatactgccacagccataacgtacctttaattaccacttgtagctgtggtaaggagtttgactaccgagtatctgggttaaagggcatttgctgcaaatgcaaggagcctatcaccttaaccagcagggagaacggtcatgaggcagcgtgtactgtttcaaactggcttgctggccatgaatctaaacctctgccaaatcttcctaaaagctaccgatggggtttagttcattggtggatgggtattaaagatagcgagttcgatcacttttcgttcgttcaatttttctcaaactggccaaggtcattccactcgataatcgaagatgaagtagagttcaaccttgagcatgctgttgtcagcacgtctgaattacgactaaaagatcttcttggtcgattgtttttcggttcaattcggttacctgagcggaatcttcaacacaatatcatccttggtgagcttctctgctatttagaaaatcgtttatggcaagacaagggattaatcgccaacctcaaaatgaacgcgttagaggcgactgtaatgttaaattgtagcctcgatcagattgcatcaatggttgaacaacgcatcttgaagccaaatcgaaaaagcaagcccaacagccctcttgatgttaccgattatctatttcatttcggcgatattttctgtctttggttagctgagttccaaagcgatgagtttaaccgttcgttttatgtgtcgaggtggtaaatgcaaactctgaaagaactaatcgcatccaatcctgacgacttaacaactgaacttaagagagcatttcgtccactcacaccgcatattgcaattgatggtaatgaacttgacgcactgacgatattagtcaatttaaccgataagactgatgatcagaaagacctgctcgatcgagccaaatgcaagcaaaaacttcgagatgaaaaatggtgggctagctgcataaattgcgttaattacagacaaagccataacccaaaattcccggatatacgttctgaaggcgtgattcgaacccaagccctgggtgaattaccgagtttcctactctcgtcctcaaaaatcccaccataccattggtcatatagccatgattcaaaatacgtcaacaaaagcgcattcctcaccaatgagttttgttgggatggtgagatctcatgtttgggtgagcttcttaaagatgcagatcacccactttggaatactttgaaaaagttaggttgttctcaaaaaacttgcaaagcaatggcaaaacaactagctgatattactctcacgactatcaatgtcacactcgcaccaaattacctgactcaaatatctctccccgatagtgatacatcctacatttcactctctcctgttgcatcgctatcgatgcaaagccactttcatcagaggctccaagatgaaaatcggcatagcgcgataacgcggtttagccgaactaccaacatgggggtcactgcgatgacatgtggcggcgcatttagaatgttaaagtctggcgctaagttttccagcccccctcatcaccgattaaacagtaaacgaagttggttgacgtcagagcatgttcagtcattaaaacagtaccagcgcctcaacaaaagcctcatacctgaaaactctcggattgcactccgtagaaaatacaaaatcgagcttcaaaatatggtcagatcttggtttgcaatgcaagaccatacccttgattcgaacatacttatccaacatttgaatcatgacctatcttacttaggagccacaaaacgttttgcatacgatccagcgatgaccaagctctttactgagcttttgaaacgagagttatcaaattcaatcaataatggtgagcaacacactaatggatcgtttttagtcctaccgaatatcagggtttgtggcgcaacagctttaagctccccggtaacggtggggattccatcacttacagctttctttggcttcgttcacgcatttgaacggaatataaatcgcaccacctcatcgtttcgtgttgaatcctttgcgatatgcgtccatcaactacatgtcgagaagcgaggtttgacagcagagtttgtggaaaaaggcgacgggactatatccgctcccgcgacccgggatgactggcagtgtgatgtcgtatttagccttattttgaacaccaactttgctcaacatattgaccaagatacgttagttacatcactaccaaagcgattggctcggggttcagcaaaaattgcgattgatgactttaaacatatcaactcattctcgacattagaaacagcgatcgaatctctgccaatagaagctggtaggtggttatcactttacgcacagtcaaacaataatctaagtgatctattagcagccatgacagaggaccatcagctcatggcaagctgcgtcggttaccacttgttagaagagcccaaagataaaccaaactccctcagaggttacaaacacgctatcgccgagtgcatcattggactcattaactcaatcacctttagctcagagactgatcccaacacaatcttttggtcgctaaagaactatcaaaactacctagtggtacagccaaggagtatcaacgatgaaactaccgacaaatctagcctatgagcgctctatcgacccatcagatgtctgtttttttgtcgtctggcccgatgatagaaaaacacctttaacctacaattctcgtactctgctcgggcaaatggaagcggcatcattagcctatgatgtctcaggtcaaccaataaaaagtgccaccgctgaggcgttagctcaagggaaccctcatcaagttgatttctgccacgttccatacggtgcgagtcatattgaatgcagtttctccgtctcgttttcttctgaactacgtcaaccatataagtgtaactcaagcaaagttaaacaaacgctagtgcaattagtcgagctctacgaaacgaaaatcggctggactgagctagcaacccgatatttgatgaacatttgcaacggtaaatggctgtggaaaaatacccgtaaagcctattgctggaacattgtacttacaccttggccttggaacggggaaaaggttggatttgaagatattcgtactaactacacctcacggcaagactttaaaaataataaaaattggtctgctatagttgaaatgatcaaaaccgcattttctagtactgatgggctggcgatatttgaagtcagggccaccttgcacttgccaacgaatgctatggtgcggccaagccaagttttcacagaaaaagaaagtggcagtaaaagtaaatctaaaactcaaaacagtcgagtttttcagagtacaactattgatggtgaacgatcgccaatactaggggcctttaaaacgggagcagctattgcaaccattgacgactggtatcctgaagccactgagccactaagggtcggacggtttggggttcatcgcgaagatgtcacttgctaccgtcatccgtctaccggaaaagattttttctcgatattacaacaagcagagcactatattgaagtgttgagcgccaacaaaactcccgctcaagaaactatcaacgacatgcactttttaatggctaacctgattaagggtgggatgttccagcataaaggagactgactgtgaaatggtattataagacaatcacctttctgccagagttgtgcaacaacgagtcactggctgcaaagtgtctccgcgttctgcatggatttaactatcagtatgagacacgaaatatcggcgtttcatttccgctttggtgtgatgcaacggttggaaaaaagatttcatttgtcagcaagaacaagatagaactcgacttactacttaaacaacactatttcgtccaaatggaacaacttcaatactttcatatatccaacactgttctcgtcccagaagattgtacatacgtttcctttagacgctgtcaatctatagataagctcacagcagcagggctggcaaggaaaatcagacgcctggagaaacgtgctctatctagaggcgagcaatttgacccatcatcttttgctcaaaaagagcatactgcaatagcgcactaccactcacttggggagtccagcaaacagacgaaccgcaactttcgactcaatatcaggatgctctcggagcaaccccgtgaggggaactcgatttttagtagctatggcttatcaaattcagaaaactcgtttcagcctgtacccttaatctgacctaggctgctgccaccgctgagcaataactagcataaccccttggggcctctaaacgggtcttgaggggttttttgctgaaacctcaggcatttgagaagcacacggtcacactgcttccggtagtcaataaaccggtaaaccagcaatagacataagcggctatttaacgaccctgccctgaaccgacgaccgggtcatcgtggccggatcttgcggcccctcggcttgaacgaattgttagacattatttgccgactaccttggtgatctcgcctttcacgtagtggacaaattcttccaactgatctgcgcgcgaggccaagcgatcttcttcttgtccaagataagcctgtctagcttcaagtatgacgggctgatactgggccggcaggcgctccattgcccagtcggcagcgacatccttcggcgcgattttgccggttactgcgctgtaccaaatgcgggacaacgtaagcactacatttcgctcatcgccagcccagtcgggcggcgagttccatagcgttaaggtttcatttagcgcctcaaatagatcctgttcaggaaccggatcaaagagttcctccgccgctggacctaccaaggcaacgctatgttctcttgcttttgtcagcaagatagccagatcaatgtcgatcgtggctggctcgaagatacctgcaagaatgtcattgcgctgccattctccaaattgcagttcgcgcttagctggataacgccacggaatgatgtcgtcgtgcacaacaatggtgacttctacagcgcggagaatctcgctctctccaggggaagccgaagtttccaaaaggtcgttgatcaaagctcgccgcgttgtttcatcaagccttacggtcaccgtaaccagcaaatcaatatcactgtgtggcttcaggccgccatccactgcggagccgtacaaatgtacggccagcaacgtcggttcgagatggcgctcgatgacgccaactacctctgatagttgagtcgatacttcggcgatcaccgcttccctcatactcttcctttttcaatattattgaagcatttatcagggttattgtctcatgagcggatacatatttgaatgtatttagaaaaataaacaaatagctagctcactcggtcgctacgctccgggcgtgagactgcggcgggcgctgcggacacatacaaagttacccacagattccgtggataagcaggggactaacatgtgaggcaaaacagcagggccgcgccggtggcgtttttccataggctccgccctcctgccagagttcacataaacagacgcttttccggtgcatctgtgggagccgtgaggctcaaccatgaatctgacagtacgggcgaaacccgacaggacttaaagatccccaccgtttccggcgggtcgctccctcttgcgctctcctgttccgaccctgccgtttaccggatacctgttccgcctttctcccttacgggaagtgtggcgctttctcatagctcacacactggtatctcggctcggtgtaggtcgttcgctccaagctgggctgtaagcaagaactccccgttcagcccgactgctgcgccttatccggtaactgttcacttgagtccaacccggaaaagcacggtaaaacgccactggcagcagccattggtaactgggagttcgcagaggatttgtttagctaaacacgcggttgctcttgaagtgtgcgccaaagtccggctacactggaaggacagatttggttgctgtgctctgcgaaagccagttaccacggttaagcagttccccaactgacttaaccttcgatcaaaccacctccccaggtggttttttcgtttacagggcaaaagattacgcgcagaaaaaaaggatctcaagaagatcctttgatcttttctactgaaccgctctagatttcagtgcaatttatctcttcaaatgtagcacctgaagtcagccccatacgatataagttgtaattctcatgttagtcatgccccgcgcccaccggaaggagctgactgggttgaaggctctcaagggcatcggtcgagatcccggtgcctaatgagtgagctaacttacattaattgcgttgcgctcactgcccgctttccagtcgggaaacctgtcgtgccagctgcattaatgaatcggccaacgcgcggggagaggcggtttgcgtattgggcgccagggtggtttttcttttcaccagtgagacgggcaacagctgattgcccttcaccgcctggccctgagagagttgcagcaagcggtccacgctggtttgccccagcaggcgaaaatcctgtttgatggtggttaacggcgggatataacatgagctgtcttcggtatcgtcgtatcccactaccgagatgtccgcaccaacgcgcagcccggactcggtaatggcgcgcattgcgcccagcgccatctgatcgttggcaaccagcatcgcagtgggaacgatgccctcattcagcatttgcatggtttgttgaaaaccggacatggcactccagtcgccttcccgttccgctatcggctgaatttgattgcgagtgagatatttatgccagccagccagacgcagacgcgccgagacagaacttaatgggcccgctaacagcgcgatttgctggtgacccaatgcgaccagatgctccacgcccagtcgcgtaccgtcttcatgggagaaaataatactgttgatgggtgtctggtcagagacatcaagaaataacgccggaacattagtgcaggcagcttccacagcaatggcatcctggtcatccagcggatagttaatgatcagcccactgacgcgttgcgcgagaagattgtgcaccgccgctttacaggcttcgacgccgcttcgttctaccatcgacaccaccacgctggcacccagttgatcggcgcgagatttaatcgccgcgacaatttgcgacggcgcgtgcagggccagactggaggtggcaacgccaatcagcaacgactgtttgcccgccagttgttgtgccacgcggttgggaatgtaattcagctccgccatcgccgcttccactttttcccgcgttttcgcagaaacgtggctggcctggttcaccacgcgggaaacggtctgataagagacaccggcatactctgcgacatcgtataacgttactggtttcac

SEQ ID NO: 100 - DNA, 8445 bp, Synthetic construct
  source 1..8445: mol_type = other DNA
attcaccaccctgaattgactctcttccgggcgctatcatgccataccgcgaaaggttttgcgccattcgatggtgtccgggatctcgacgctctcccttatgcgactcctgcattaggaaattaatacgactcactataggggaattgtgagcggataacaattcccctgtagaaataattttgtttaactttaataaggagatataccatgggtgaactgccgagtaggtagctgataactcatcagcgcggctgaaatcatcattaaagcggtgaactgccgagtaggtagctgataacggatccgaattcgagctcggcgcgcctgcaggtcgacaagcttgcggccgcataatgcttaagtcgaacagaaagtaatcgtattgtacacggccgcataatcgaaattaatacgactcactataggggaattgtgagcggataacaattccccatcttagtatattagttaagtataagaaggagatatacatatgtttttgcaaagacctaaaccttacagcgatgaaagtttagaaagtttctttatccgagtggctaacaaaaatggctacggtgatgtccatcgcttcctagaagccactaaacgattccttcaagacattgaccataatggctatcaaacctttccgactgatataactcggataaacccatactcagctaaaaacagttccagcgcacgaactgcgtcattcctgaaacttgcacaattgacatttaatgaaccgccagagctacttgggttggcaattaacagaacaaacatgaaatactcgccgtcaactagcgcggttgttagaggtgcagaagtctttcctcgcagtttactacggacgcactccatcccctgctgtcctttgtgtctgcgagaaaatggctacgcctcctacctttggcactttcaggggtacgaatactgccacagccataacgtacctttaattaccacttgtagctgtggtaaggagtttgactaccgagtatctgggttaaagggcatttgctgcaaatgcaaggagcctatcaccttaaccagcagggagaacggtcatgaggcagcgtgtactgtttcaaactggcttgctggccatgaatctaaacctctgccaaatcttcctaaaagctaccgatggggtttagttcattggtggatgggtattaaagatagcgagttcgatcacttttcgttcgttcaatttttctcaaactggccaaggtcattccactcgataatcgaagatgaagtagagttcaaccttgagcatgctgttgtcagcacgtctgaattacgactaaaagatcttcttggtcgattgtttttcggttcaattcggttacctgagcggaatcttcaacacaatatcatccttggtgagcttctctgctatttagaaaatcgtttatggcaagacaagggattaatcgccaacctcaaaatgaacgcgttagaggcgactgtaatgttaaattgtagcctcgatcagattgcatcaatggttgaacaacgcatcttgaagccaaatcgaaaaagcaagcccaacagccctcttgatgttaccgattatctatttcatttcggcgatattttctgtctttggttagctgagttccaaagcgatgagtttaaccgttcgttttatgtgtcgaggtggtaaatgcaaactctgaaagaactaatcgcatccaatcctgacgacttaacaactgaacttaagagagcatttcgtccactcacaccgcatattgcaattgatggtaatgaacttgacgcactgacgatattagtcaatttaaccgataagactgatgatcagaaagacctgctcgatcgagccaaatgcaagcaaaaacttcgagatgaaaaatggtgggctagctgcataaattgcgttaattacagacaaagccataacccaaaattcccggatatacgttctgaaggcgtgattcgaacccaagccctgggtgaattaccgagtttcctactctcgtcctcaaaaatcccaccataccattggtcatatagccatgattcaaaatacgtcaacaaaagcgcattcctcaccaatgagttttgttgggatggtgagatctcatgtttgggtgagcttcttaaagatgcagatcacccactttggaatactttgaaaaagttaggttgttctcaaaaaacttgcaaagcaatggcaaaacaactagctgatattactctcacgactatcaatgtcacactcgcaccaaattacctgactcaaatatctctccccgatagtgatacatcctacatttcactctctcctgttgcatcgctatcgatgcaaagccactttcatcagaggctccaagatgaaaatcggcatagcgcgataacgcggtttagccgaactaccaacatgggggtcactgcgatgacatgtggcggcgcatttagaatgttaaagtctggcgctaagttttccagcccccctcatcaccgattaaacagtaaacgaagttggttgacgtcagagcatgttcagtcattaaaacagtaccagcgcctcaacaaaagcctcatacctgaaaactctcggattgcactccgtagaaaatacaaaatcgagcttcaaaatatggtcagatcttggtttgcaatgcaagaccatacccttgattcgaacatacttatccaacatttgaatcatgacctatcttacttaggagccacaaaacgttttgcatacgatccagcgatgaccaagctctttactgagcttttgaaacgagagttatcaaattcaatcaataatggtgagcaacacactaatggatcgtttttagtcctaccgaatatcagggtttgtggcgcaacagctttaagctccccggtaacggtggggattccatcacttacagctttctttggcttcgttcacgcatttgaacggaatataaatcgcaccacctcatcgtttcgtgttgaatcctttgcgatatgcgtccatcaactacatgtcgagaagcgaggtttgacagcagagtttgtggaaaaaggcgacgggactatatccgctcccgcgacccgggatgactggcagtgtgatgtcgtatttagccttattttgaacaccaactttgctcaacatattgaccaagatacgttagttacatcactaccaaagcgattggctcggggttcagcaaaaattgcgattgatgactttaaacatatcaactcattctcgacattagaaacagcgatcgaatctctgccaatagaagctggtaggtggttatcactttacgcacagtcaaacaataatctaagtgatctattagcagccatgacagaggaccatcagctcatggcaagctgcgtcggttaccacttgttagaagagcccaaagataaaccaaactccctcagaggttacaaacacgctatcgccgagtgcatcattggactcattaactcaatcacctttagctcagagactgatcccaacacaatcttttggtcgctaaagaactatcaaaactacctagtggtacagccaaggagtatcaacgatgaaactaccgacaaatctagcctatgagcgctctatcgacccatcagatgtctgtttttttgtcgtctggcccgatgatagaaaaacacctttaacctacaattctcgtactctgctcgggcaaatggaagcggcatcattagcctatgatgtctcaggtcaaccaataaaaagtgccaccgctgaggcgttagctcaagggaaccctcatcaagttgatttctgccacgttccatacggtgcgagtcatattgaatgcagtttctccgtctcgttttcttctgaactacgtcaaccatataagtgtaactcaagcaaagttaaacaaacgctagtgcaattagtcgagctctacgaaacgaaaatcggctggactgagctagcaacccgatatttgatgaacatttgcaacggtaaatggctgtggaaaaatacccgtaaagcctattgctggaacattgtacttacaccttggccttggaacggggaaaaggttggatttgaagatattcgtactaactacacctcacggcaagactttaaaaataataaaaattggtctgctatagttgaaatgatcaaaaccgcattttctagtactgatgggctggcgatatttgaagtcagggccaccttgcacttgccaacgaatgctatggtgcggccaagccaagttttcacagaaaaagaaagtggcagtaaaagtaaatctaaaactcaaaacagtcgagtttttcagagtacaactattgatggtgaacgatcgccaatactaggggcctttaaaacgggagcagctattgcaaccattgacgactggtatcctgaagccactgagccactaagggtcggacggtttggggttcatcgcgaagatgtcacttgctaccgtcatccgtctaccggaaaagattttttctcgatattacaacaagcagagcactatattgaagtgttgagcgccaacaaaactcccgctcaagaaactatcaacgacatgcactttttaatggctaacctgattaagggtgggatgttccagcataaaggagactgactgtgaaatggtattataagacaatcacctttctgccagagttgtgcaacaacgagtcactggctgcaaagtgtctccgcgttctgcatggatttaactatcagtatgagacacgaaatatcggcgtttcatttccgctttggtgtgatgcaacggttggaaaaaagatttcatttgtcagcaagaacaagatagaactcgacttactacttaaacaacactatttcgtccaaatggaacaacttcaatactttcatatatccaacactgttctcgtcccagaagattgtacatacgtttcctttagacgctgtcaatctatagataagctcacagcagcagggctggcaaggaaaatcagacgcctggagaaacgtgctctatctagaggcgagcaatttgacccatcatcttttgctcaaaaagagcatactgcaatagcgcactaccactcacttggggagtccagcaaacagacgaaccgcaactttcgactcaatatcaggatgctctcggagcaaccccgtgaggggaactcgatttttagtagctatggcttatcaaattcagaaaactcgtttcagcctgtacccttaatctgacctaggctgctgccaccgctgagcaataactagcataaccccttggggcctctaaacgggtcttgaggggttttttgctgaaacctcaggcatttgagaagcacacggtcacactgcttccggtagtcaataaaccggtaaaccagcaatagacataagcggctatttaacgaccctgccctgaaccgacgaccgggtcatcgtggccggatcttgcggcccctcggcttgaacgaattgttagacattatttgccgactaccttggtgatctcgcctttcacgtagtggacaaattcttccaactgatctgcgcgcgaggccaagcgatcttcttcttgtccaagataagcctgtctagcttcaagtatgacgggctgatactgggccggcaggcgctccattgcccagtcggcagcgacatccttcggcgcgattttgccggttactgcgctgtaccaaatgcgggacaacgtaagcactacatttcgctcatcgccagcccagtcgggcggcgagttccatagcgttaaggtttcatttagcgcctcaaatagatcctgttcaggaaccggatcaaagagttcctccgccgctggacctaccaaggcaacgctatgttctcttgcttttgtcagcaagatagccagatcaatgtcgatcgtggctggctcgaagatacctgcaagaatgtcattgcgctgccattctccaaattgcagttcgcgcttagctggataacgccacggaatgatgtcgtcgtgcacaacaatggtgacttctacagcgcggagaatctcgctctctccaggggaagccgaagtttccaaaaggtcgttgatcaaagctcgccgcgttgtttcatcaagccttacggtcaccgtaaccagcaaatcaatatcactgtgtggcttcaggccgccatccactgcggagccgtacaaatgtacggccagcaacgtcggttcgagatggcgctcgatgacgccaactacctctgatagttgagtcgatacttcggcgatcaccgcttccctcatactcttcctttttcaatattattgaagcatttatcagggttattgtctcatgagcggatacatatttgaatgtatttagaaaaataaacaaatagctagctcactcggtcgctacgctccgggcgtgagactgcggcgggcgctgcggacacatacaaagttacccacagattccgtggataagcaggggactaacatgtgaggcaaaacagcagggccgcgccggtggcgtttttccataggctccgccctcctgccagagttcacataaacagacgcttttccggtgcatctgtgggagccgtgaggctcaaccatgaatctgacagtacgggcgaaacccgacaggacttaaagatccccaccgtttccggcgggtcgctccctcttgcgctctcctgttccgaccctgccgtttaccggatacctgttccgcctttctcccttacgggaagtgtggcgctttctcatagctcacacactggtatctcggctcggtgtaggtcgttcgctccaagctgggctgtaagcaagaactccccgttcagcccgactgctgcgccttatccggtaactgttcacttgagtccaacccggaaaagcacggtaaaacgccactggcagcagccattggtaactgggagttcgcagaggatttgtttagctaaacacgcggttgctcttgaagtgtgcgccaaagtccggctacactggaaggacagatttggttgctgtgctctgcgaaagccagttaccacggttaagcagttccccaactgacttaaccttcgatcaaaccacctccccaggtggttttttcgtttacagggcaaaagattacgcgcagaaaaaaaggatctcaagaagatcctttgatcttttctactgaaccgctctagatttcagtgcaatttatctcttcaaatgtagcacctgaagtcagccccatacgatataagttgtaattctcatgttagtcatgccccgcgcccaccggaaggagctgactgggttgaaggctctcaagggcatcggtcgagatcccggtgcctaatgagtgagctaacttacattaattgcgttgcgctcactgcccgctttccagtcgggaaacctgtcgtgccagctgcattaatgaatcggccaacgcgcggggagaggcggtttgcgtattgggcgccagggtggtttttcttttcaccagtgagacgggcaacagctgattgcccttcaccgcctggccctgagagagttgcagcaagcggtccacgctggtttgccccagcaggcgaaaatcctgtttgatggtggttaacggcgggatataacatgagctgtcttcggtatcgtcgtatcccactaccgagatgtccgcaccaacgcgcagcccggactcggtaatggcgcgcattgcgcccagcgccatctgatcgttggcaaccagcatcgcagtgggaacgatgccctcattcagcatttgcatggtttgttgaaaaccggacatggcactccagtcgccttcccgttccgctatcggctgaatttgattgcgagtgagatatttatgccagccagccagacgcagacgcgccgagacagaacttaatgggcccgctaacagcgcgatttgctggtgacccaatgcgaccagatgctccacgcccagtcgcgtaccgtcttcatgggagaaaataatactgttgatgggtgtctggtcagagacatcaagaaataacgccggaacattagtgcaggcagcttccacagcaatggcatcctggtcatccagcggatagttaatgatcagcccactgacgcgttgcgcgagaagattgtgcaccgccgctttacaggcttcgacgccgcttcgttctaccatcgacaccaccacgctggcacccagttgatcggcgcgagatttaatcgccgcgacaatttgcgacggcgcgtgcagggccagactggaggtggcaacgccaatcagcaacgactgtttgcccgccagttgttgtgccacgcggttgggaatgtaattcagctccgccatcgccgcttccactttttcccgcgttttcgcagaaacgtggctggcctggttcaccacgcgggaaacggtctgataagagacaccggcatactctgcgacatcgtataacgttactggtttcac

SEQ ID NO: 101 - DNA, 8445 bp, Synthetic construct
  source 1..8445: mol_type = other DNA
attcaccaccctgaattgactctcttccgggcgctatcatgccataccgcgaaaggttttgcgccattcgatggtgtccgggatctcgacgctctcccttatgcgactcctgcattaggaaattaatacgactcactataggggaattgtgagcggataacaattcccctgtagaaataattttgtttaactttaataaggagatataccatgggtgaactgccgagtaggtagctgataacagtagtcggcggctgaaatcatcattaaagcggtgaactgccgagtaggtagctgataacggatccgaattcgagctcggcgcgcctgcaggtcgacaagcttgcggccgcataatgcttaagtcgaacagaaagtaatcgtattgtacacggccgcataatcgaaattaatacgactcactataggggaattgtgagcggataacaattccccatcttagtatattagttaagtataagaaggagatatacatatgtttttgcaaagacctaaaccttacagcgatgaaagtttagaaagtttctttatccgagtggctaacaaaaatggctacggtgatgtccatcgcttcctagaagccactaaacgattccttcaagacattgaccataatggctatcaaacctttccgactgatataactcggataaacccatactcagctaaaaacagttccagcgcacgaactgcgtcattcctgaaacttgcacaattgacatttaatgaaccgccagagctacttgggttggcaattaacagaacaaacatgaaatactcgccgtcaactagcgcggttgttagaggtgcagaagtctttcctcgcagtttactacggacgcactccatcccctgctgtcctttgtgtctgcgagaaaatggctacgcctcctacctttggcactttcaggggtacgaatactgccacagccataacgtacctttaattaccacttgtagctgtggtaaggagtttgactaccgagtatctgggttaaagggcatttgctgcaaatgcaaggagcctatcaccttaaccagcagggagaacggtcatgaggcagcgtgtactgtttcaaactggcttgctggccatgaatctaaacctctgccaaatcttcctaaaagctaccgatggggtttagttcattggtggatgggtattaaagatagcgagttcgatcacttttcgttcgttcaatttttctcaaactggccaaggtcattccactcgataatcgaagatgaagtagagttcaaccttgagcatgctgttgtcagcacgtctgaattacgactaaaagatcttcttggtcgattgtttttcggttcaattcggttacctgagcggaatcttcaacacaatatcatccttggtgagcttctctgctatttagaaaatcgtttatggcaagacaagggattaatcgccaacctcaaaatgaacgcgttagaggcgactgtaatgttaaattgtagcctcgatcagattgcatcaatggttgaacaacgcatcttgaagccaaatcgaaaaagcaagcccaacagccctcttgatgttaccgattatctatttcatttcggcgatattttctgtctttggttagctgagttccaaagcgatgagtttaaccgttcgttttatgtgtcgaggtggtaaatgcaaactctgaaagaactaatcgcatccaatcctgacgacttaacaactgaacttaagagagcatttcgtccactcacaccgcatattgcaattgatggtaatgaacttgacgcactgacgatattagtcaatttaaccgataagactgatgatcagaaagacctgctcgatcgagccaaatgcaagcaaaaacttcgagatgaaaaatggtgggctagctgcataaattgcgttaattacagacaaagccataacccaaaattcccggatatacgttctgaaggcgtgattcgaacccaagccctgggtgaattaccgagtttcctactctcgtcctcaaaaatcccaccataccattggtcatatagccatgattcaaaatacgtcaacaaaagcgcattcctcaccaatgagttttgttgggatggtgagatctcatgtttgggtgagcttcttaaagatgcagatcacccactttggaatactttgaaaaagttaggttgttctcaaaaaacttgcaaagcaatggcaaaacaactagctgatattactctcacgactatcaatgtcacactcgcaccaaattacctgactcaaatatctctccccgatagtgatacatcctacatttcactctctcctgttgcatcgctatcgatgcaaagccactttcatcagaggctccaagatgaaaatcggcatagcgcgataacgcggtttagccgaactaccaacatgggggtcactgcgatgacatgtggcggcgcatttagaatgttaaagtctggcgctaagttttccagcccccctcatcaccgattaaacagtaaacgaagttggttgacgtcagagcatgttcagtcattaaaacagtaccagcgcctcaacaaaagcctcatacctgaaaactctcggattgcactccgtagaaaatacaaaatcgagcttcaaaatatggtcagatcttggtttgcaatgcaagaccatacccttgattcgaacatacttatccaacatttgaatcatgacctatcttacttaggagccacaaaacgttttgcatacgatccagcgatgaccaagctctttactgagcttttgaaacgagagttatcaaattcaatcaataatggtgagcaacacactaatggatcgtttttagtcctaccgaatatcagggtttgtggcgcaacagctttaagctccccggtaacggtggggattccatcacttacagctttctttggcttcgttcacgcatttgaacggaatataaatcgcaccacctcatcgtttcgtgttgaatcctttgcgatatgcgtccatcaactacatgtcgagaagcgaggtttgacagcagagtttgtggaaaaaggcgacgggactatatccgctcccgcgacccgggatgactggcagtgtgatgtcgtatttagccttattttgaacaccaactttgctcaacatattgaccaagatacgttagttacatcactaccaaagcgattggctcggggttcagcaaaaattgcgattgatgactttaaacatatcaactcattctcgacattagaaacagcgatcgaatctctgccaatagaagctggtaggtggttatcactttacgcacagtcaaacaataatctaagtgatctattagcagccatgacagaggaccatcagctcatggcaagctgcgtcggttaccacttgttagaagagcccaaagataaaccaaactccctcagaggttacaaacacgctatcgccgagtgcatcattggactcattaactcaatcacctttagctcagagactgatcccaacacaatcttttggtcgctaaagaactatcaaaactacctagtggtacagccaaggagtatcaacgatgaaactaccgacaaatctagcctatgagcgctctatcgacccatcagatgtctgtttttttgtcgtctggcccgatgatagaaaaacacctttaacctacaattctcgtactctgctcgggcaaatggaagcggcatcattagcctatgatgtctcaggtcaaccaataaaaagtgccaccgctgaggcgttagctcaagggaaccctcatcaagttgatttctgccacgttccatacggtgcgagtcatattgaatgcagtttctccgtctcgttttcttctgaactacgtcaaccatataagtgtaactcaagcaaagttaaacaaacgctagtgcaattagtcgagctctacgaaacgaaaatcggctggactgagctagcaacccgatatttgatgaacatttgcaacggtaaatggctgtggaaaaatacccgtaaagcctattgctggaacattgtacttacaccttggccttggaacggggaaaaggttggatttgaagatattcgtactaactacacctcacggcaagactttaaaaataataaaaattggtctgctatagttgaaatgatcaaaaccgcattttctagtactgatgggctggcgatatttgaagtcagggccaccttgcacttgccaacgaatgctatggtgcggccaagccaagttttcacagaaaaagaaagtggcagtaaaagtaaatctaaaactcaaaacagtcgagtttttcagagtacaactattgatggtgaacgatcgccaatactaggggcctttaaaacgggagcagctattgcaaccattgacgactggtatcctgaagccactgagccactaagggtcggacggtttggggttcatcgcgaagatgtcacttgctaccgtcatccgtctaccggaaaagattttttctcgatattacaacaagcagagcactatattgaagtgttgagcgccaacaaaactcccgctcaagaaactatcaacgacatgcactttttaatggctaacctgattaagggtgggatgttccagcataaaggagactgactgtgaaatggtattataagacaatcacctttctgccagagttgtgcaacaacgagtcactggctgcaaagtgtctccgcgttctgcatggatttaactatcagtatgagacacgaaatatcggcgtttcatttccgctttggtgtgatgcaacggttggaaaaaagatttcatttgtcagcaagaacaagatagaactcgacttactacttaaacaacactatttcgtccaaatggaacaacttcaatactttcatatatccaacactgttctcgtcccagaagattgtacatacgtttcctttagacgctgtcaatctatagataagctcacagcagcagggctggcaaggaaaatcagacgcctggagaaacgtgctctatctagaggcgagcaatttgacccatcatcttttgctcaaaaagagcatactgcaatagcgcactaccactcacttggggagtccagcaaacagacgaaccgcaactttcgactcaatatcaggatgctctcggagcaaccccgtgaggggaactcgatttttagtagctatggcttatcaaattcagaaaactcgtttcagcctgtacccttaatctgacctaggctgctgccaccgctgagcaataactagcataaccccttggggcctctaaacgggtcttgaggggttttttgctgaaacctcaggcatttgagaagcacacggtcacactgcttccggtagtcaataaaccggtaaaccagcaatagacataagcggctatttaacgaccctgccctgaaccgacgaccgggtcatcgtggccggatcttgcggcccctcggcttgaacgaattgttagacattatttgccgactaccttggtgatctcgcctttcacgtagtggacaaattcttccaactgatctgcgcgcgaggccaagcgatcttcttcttgtccaagataagcctgtctagcttcaagtatgacgggctgatactgggccggcaggcgctccattgcccagtcggcagcgacatccttcggcgcgattttgccggttactgcgctgtaccaaatgcgggacaacgtaagcactacatttcgctcatcgccagcccagtcgggcggcgagttccatagcgttaaggtttcatttagcgcctcaaatagatcctgttcaggaaccggatcaaagagttcctccgccgctggacctaccaaggcaacgctatgttctcttgcttttgtcagcaagatagccagatcaatgtcgatcgtggctggctcgaagatacctgcaagaatgtcattgcgctgccattctccaaattgcagttcgcgcttagctggataacgccacggaatgatgtcgtcgtgcacaacaatggtgacttctacagcgcggagaatctcgctctctccaggggaagccgaagtttccaaaaggtcgttgatcaaagctcgccgcgttgtttcatcaagccttacggtcaccgtaaccagcaaatcaatatcactgtgtggcttcaggccgccatccactgcggagccgtacaaatgtacggccagcaacgtcggttcgagatggcgctcgatgacgccaactacctctgatagttgagtcgatacttcggcgatcaccgcttccctcatactcttcctttttcaatattattgaagcatttatcagggttattgtctcatgagcggatacatatttgaatgtatttagaaaaataaacaaatagctagctcactcggtcgctacgctccgggcgtgagactgcggcgggcgctgcggacacatacaaagttacccacagattccgtggataagcaggggactaacatgtgaggcaaaacagcagggccgcgccggtggcgtttttccataggctccgccctcctgccagagttcacataaacagacgcttttccggtgcatctgtgggagccgtgaggctcaaccatgaatctgacagtacgggcgaaacccgacaggacttaaagatccccaccgtttccggcgggtcgctccctcttgcgctctcctgttccgaccctgccgtttaccggatacctgttccgcctttctcccttacgggaagtgtggcgctttctcatagctcacacactggtatctcggctcggtgtaggtcgttcgctccaagctgggctgtaagcaagaactccccgttcagcccgactgctgcgccttatccggtaactgttcacttgagtccaacccggaaaagcacggtaaaacgccactggcagcagccattggtaactgggagttcgcagaggatttgtttagctaaacacgcggttgctcttgaagtgtgcgccaaagtccggctacactggaaggacagatttggttgctgtgctctgcgaaagccagttaccacggttaagcagttccccaactgacttaaccttcgatcaaaccacctccccaggtggttttttcgtttacagggcaaaagattacgcgcagaaaaaaaggatctcaagaagatcctttgatcttttctactgaaccgctctagatttcagtgcaatttatctcttcaaatgtagcacctgaagtcagccccatacgatataagttgtaattctcatgttagtcatgccccgcgcccaccggaaggagctgactgggttgaaggctctcaagggcatcggtcgagatcccggtgcctaatgagtgagctaacttacattaattgcgttgcgctcactgcccgctttccagtcgggaaacctgtcgtgccagctgcattaatgaatcggccaacgcgcggggagaggcggtttgcgtattgggcgccagggtggtttttcttttcaccagtgagacgggcaacagctgattgcccttcaccgcctggccctgagagagttgcagcaagcggtccacgctggtttgccccagcaggcgaaaatcctgtttgatggtggttaacggcgggatataacatgagctgtcttcggtatcgtcgtatcccactaccgagatgtccgcaccaacgcgcagcccggactcggtaatggcgcgcattgcgcccagcgccatctgatcgttggcaaccagcatcgcagtgggaacgatgccctcattcagcatttgcatggtttgttgaaaaccggacatggcactccagtcgccttcccgttccgctatcggctgaatttgattgcgagtgagatatttatgccagccagccagacgcagacgcgccgagacagaacttaatgggcccgctaacagcgcgatttgctggtgacccaatgcgaccagatgctccacgcccagtcgcgtaccgtcttcatgggagaaaataatactgttgatgggtgtctggtcagagacatcaagaaataacgccggaacattagtgcaggcagcttccacagcaatggcatcctggtcatccagcggatagttaatgatcagcccactgacgcgttgcgcgagaagattgtgcaccgccgctttacaggcttcgacgccgcttcgttctaccatcgacaccaccacgctggcacccagttgatcggcgcgagatttaatcgccgcgacaatttgcgacggcgcgtgcagggccagactggaggtggcaacgccaatcagcaacgactgtttgcccgccagttgttgtgccacgcggttgggaatgtaattcagctccgccatcgccgcttccactttttcccgcgttttcgcagaaacgtggctggcctggttcaccacgcgggaaacggtctgataagagacaccggcatactctgcgacatcgtataacgttactggtttcac

SEQ ID NO: 102 - DNA, 8445 bp, Synthetic construct
  source 1..8445: mol_type = other DNA
attcaccaccctgaattgactctcttccgggcgctatcatgccataccgcgaaaggttttgcgccattcgatggtgtccgggatctcgacgctctcccttatgcgactcctgcattaggaaattaatacgactcactataggggaattgtgagcggataacaattcccctgtagaaataattttgtttaactttaataaggagatataccatgggtgaactgccgagtaggtagctgataacagtacagccgccctgaaatcatcattaaagcggtgaactgccgagtaggtagctgataacggatccgaattcgagctcggcgcgcctgcaggtcgacaagcttgcggccgcataatgcttaagtcgaacagaaagtaatcgtattgtacacggccgcataatcgaaattaatacgactcactataggggaattgtgagcggataacaattccccatcttagtatattagttaagtataagaaggagatatacatatgtttttgcaaagacctaaaccttacagcgatgaaagtttagaaagtttctttatccgagtggctaacaaaaatggctacggtgatgtccatcgcttcctagaagccactaaacgattccttcaagacattgaccataatggctatcaaacctttccgactgatataactcggataaacccatactcagctaaaaacagttccagcgcacgaactgcgtcattcctgaaacttgcacaattgacatttaatgaaccgccagagctacttgggttggcaattaacagaacaaacatgaaatactcgccgtcaactagcgcggttgttagaggtgcagaagtctttcctcgcagtttactacggacgcactccatcccctgctgtcctttgtgtctgcgagaaaatggctacgcctcctacctttggcactttcaggggtacgaatactgccacagccataacgtacctttaattaccacttgtagctgtggtaaggagtttgactaccgagtatctgggttaaagggcatttgctgcaaatgcaaggagcctatcaccttaaccagcagggagaacggtcatgaggcagcgtgtactgtttcaaactggcttgctggccatgaatctaaacctctgccaaatcttcctaaaagctaccgatggggtttagttcattggtggatgggtattaaagatagcgagttcgatcacttttcgttcgttcaatttttctcaaactggccaaggtcattccactcgataatcgaagatgaagtagagttcaaccttgagcatgctgttgtcagcacgtctgaattacgactaaaagatcttcttggtcgattgtttttcggttcaattcggttacctgagcggaatcttcaacacaatatcatccttggtgagcttctctgctatttagaaaatcgtttatggcaagacaagggattaatcgccaacctcaaaatgaacgcgttagaggcgactgtaatgttaaattgtagcctcgatcagattgcatcaatggttgaacaacgcatcttgaagccaaatcgaaaaagcaagcccaacagccctcttgatgttaccgattatctatttcatttcggcgatattttctgtctttggttagctgagttccaaagcgatgagtttaaccgttcgttttatgtgtcgaggtggtaaatgcaaactctgaaagaactaatcgcatccaatcctgacgacttaacaactgaacttaagagagcatttcgtccactcacaccgcatattgcaattgatggtaatgaacttgacgcactgacgatattagtcaatttaaccgataagactgatgatcagaaagacctgctcgatcgagccaaatgcaagcaaaaacttcgagatgaaaaatggtgggctagctgcataaattgcgttaattacagacaaagccataacccaaaattcccggatatacgttctgaaggcgtgattcgaacccaagccctgggtgaattaccgagtttcctactctcgtcctcaaaaatcccaccataccattggtcatatagccatgattcaaaatacgtcaacaaaagcgcattcctcaccaatgagttttgttgggatggtgagatctcatgtttgggtgagcttcttaaagatgcagatcacccactttggaatactttgaaaaagttaggttgttctcaaaaaacttgcaaagcaatggcaaaacaactagctgatattactctcacgactatcaatgtcacactcgcaccaaattacctgactcaaatatctctccccgatagtgatacatcctacatttcactctctcctgttgcatcgctatcgatgcaaagccactttcatcagaggctccaagatgaaaatcggcatagcgcgataacgcggtttagccgaactaccaacatgggggtcactgcgatgacatgtggcggcgcatttagaatgttaaagtctggcgctaagttttccagcccccctcatcaccgattaaacagtaaacgaagttggttgacgtcagagcatgttcagtcattaaaacagtaccagcgcctcaacaaaagcctcatacctgaaaactctcggattgcactccgtagaaaatacaaaatcgagcttcaaaatatggtcagatcttggtttgcaatgcaagaccatacccttgattcgaacatacttatccaacatttgaatcatgacctatcttacttaggagccacaaaacgttttgcatacgatccagcgatgaccaagctctttactgagcttttgaaacgagagttatcaaattcaatcaataatggtgagcaacacactaatggatcgtttttagtcctaccgaatatcagggtttgtggcgcaacagctttaagctccccggtaacggtggggattccatcacttacagctttctttggcttcgttcacgcatttgaacggaatataaatcgcaccacctcatcgtttcgtgttgaatcctttgcgatatgcgtccatcaactacatgtcgagaagcgaggtttgacagcagagtttgtggaaaaaggcgacgggactatatccgctcccgcgacccgggatgactggcagtgtgatgtcgtatttagccttattttgaacaccaactttgctcaacatattgaccaagatacgttagttacatcactaccaaagcgattggctcggggttcagcaaaaattgcgattgatgactttaaacatatcaactcattctcgacattagaaacagcgatcgaatctctgccaatagaagctggtaggtggttatcactttacgcacagtcaaacaataatctaagtgatctattagcagccatgacagaggaccatcagctcatggcaagctgcgtcggttaccacttgttagaagagcccaaagataaaccaaactccctcagaggttacaaacacgctatcgccgagtgcatcattggactcattaactcaatcacctttagctcagagactgatcccaacacaatcttttggtcgctaaagaactatcaaaactacctagtggtacagccaaggagtatcaacgatgaaactaccgacaaatctagcctatgagcgctctatcgacccatcagatgtctgtttttttgtcgtctggcccgatgatagaaaaacacctttaacctacaattctcgtactctgctcgggcaaatggaagcggcatcattagcctatgatgtctcaggtcaaccaataaaaagtgccaccgctgaggcgttagctcaagggaaccctcatcaagttgatttctgccacgttccatacggtgcgagtcatattgaatgcagtttctccgtctcgttttcttctgaactacgtcaaccatataagtgtaactcaagcaaagttaaacaaacgctagtgcaattagtcgagctctacgaaacgaaaatcggctggactgagctagcaacccgatatttgatgaacatttgcaacggtaaatggctgtggaaaaatacccgtaaagcctattgctggaacattgtacttacaccttggccttggaacggggaaaaggttggatttgaagatattcgtactaactacacctcacggcaagactttaaaaataataaaaattggtctgctatagttgaaatgatcaaaaccgcattttctagtactgatgggctggcgatatttgaagtcagggccaccttgcacttgccaacgaatgctatggtgcggccaagccaagttttcacagaaaaagaaagtggcagtaaaagtaaatctaaaactcaaaacagtcgagtttttcagagtacaactattgatggtgaacgatcgccaatactaggggcctttaaaacgggagcagctattgcaaccattgacgactggtatcctgaagccactgagccactaagggtcggacggtttggggttcatcgcgaagatgtcacttgctaccgtcatccgtctaccggaaaagattttttctcgatattacaacaagcagagcactatattgaagtgttgagcgccaacaaaactcccgctcaagaaactatcaacgacatgcactttttaatggctaacctgattaagggtgggatgttccagcataaaggagactgactgtgaaatggtattataagacaatcacctttctgccagagttgtgcaacaacgagtcactggctgcaaagtgtctccgcgttctgcatggatttaactatcagtatgagacacgaaatatcggcgtttcatttccgctttggtgtgatgcaacggttggaaaaaagatttcatttgtcagcaagaacaagatagaactcgacttactacttaaacaacactatttcgtccaaatggaacaacttcaatactttcatatatccaacactgttctcgtcccagaagattgtacatacgtttcctttagacgctgtcaatctatagataagctcacagcagcagggctggcaaggaaaatcagacgcctggagaaacgtgctctatctagaggcgagcaatttgacccatcatcttttgctcaaaaagagcatactgcaatagcgcactaccactcacttggggagtccagcaaacagacgaaccgcaactttcgactcaatatcaggatgctctcggagcaaccccgtgaggggaactcgatttttagtagctatggcttatcaaattcagaaaactcgtttcagcctgtacccttaatctgacctaggctgctgccaccgctgagcaataactagcataaccccttggggcctctaaacgggtcttgaggggttttttgctgaaacctcaggcatttgagaagcacacggtcacactgcttccggtagtcaataaaccggtaaaccagcaatagacataagcggctatttaacgaccctgccctgaaccgacgaccgggtcatcgtggccggatcttgcggcccctcggcttgaacgaattgttagacattatttgccgactaccttggtgatctcgcctttcacgtagtggacaaattcttccaactgatctgcgcgcgaggccaagcgatcttcttcttgtccaagataagcctgtctagcttcaagtatgacgggctgatactgggccggcaggcgctccattgcccagtcggcagcgacatccttcggcgcgattttgccggttactgcgctgtaccaaatgcgggacaacgtaagcactacatttcgctcatcgccagcccagtcgggcggcgagttccatagcgttaaggtttcatttagcgcctcaaatagatcctgttcaggaaccggatcaaagagttcctccgccgctggacctaccaaggcaacgctatgttctcttgcttttgtcagcaagatagccagatcaatgtcgatcgtggctggctcgaagatacctgcaagaatgtcattgcgctgccattctccaaattgcagttcgcgcttagctggataacgccacggaatgatgtcgtcgtgcacaacaatggtgacttctacagcgcggagaatctcgctctctccaggggaagccgaagtttccaaaaggtcgttgatcaaagctcgccgcgttgtttcatcaagccttacggtcaccgtaaccagcaaatcaatatcactgtgtggcttcaggccgccatccactgcggagccgtacaaatgtacggccagcaacgtcggttcgagatggcgctcgatgacgccaactacctctgatagttgagtcgatacttcggcgatcaccgcttccctcatactcttcctttttcaatattattgaagcatttatcagggttattgtctcatgagcggatacatatttgaatgtatttagaaaaataaacaaatagctagctcactcggtcgctacgctccgggcgtgagactgcggcgggcgctgcggacacatacaaagttacccacagattccgtggataagcaggggactaacatgtgaggcaaaacagcagggccgcgccggtggcgtttttccataggctccgccctcctgccagagttcacataaacagacgcttttccggtgcatctgtgggagccgtgaggctcaaccatgaatctgacagtacgggcgaaacccgacaggacttaaagatccccaccgtttccggcgggtcgctccctcttgcgctctcctgttccgaccctgccgtttaccggatacctgttccgcctttctcccttacgggaagtgtggcgctttctcatagctcacacactggtatctcggctcggtgtaggtcgttcgctccaagctgggctgtaagcaagaactccccgttcagcccgactgctgcgccttatccggtaactgttcacttgagtccaacccggaaaagcacggtaaaacgccactggcagcagccattggtaactgggagttcgcagaggatttgtttagctaaacacgcggttgctcttgaagtgtgcgccaaagtccggctacactggaaggacagatttggttgctgtgctctgcgaaagccagttaccacggttaagcagttccccaactgacttaaccttcgatcaaaccacctccccaggtggttttttcgtttacagggcaaaagattacgcgcagaaaaaaaggatctcaagaagatcctttgatcttttctactgaaccgctctagatttcagtgcaatttatctcttcaaatgtagcacctgaagtcagccccatacgatataagttgtaattctcatgttagtcatgccccgcgcccaccggaaggagctgactgggttgaaggctctcaagggcatcggtcgagatcccggtgcctaatgagtgagctaacttacattaattgcgttgcgctcactgcccgctttccagtcgggaaacctgtcgtgccagctgcattaatgaatcggccaacgcgcggggagaggcggtttgcgtattgggcgccagggtggtttttcttttcaccagtgagacgggcaacagctgattgcccttcaccgcctggccctgagagagttgcagcaagcggtccacgctggtttgccccagcaggcgaaaatcctgtttgatggtggttaacggcgggatataacatgagctgtcttcggtatcgtcgtatcccactaccgagatgtccgcaccaacgcgcagcccggactcggtaatggcgcgcattgcgcccagcgccatctgatcgttggcaaccagcatcgcagtgggaacgatgccctcattcagcatttgcatggtttgttgaaaaccggacatggcactccagtcgccttcccgttccgctatcggctgaatttgattgcgagtgagatatttatgccagccagccagacgcagacgcgccgagacagaacttaatgggcccgctaacagcgcgatttgctggtgacccaatgcgaccagatgctccacgcccagtcgcgtaccgtcttcatgggagaaaataatactgttgatgggtgtctggtcagagacatcaagaaataacgccggaacattagtgcaggcagcttccacagcaatggcatcctggtcatccagcggatagttaatgatcagcccactgacgcgttgcgcgagaagattgtgcaccgccgctttacaggcttcgacgccgcttcgttctaccatcgacaccaccacgctggcacccagttgatcggcgcgagatttaatcgccgcgacaatttgcgacggcgcgtgcagggccagactggaggtggcaacgccaatcagcaacgactgtttgcccgccagttgttgtgccacgcggttgggaatgtaattcagctccgccatcgccgcttccactttttcccgcgttttcgcagaaacgtggctggcctggttcaccacgcgggaaacggtctgataagagacaccggcatactctgcgacatcgtataacgttactggtttcac

SEQ ID NO: 103 - DNA, 8445 bp, Synthetic construct
  source 1..8445: mol_type = other DNA
attcaccaccctgaattgactctcttccgggcgctatcatgccataccgcgaaaggttttgcgccattcgatggtgtccgggatctcgacgctctcccttatgcgactcctgcattaggaaattaatacgactcactataggggaattgtgagcggataacaattcccctgtagaaataattttgtttaactttaataaggagatataccatgggtgaactgccgagtaggtagctgataacagtacagcgcgggactaatcatcattaaagcggtgaactgccgagtaggtagctgataacggatccgaattcgagctcggcgcgcctgcaggtcgacaagcttgcggccgcataatgcttaagtcgaacagaaagtaatcgtattgtacacggccgcataatcgaaattaatacgactcactataggggaattgtgagcggataacaattccccatcttagtatattagttaagtataagaaggagatatacatatgtttttgcaaagacctaaaccttacagcgatgaaagtttagaaagtttctttatccgagtggctaacaaaaatggctacggtgatgtccatcgcttcctagaagccactaaacgattccttcaagacattgaccataatggctatcaaacctttccgactgatataactcggataaacccatactcagctaaaaacagttccagcgcacgaactgcgtcattcctgaaacttgcacaattgacatttaatgaaccgccagagctacttgggttggcaattaacagaacaaacatgaaatactcgccgtcaactagcgcggttgttagaggtgcagaagtctttcctcgcagtttactacggacgcactccatcccctgctgtcctttgtgtctgcgagaaaatggctacgcctcctacctttggcactttcaggggtacgaatactgccacagccataacgtacctttaattaccacttgtagctgtggtaaggagtttgactaccgagtatctgggttaaagggcatttgctgcaaatgcaaggagcctatcaccttaaccagcagggagaacggtcatgaggcagcgtgtactgtttcaaactggcttgctggccatgaatctaaacctctgccaaatcttcctaaaagctaccgatggggtttagttcattggtggatgggtattaaagatagcgagttcgatcacttttcgttcgttcaatttttctcaaactggccaaggtcattccactcgataatcgaagatgaagtagagttcaaccttgagcatgctgttgtcagcacgtctgaattacgactaaaagatcttcttggtcgattgtttttcggttcaattcggttacctgagcggaatcttcaacacaatatcatccttggtgagcttctctgctatttagaaaatcgtttatggcaagacaagggattaatcgccaacctcaaaatgaacgcgttagaggcgactgtaatgttaaattgtagcctcgatcagattgcatcaatggttgaacaacgcatcttgaagccaaatcgaaaaagcaagcccaacagccctcttgatgttaccgattatctatttcatttcggcgatattttctgtctttggttagctgagttccaaagcgatgagtttaaccgttcgttttatgtgtcgaggtggtaaatgcaaactctgaaagaactaatcgcatccaatcctgacgacttaacaactgaacttaagagagcatttcgtccactcacaccgcatattgcaattgatggtaatgaacttgacgcactgacgatattagtcaatttaaccgataagactgatgatcagaaagacctgctcgatcgagccaaatgcaagcaaaaacttcgagatgaaaaatggtgggctagctgcataaattgcgttaattacagacaaagccataacccaaaattcccggatatacgttctgaaggcgtgattcgaacccaagccctgggtgaattaccgagtttcctactctcgtcctcaaaaatcccaccataccattggtcatatagccatgattcaaaatacgtcaacaaaagcgcattcctcaccaatgagttttgttgggatggtgagatctcatgtttgggtgagcttcttaaagatgcagatcacccactttggaatactttgaaaaagttaggttgttctcaaaaaacttgcaaagcaatggcaaaacaactagctgatattactctcacgactatcaatgtcacactcgcaccaaattacctgactcaaatatctctccccgatagtgatacatcctacatttcactctctcctgttgcatcgctatcgatgcaaagccactttcatcagaggctccaagatgaaaatcggcatagcgcgataacgcggtttagccgaactaccaacatgggggtcactgcgatgacatgtggcggcgcatttagaatgttaaagtctggcgctaagttttccagcccccctcatcaccgattaaacagtaaacgaagttggttgacgtcagagcatgttcagtcattaaaacagtaccagcgcctcaacaaaagcctcatacctgaaaactctcggattgcactccgtagaaaatacaaaatcgagcttcaaaatatggtcagatcttggtttgcaatgcaagaccatacccttgattcgaacatacttatccaacatttgaatcatgacctatcttacttaggagccacaaaacgttttgcatacgatccagcgatgaccaagctctttactgagcttttgaaacgagagttatcaaattcaatcaataatggtgagcaacacactaatggatcgtttttagtcctaccgaatatcagggtttgtggcgcaacagctttaagctccccggtaacggtggggattccatcacttacagctttctttggcttcgttcacgcatttgaacggaatataaatcgcaccacctcatcgtttcgtgttgaatcctttgcgatatgcgtccatcaactacatgtcgagaagcgaggtttgacagcagagtttgtggaaaaaggcgacgggactatatccgctcccgcgacccgggatgactggcagtgtgatgtcgtatttagccttattttgaacaccaactttgctcaacatattgaccaagatacgttagttacatcactaccaaagcgattggctcggggttcagcaaaaattgcgattgatgactttaaacatatcaactcattctcgacattagaaacagcgatcgaatctctgccaatagaagctggtaggtggttatcactttacgcacagtcaaacaataatctaagtgatctattagcagccatgacagaggaccatcagctcatggcaagctgcgtcggttaccacttgttagaagagcccaaagataaaccaaactccctcagaggttacaaacacgctatcgccgagtgcatcattggactcattaactcaatcacctttagctcagagactgatcccaacacaatcttttggtcgctaaagaactatcaaaactacctagtggtacagccaaggagtatcaacgatgaaactaccgacaaatctagcctatgagcgctctatcgacccatcagatgtctgtttttttgtcgtctggcccgatgatagaaaaacacctttaacctacaattctcgtactctgctcgggcaaatggaagcggcatcattagcctatgatgtctcaggtcaaccaataaaaagtgccaccgctgaggcgttagctcaagggaaccctcatcaagttgatttctgccacgttccatacggtgcgagtcatattgaatgcagtttctccgtctcgttttcttctgaactacgtcaaccatataagtgtaactcaagcaaagttaaacaaacgctagtgcaattagtcgagctctacgaaacgaaaatcggctggactgagctagcaacccgatatttgatgaacatttgcaacggtaaatggctgtggaaaaatacccgtaaagcctattgctggaacattgtacttacaccttggccttggaacggggaaaaggttggatttgaagatattcgtactaactacacctcacggcaagactttaaaaataataaaaattggtctgctatagttgaaatgatcaaaaccgcattttctagtactgatgggctggcgatatttgaagtcagggccaccttgcacttgccaacgaatgctatggtgcggccaagccaagttttcacagaaaaagaaagtggcagtaaaagtaaatctaaaactcaaaacagtcgagtttttcagagtacaactattgatggtgaacgatcgccaatactaggggcctttaaaacgggagcagctattgcaaccattgacgactggtatcctgaagccactgagccactaagggtcggacggtttggggttcatcgcgaagatgtcacttgctaccgtcatccgtctaccggaaaagattttttctcgatattacaacaagcagagcactatattgaagtgttgagcgccaacaaaactcccgctcaagaaactatcaacgacatgcactttttaatggctaacctgattaagggtgggatgttccagcataaaggagactgactgtgaaatggtattataagacaatcacctttctgccagagttgtgcaacaacgagtcactggctgcaaagtgtctccgcgttctgcatggatttaactatcagtatgagacacgaaatatcggcgtttcatttccgctttggtgtgatgcaacggttggaaaaaagatttcatttgtcagcaagaacaagatagaactcgacttactacttaaacaacactatttcgtccaaatggaacaacttcaatactttcatatatccaacactgttctcgtcccagaagattgtacatacgtttcctttagacgctgtcaatctatagataagctcacagcagcagggctggcaaggaaaatcagacgcctggagaaacgtgctctatctagaggcgagcaatttgacccatcatcttttgctcaaaaagagcatactgcaatagcgcactaccactcacttggggagtccagcaaacagacgaaccgcaactttcgactcaatatcaggatgctctcggagcaaccccgtgaggggaactcgatttttagtagctatggcttatcaaattcagaaaactcgtttcagcctgtacccttaatctgacctaggctgctgccaccgctgagcaataactagcataaccccttggggcctctaaacgggtcttgaggggttttttgctgaaacctcaggcatttgagaagcacacggtcacactgcttccggtagtcaataaaccggtaaaccagcaatagacataagcggctatttaacgaccctgccctgaaccgacgaccgggtcatcgtggccggatcttgcggcccctcggcttgaacgaattgttagacattatttgccgactaccttggtgatctcgcctttcacgtagtggacaaattcttccaactgatctgcgcgcgaggccaagcgatcttcttcttgtccaagataagcctgtctagcttcaagtatgacgggctgatactgggccggcaggcgctccattgcccagtcggcagcgacatccttcggcgcgattttgccggttactgcgctgtaccaaatgcgggacaacgtaagcactacatttcgctcatcgccagcccagtcgggcggcgagttccatagcgttaaggtttcatttagcgcctcaaatagatcctgttcaggaaccggatcaaagagttcctccgccgctggacctaccaaggcaacgctatgttctcttgcttttgtcagcaagatagccagatcaatgtcgatcgtggctggctcgaagatacctgcaagaatgtcattgcgctgccattctccaaattgcagttcgcgcttagctggataacgccacggaatgatgtcgtcgtgcacaacaatggtgacttctacagcgcggagaatctcgctctctccaggggaagccgaagtttccaaaaggtcgttgatcaaagctcgccgcgttgtttcatcaagccttacggtcaccgtaaccagcaaatcaatatcactgtgtggcttcaggccgccatccactgcggagccgtacaaatgtacggccagcaacgtcggttcgagatggcgctcgatgacgccaactacctctgatagttgagtcgatacttcggcgatcaccgcttccctcatactcttcctttttcaatattattgaagcatttatcagggttattgtctcatgagcggatacatatttgaatgtatttagaaaaataaacaaatagctagctcactcggtcgctacgctccgggcgtgagactgcggcgggcgctgcggacacatacaaagttacccacagattccgtggataagcaggggactaacatgtgaggcaaaacagcagggccgcgccggtggcgtttttccataggctccgccctcctgccagagttcacataaacagacgcttttccggtgcatctgtgggagccgtgaggctcaaccatgaatctgacagtacgggcgaaacccgacaggacttaaagatccccaccgtttccggcgggtcgctccctcttgcgctctcctgttccgaccctgccgtttaccggatacctgttccgcctttctcccttacgggaagtgtggcgctttctcatagctcacacactggtatctcggctcggtgtaggtcgttcgctccaagctgggctgtaagcaagaactccccgttcagcccgactgctgcgccttatccggtaactgttcacttgagtccaacccggaaaagcacggtaaaacgccactggcagcagccattggtaactgggagttcgcagaggatttgtttagctaaacacgcggttgctcttgaagtgtgcgccaaagtccggctacactggaaggacagatttggttgctgtgctctgcgaaagccagttaccacggttaagcagttccccaactgacttaaccttcgatcaaaccacctccccaggtggttttttcgtttacagggcaaaagattacgcgcagaaaaaaaggatctcaagaagatcctttgatcttttctactgaaccgctctagatttcagtgcaatttatctcttcaaatgtagcacctgaagtcagccccatacgatataagttgtaattctcatgttagtcatgccccgcgcccaccggaaggagctgactgggttgaaggctctcaagggcatcggtcgagatcccggtgcctaatgagtgagctaacttacattaattgcgttgcgctcactgcccgctttccagtcgggaaacctgtcgtgccagctgcattaatgaatcggccaacgcgcggggagaggcggtttgcgtattgggcgccagggtggtttttcttttcaccagtgagacgggcaacagctgattgcccttcaccgcctggccctgagagagttgcagcaagcggtccacgctggtttgccccagcaggcgaaaatcctgtttgatggtggttaacggcgggatataacatgagctgtcttcggtatcgtcgtatcccactaccgagatgtccgcaccaacgcgcagcccggactcggtaatggcgcgcattgcgcccagcgccatctgatcgttggcaaccagcatcgcagtgggaacgatgccctcattcagcatttgcatggtttgttgaaaaccggacatggcactccagtcgccttcccgttccgctatcggctgaatttgattgcgagtgagatatttatgccagccagccagacgcagacgcgccgagacagaacttaatgggcccgctaacagcgcgatttgctggtgacccaatgcgaccagatgctccacgcccagtcgcgtaccgtcttcatgggagaaaataatactgttgatgggtgtctggtcagagacatcaagaaataacgccggaacattagtgcaggcagcttccacagcaatggcatcctggtcatccagcggatagttaatgatcagcccactgacgcgttgcgcgagaagattgtgcaccgccgctttacaggcttcgacgccgcttcgttctaccatcgacaccaccacgctggcacccagttgatcggcgcgagatttaatcgccgcgacaatttgcgacggcgcgtgcagggccagactggaggtggcaacgccaatcagcaacgactgtttgcccgccagttgttgtgccacgcggttgggaatgtaattcagctccgccatcgccgcttccactttttcccgcgttttcgcagaaacgtggctggcctggttcaccacgcgggaaacggtctgataagagacaccggcatactctgcgacatcgtataacgttactggtttcac

SEQ ID NO: 104 - DNA, 8445 bp, Synthetic construct
  source 1..8445: mol_type = other DNA
attcaccaccctgaattgactctcttccgggcgctatcatgccataccgcgaaaggttttgcgccattcgatggtgtccgggatctcgacgctctcccttatgcgactcctgcattaggaaattaatacgactcactataggggaattgtgagcggataacaattcccctgtagaaataattttgtttaactttaataaggagatataccatgggtgaactgccgagtaggtagctgataacagtacagcgcggctgattagatcattaaagcggtgaactgccgagtaggtagctgataacggatccgaattcgagctcggcgcgcctgcaggtcgacaagcttgcggccgcataatgcttaagtcgaacagaaagtaatcgtattgtacacggccgcataatcgaaattaatacgactcactataggggaattgtgagcggataacaattccccatcttagtatattagttaagtataagaaggagatatacatatgtttttgcaaagacctaaaccttacagcgatgaaagtttagaaagtttctttatccgagtggctaacaaaaatggctacggtgatgtccatcgcttcctagaagccactaaacgattccttcaagacattgaccataatggctatcaaacctttccgactgatataactcggataaacccatactcagctaaaaacagttccagcgcacgaactgcgtcattcctgaaacttgcacaattgacatttaatgaaccgccagagctacttgggttggcaattaacagaacaaacatgaaatactcgccgtcaactagcgcggttgttagaggtgcagaagtctttcctcgcagtttactacggacgcactccatcccctgctgtcctttgtgtctgcgagaaaatggctacgcctcctacctttggcactttcaggggtacgaatactgccacagccataacgtacctttaattaccacttgtagctgtggtaaggagtttgactaccgagtatctgggttaaagggcatttgctgcaaatgcaaggagcctatcaccttaaccagcagggagaacggtcatgaggcagcgtgtactgtttcaaactggcttgctggccatgaatctaaacctctgccaaatcttcctaaaagctaccgatggggtttagttcattggtggatgggtattaaagatagcgagttcgatcacttttcgttcgttcaatttttctcaaactggccaaggtcattccactcgataatcgaagatgaagtagagttcaaccttgagcatgctgttgtcagcacgtctgaattacgactaaaagatcttcttggtcgattgtttttcggttcaattcggttacctgagcggaatcttcaacacaatatcatccttggtgagcttctctgctatttagaaaatcgtttatggcaagacaagggattaatcgccaacctcaaaatgaacgcgttagaggcgactgtaatgttaaattgtagcctcgatcagattgcatcaatggttgaacaacgcatcttgaagccaaatcgaaaaagcaagcccaacagccctcttgatgttaccgattatctatttcatttcggcgatattttctgtctttggttagctgagttccaaagcgatgagtttaaccgttcgttttatgtgtcgaggtggtaaatgcaaactctgaaagaactaatcgcatccaatcctgacgacttaacaactgaacttaagagagcatttcgtccactcacaccgcatattgcaattgatggtaatgaacttgacgcactgacgatattagtcaatttaaccgataagactgatgatcagaaagacctgctcgatcgagccaaatgcaagcaaaaacttcgagatgaaaaatggtgggctagctgcataaattgcgttaattacagacaaagccataacccaaaattcccggatatacgttctgaaggcgtgattcgaacccaagccctgggtgaattaccgagtttcctactctcgtcctcaaaaatcccaccataccattggtcatatagccatgattcaaaatacgtcaacaaaagcgcattcctcaccaatgagttttgttgggatggtgagatctcatgtttgggtgagcttcttaaagatgcagatcacccactttggaatactttgaaaaagttaggttgttctcaaaaaacttgcaaagcaatggcaaaacaactagctgatattactctcacgactatcaatgtcacactcgcaccaaattacctgactcaaatatctctccccgatagtgatacatcctacatttcactctctcctgttgcatcgctatcgatgcaaagccactttcatcagaggctccaagatgaaaatcggcatagcgcgataacgcggtttagccgaactaccaacatgggggtcactgcgatgacatgtggcggcgcatttagaatgttaaagtctggcgctaagttttccagcccccctcatcaccgattaaacagtaaacgaagttggttgacgtcagagcatgttcagtcattaaaacagtaccagcgcctcaacaaaagcctcatacctgaaaactctcggattgcactccgtagaaaatacaaaatcgagcttcaaaatatggtcagatcttggtttgcaatgcaagaccatacccttgattcgaacatacttatccaacatttgaatcatgacctatcttacttaggagccacaaaacgttttgcatacgatccagcgatgaccaagctctttactgagcttttgaaacgagagttatcaaattcaatcaataatggtgagcaacacactaatggatcgtttttagtcctaccgaatatcagggtttgtggcgcaacagctttaagctccccggtaacggtggggattccatcacttacagctttctttggcttcgttcacgcatttgaacggaatataaatcgcaccacctcatcgtttcgtgttgaatcctttgcgatatgcgtccatcaactacatgtcgagaagcgaggtttgacagcagagtttgtggaaaaaggcgacgggactatatccgctcccgcgacccgggatgactggcagtgtgatgtcgtatttagccttattttgaacaccaactttgctcaacatattgaccaagatacgttagttacatcactaccaaagcgattggctcggggttcagcaaaaattgcgattgatgactttaaacatatcaactcattctcgacattagaaacagcgatcgaatctctgccaatagaagctggtaggtggttatcactttacgcacagtcaaacaataatctaagtgatctattagcagccatgacagaggaccatcagctcatggcaagctgcgtcggttaccacttgttagaagagcccaaagataaaccaaactccctcagaggttacaaacacgctatcgccgagtgcatcattggactcattaactcaatcacctttagctcagagactgatcccaacacaatcttttggtcgctaaagaactatcaaaactacctagtggtacagccaaggagtatcaacgatgaaactaccgacaaatctagcctatgagcgctctatcgacccatcagatgtctgtttttttgtcgtctggcccgatgatagaaaaacacctttaacctacaattctcgtactctgctcgggcaaatggaagcggcatcattagcctatgatgtctcaggtcaaccaataaaaagtgccaccgctgaggcgttagctcaagggaaccctcatcaagttgatttctgccacgttccatacggtgcgagtcatattgaatgcagtttctccgtctcgttttcttctgaactacgtcaaccatataagtgtaactcaagcaaagttaaacaaacgctagtgcaattagtcgagctctacgaaacgaaaatcggctggactgagctagcaacccgatatttgatgaacatttgcaacggtaaatggctgtggaaaaatacccgtaaagcctattgctggaacattgtacttacaccttggccttggaacggggaaaaggttggatttgaagatattcgtactaactacacctcacggcaagactttaaaaataataaaaattggtctgctatagttgaaatgatcaaaaccgcattttctagtactgatgggctggcgatatttgaagtcagggccaccttgcacttgccaacgaatgctatggtgcggccaagccaagttttcacagaaaaagaaagtggcagtaaaagtaaatctaaaactcaaaacagtcgagtttttcagagtacaactattgatggtgaacgatcgccaatactaggggcctttaaaacgggagcagctattgcaaccattgacgactggtatcctgaagccactgagccactaagggtcggacggtttggggttcatcgcgaagatgtcacttgctaccgtcatccgtctaccggaaaagattttttctcgatattacaacaagcagagcactatattgaagtgttgagcgccaacaaaactcccgctcaagaaactatcaacgacatgcactttttaatggctaacctgattaagggtgggatgttccagcataaaggagactgactgtgaaatggtattataagacaatcacctttctgccagagttgtgcaacaacgagtcactggctgcaaagtgtctccgcgttctgcatggatttaactatcagtatgagacacgaaatatcggcgtttcatttccgctttggtgtgatgcaacggttggaaaaaagatttcatttgtcagcaagaacaagatagaactcgacttactacttaaacaacactatttcgtccaaatggaacaacttcaatactttcatatatccaacactgttctcgtcccagaagattgtacatacgtttcctttagacgctgtcaatctatagataagctcacagcagcagggctggcaaggaaaatcagacgcctggagaaacgtgctctatctagaggcgagcaatttgacccatcatcttttgctcaaaaagagcatactgcaatagcgcactaccactcacttggggagtccagcaaacagacgaaccgcaactttcgactcaatatcaggatgctctcggagcaaccccgtgaggggaactcgatttttagtagctatggcttatcaaattcagaaaactcgtttcagcctgtacccttaatctgacctaggctgctgccaccgctgagcaataactagcataaccccttggggcctctaaacgggtcttgaggggttttttgctgaaacctcaggcatttgagaagcacacggtcacactgcttccggtagtcaataaaccggtaaaccagcaatagacataagcggctatttaacgaccctgccctgaaccgacgaccgggtcatcgtggccggatcttgcggcccctcggcttgaacgaattgttagacattatttgccgactaccttggtgatctcgcctttcacgtagtggacaaattcttccaactgatctgcgcgcgaggccaagcgatcttcttcttgtccaagataagcctgtctagcttcaagtatgacgggctgatactgggccggcaggcgctccattgcccagtcggcagcgacatccttcggcgcgattttgccggttactgcgctgtaccaaatgcgggacaacgtaagcactacatttcgctcatcgccagcccagtcgggcggcgagttccatagcgttaaggtttcatttagcgcctcaaatagatcctgttcaggaaccggatcaaagagttcctccgccgctggacctaccaaggcaacgctatgttctcttgcttttgtcagcaagatagccagatcaatgtcgatcgtggctggctcgaagatacctgcaagaatgtcattgcgctgccattctccaaattgcagttcgcgcttagctggataacgccacggaatgatgtcgtcgtgcacaacaatggtgacttctacagcgcggagaatctcgctctctccaggggaagccgaagtttccaaaaggtcgttgatcaaagctcgccgcgttgtttcatcaagccttacggtcaccgtaaccagcaaatcaatatcactgtgtggcttcaggccgccatccactgcggagccgtacaaatgtacggccagcaacgtcggttcgagatggcgctcgatgacgccaactacctctgatagttgagtcgatacttcggcgatcaccgcttccctcatactcttcctttttcaatattattgaagcatttatcagggttattgtctcatgagcggatacatatttgaatgtatttagaaaaataaacaaatagctagctcactcggtcgctacgctccgggcgtgagactgcggcgggcgctgcggacacatacaaagttacccacagattccgtggataagcaggggactaacatgtgaggcaaaacagcagggccgcgccggtggcgtttttccataggctccgccctcctgccagagttcacataaacagacgcttttccggtgcatctgtgggagccgtgaggctcaaccatgaatctgacagtacgggcgaaacccgacaggacttaaagatccccaccgtttccggcgggtcgctccctcttgcgctctcctgttccgaccctgccgtttaccggatacctgttccgcctttctcccttacgggaagtgtggcgctttctcatagctcacacactggtatctcggctcggtgtaggtcgttcgctccaagctgggctgtaagcaagaactccccgttcagcccgactgctgcgccttatccggtaactgttcacttgagtccaacccggaaaagcacggtaaaacgccactggcagcagccattggtaactgggagttcgcagaggatttgtttagctaaacacgcggttgctcttgaagtgtgcgccaaagtccggctacactggaaggacagatttggttgctgtgctctgcgaaagccagttaccacggttaagcagttccccaactgacttaaccttcgatcaaaccacctccccaggtggttttttcgtttacagggcaaaagattacgcgcagaaaaaaaggatctcaagaagatcctttgatcttttctactgaaccgctctagatttcagtgcaatttatctcttcaaatgtagcacctgaagtcagccccatacgatataagttgtaattctcatgttagtcatgccccgcgcccaccggaaggagctgactgggttgaaggctctcaagggcatcggtcgagatcccggtgcctaatgagtgagctaacttacattaattgcgttgcgctcactgcccgctttccagtcgggaaacctgtcgtgccagctgcattaatgaatcggccaacgcgcggggagaggcggtttgcgtattgggcgccagggtggtttttcttttcaccagtgagacgggcaacagctgattgcccttcaccgcctggccctgagagagttgcagcaagcggtccacgctggtttgccccagcaggcgaaaatcctgtttgatggtggttaacggcgggatataacatgagctgtcttcggtatcgtcgtatcccactaccgagatgtccgcaccaacgcgcagcccggactcggtaatggcgcgcattgcgcccagcgccatctgatcgttggcaaccagcatcgcagtgggaacgatgccctcattcagcatttgcatggtttgttgaaaaccggacatggcactccagtcgccttcccgttccgctatcggctgaatttgattgcgagtgagatatttatgccagccagccagacgcagacgcgccgagacagaacttaatgggcccgctaacagcgcgatttgctggtgacccaatgcgaccagatgctccacgcccagtcgcgtaccgtcttcatgggagaaaataatactgttgatgggtgtctggtcagagacatcaagaaataacgccggaacattagtgcaggcagcttccacagcaatggcatcctggtcatccagcggatagttaatgatcagcccactgacgcgttgcgcgagaagattgtgcaccgccgctttacaggcttcgacgccgcttcgttctaccatcgacaccaccacgctggcacccagttgatcggcgcgagatttaatcgccgcgacaatttgcgacggcgcgtgcagggccagactggaggtggcaacgccaatcagcaacgactgtttgcccgccagttgttgtgccacgcggttgggaatgtaattcagctccgccatcgccgcttccactttttcccgcgttttcgcagaaacgtggctggcctggttcaccacgcgggaaacggtctgataagagacaccggcatactctgcgacatcgtataacgttactggtttcac

SEQ ID NO: 105 - DNA, 8445 bp, Synthetic construct
  source 1..8445: mol_type = other DNA
attcaccaccctgaattgactctcttccgggcgctatcatgccataccgcgaaaggttttgcgccattcgatggtgtccgggatctcgacgctctcccttatgcgactcctgcattaggaaattaatacgactcactataggggaattgtgagcggataacaattcccctgtagaaataattttgtttaactttaataaggagatataccatgggtgaactgccgagtaggtagctgataacagtacagcgcggctgaaatctagtttaaagcggtgaactgccgagtaggtagctgataacggatccgaattcgagctcggcgcgcctgcaggtcgacaagcttgcggccgcataatgcttaagtcgaacagaaagtaatcgtattgtacacggccgcataatcgaaattaatacgactcactataggggaattgtgagcggataacaattccccatcttagtatattagttaagtataagaaggagatatacatatgtttttgcaaagacctaaaccttacagcgatgaaagtttagaaagtttctttatccgagtggctaacaaaaatggctacggtgatgtccatcgcttcctagaagccactaaacgattccttcaagacattgaccataatggctatcaaacctttccgactgatataactcggataaacccatactcagctaaaaacagttccagcgcacgaactgcgtcattcctgaaacttgcacaattgacatttaatgaaccgccagagctacttgggttggcaattaacagaacaaacatgaaatactcgccgtcaactagcgcggttgttagaggtgcagaagtctttcctcgcagtttactacggacgcactccatcccctgctgtcctttgtgtctgcgagaaaatggctacgcctcctacctttggcactttcaggggtacgaatactgccacagccataacgtacctttaattaccacttgtagctgtggtaaggagtttgactaccgagtatctgggttaaagggcatttgctgcaaatgcaaggagcctatcaccttaaccagcagggagaacggtcatgaggcagcgtgtactgtttcaaactggcttgctggccatgaatctaaacctctgccaaatcttcctaaaagctaccgatggggtttagttcattggtggatgggtattaaagatagcgagttcgatcacttttcgttcgttcaatttttctcaaactggccaaggtcattccactcgataatcgaagatgaagtagagttcaaccttgagcatgctgttgtcagcacgtctgaattacgactaaaagatcttcttggtcgattgtttttcggttcaattcggttacctgagcggaatcttcaacacaatatcatccttggtgagcttctctgctatttagaaaatcgtttatggcaagacaagggattaatcgccaacctcaaaatgaacgcgttagaggcgactgtaatgttaaattgtagcctcgatcagattgcatcaatggttgaacaacgcatcttgaagccaaatcgaaaaagcaagcccaacagccctcttgatgttaccgattatctatttcatttcggcgatattttctgtctttggttagctgagttccaaagcgatgagtttaaccgttcgttttatgtgtcgaggtggtaaatgcaaactctgaaagaactaatcgcatccaatcctgacgacttaacaactgaacttaagagagcatttcgtccactcacaccgcatattgcaattgatggtaatgaacttgacgcactgacgatattagtcaatttaaccgataagactgatgatcagaaagacctgctcgatcgagccaaatgcaagcaaaaacttcgagatgaaaaatggtgggctagctgcataaattgcgttaattacagacaaagccataacccaaaattcccggatatacgttctgaaggcgtgattcgaacccaagccctgggtgaattaccgagtttcctactctcgtcctcaaaaatcccaccataccattggtcatatagccatgattcaaaatacgtcaacaaaagcgcattcctcaccaatgagttttgttgggatggtgagatctcatgtttgggtgagcttcttaaagatgcagatcacccactttggaatactttgaaaaagttaggttgttctcaaaaaacttgcaaagcaatggcaaaacaactagctgatattactctcacgactatcaatgtcacactcgcaccaaattacctgactcaaatatctctccccgatagtgatacatcctacatttcactctctcctgttgcatcgctatcgatgcaaagccactttcatcagaggctccaagatgaaaatcggcatagcgcgataacgcggtttagccgaactaccaacatgggggtcactgcgatgacatgtggcggcgcatttagaatgttaaagtctggcgctaagttttccagcccccctcatcaccgattaaacagtaaacgaagttggttgacgtcagagcatgttcagtcattaaaacagtaccagcgcctcaacaaaagcctcatacctgaaaactctcggattgcactccgtagaaaatacaaaatcgagcttcaaaatatggtcagatcttggtttgcaatgcaagaccatacccttgattcgaacatacttatccaacatttgaatcatgacctatcttacttaggagccacaaaacgttttgcatacgatccagcgatgaccaagctctttactgagcttttgaaacgagagttatcaaattcaatcaataatggtgagcaacacactaatggatcgtttttagtcctaccgaatatcagggtttgtggcgcaacagctttaagctccccggtaacggtggggattccatcacttacagctttctttggcttcgttcacgcatttgaacggaatataaatcgcaccacctcatcgtttcgtgttgaatcctttgcgatatgcgtccatcaactacatgtcgagaagcgaggtttgacagcagagtttgtggaaaaaggcgacgggactatatccgctcccgcgacccgggatgactggcagtgtgatgtcgtatttagccttattttgaacaccaactttgctcaacatattgaccaagatacgttagttacatcactaccaaagcgattggctcggggttcagcaaaaattgcgattgatgactttaaacatatcaactcattctcgacattagaaacagcgatcgaatctctgccaatagaagctggtaggtggttatcactttacgcacagtcaaacaataatctaagtgatctattagcagccatgacagaggaccatcagctcatggcaagctgcgtcggttaccacttgttagaagagcccaaagataaaccaaactccctcagaggttacaaacacgctatcgccgagtgcatcattggactcattaactcaatcacctttagctcagagactgatcccaacacaatcttttggtcgctaaagaactatcaaaactacctagtggtacagccaaggagtatcaacgatgaaactaccgacaaatctagcctatgagcgctctatcgacccatcagatgtctgtttttttgtcgtctggcccgatgatagaaaaacacctttaacctacaattctcgtactctgctcgggcaaatggaagcggcatcattagcctatgatgtctcaggtcaaccaataaaaagtgccaccgctgaggcgttagctcaagggaaccctcatcaagttgatttctgccacgttccatacggtgcgagtcatattgaatgcagtttctccgtctcgttttcttctgaactacgtcaaccatataagtgtaactcaagcaaagttaaacaaacgctagtgcaattagtcgagctctacgaaacgaaaatcggctggactgagctagcaacccgatatttgatgaacatttgcaacggtaaatggctgtggaaaaatacccgtaaagcctattgctggaacattgtacttacaccttggccttggaacggggaaaaggttggatttgaagatattcgtactaactacacctcacggcaagactttaaaaataataaaaattggtctgctatagttgaaatgatcaaaaccgcattttctagtactgatgggctggcgatatttgaagtcagggccaccttgcacttgccaacgaatgctatggtgcggccaagccaagttttcacagaaaaagaaagtggcagtaaaagtaaatctaaaactcaaaacagtcgagtttttcagagtacaactattgatggtgaacgatcgccaatactaggggcctttaaaacgggagcagctattgcaaccattgacgactggtatcctgaagccactgagccactaagggtcggacggtttggggttcatcgcgaagatgtcacttgctaccgtcatccgtctaccggaaaagattttttctcgatattacaacaagcagagcactatattgaagtgttgagcgccaacaaaactcccgctcaagaaactatcaacgacatgcactttttaatggctaacctgattaagggtgggatgttccagcataaaggagactgactgtgaaatggtattataagacaatcacctttctgccagagttgtgcaacaacgagtcactggctgcaaagtgtctccgcgttctgcatggatttaactatcagtatgagacacgaaatatcggcgtttcatttccgctttggtgtgatgcaacggttggaaaaaagatttcatttgtcagcaagaacaagatagaactcgacttactacttaaacaacactatttcgtccaaatggaacaacttcaatactttcatatatccaacactgttctcgtcccagaagattgtacatacgtttcctttagacgctgtcaatctatagataagctcacagcagcagggctggcaaggaaaatcagacgcctggagaaacgtgctctatctagaggcgagcaatttgacccatcatcttttgctcaaaaagagcatactgcaatagcgcactaccactcacttggggagtccagcaaacagacgaaccgcaactttcgactcaatatcaggatgctctcggagcaaccccgtgaggggaactcgatttttagtagctatggcttatcaaattcagaaaactcgtttcagcctgtacccttaatctgacctaggctgctgccaccgctgagcaataactagcataaccccttggggcctctaaacgggtcttgaggggttttttgctgaaacctcaggcatttgagaagcacacggtcacactgcttccggtagtcaataaaccggtaaaccagcaatagacataagcggctatttaacgaccctgccctgaaccgacgaccgggtcatcgtggccggatcttgcggcccctcggcttgaacgaattgttagacattatttgccgactaccttggtgatctcgcctttcacgtagtggacaaattcttccaactgatctgcgcgcgaggccaagcgatcttcttcttgtccaagataagcctgtctagcttcaagtatgacgggctgatactgggccggcaggcgctccattgcccagtcggcagcgacatccttcggcgcgattttgccggttactgcgctgtaccaaatgcgggacaacgtaagcactacatttcgctcatcgccagcccagtcgggcggcgagttccatagcgttaaggtttcatttagcgcctcaaatagatcctgttcaggaaccggatcaaagagttcctccgccgctggacctaccaaggcaacgctatgttctcttgcttttgtcagcaagatagccagatcaatgtcgatcgtggctggctcgaagatacctgcaagaatgtcattgcgctgccattctccaaattgcagttcgcgcttagctggataacgccacggaatgatgtcgtcgtgcacaacaatggtgacttctacagcgcggagaatctcgctctctccaggggaagccgaagtttccaaaaggtcgttgatcaaagctcgccgcgttgtttcatcaagccttacggtcaccgtaaccagcaaatcaatatcactgtgtggcttcaggccgccatccactgcggagccgtacaaatgtacggccagcaacgtcggttcgagatggcgctcgatgacgccaactacctctgatagttgagtcgatacttcggcgatcaccgcttccctcatactcttcctttttcaatattattgaagcatttatcagggttattgtctcatgagcggatacatatttgaatgtatttagaaaaataaacaaatagctagctcactcggtcgctacgctccgggcgtgagactgcggcgggcgctgcggacacatacaaagttacccacagattccgtggataagcaggggactaacatgtgaggcaaaacagcagggccgcgccggtggcgtttttccataggctccgccctcctgccagagttcacataaacagacgcttttccggtgcatctgtgggagccgtgaggctcaaccatgaatctgacagtacgggcgaaacccgacaggacttaaagatccccaccgtttccggcgggtcgctccctcttgcgctctcctgttccgaccctgccgtttaccggatacctgttccgcctttctcccttacgggaagtgtggcgctttctcatagctcacacactggtatctcggctcggtgtaggtcgttcgctccaagctgggctgtaagcaagaactccccgttcagcccgactgctgcgccttatccggtaactgttcacttgagtccaacccggaaaagcacggtaaaacgccactggcagcagccattggtaactgggagttcgcagaggatttgtttagctaaacacgcggttgctcttgaagtgtgcgccaaagtccggctacactggaaggacagatttggttgctgtgctctgcgaaagccagttaccacggttaagcagttccccaactgacttaaccttcgatcaaaccacctccccaggtggttttttcgtttacagggcaaaagattacgcgcagaaaaaaaggatctcaagaagatcctttgatcttttctactgaaccgctctagatttcagtgcaatttatctcttcaaatgtagcacctgaagtcagccccatacgatataagttgtaattctcatgttagtcatgccccgcgcccaccggaaggagctgactgggttgaaggctctcaagggcatcggtcgagatcccggtgcctaatgagtgagctaacttacattaattgcgttgcgctcactgcccgctttccagtcgggaaacctgtcgtgccagctgcattaatgaatcggccaacgcgcggggagaggcggtttgcgtattgggcgccagggtggtttttcttttcaccagtgagacgggcaacagctgattgcccttcaccgcctggccctgagagagttgcagcaagcggtccacgctggtttgccccagcaggcgaaaatcctgtttgatggtggttaacggcgggatataacatgagctgtcttcggtatcgtcgtatcccactaccgagatgtccgcaccaacgcgcagcccggactcggtaatggcgcgcattgcgcccagcgccatctgatcgttggcaaccagcatcgcagtgggaacgatgccctcattcagcatttgcatggtttgttgaaaaccggacatggcactccagtcgccttcccgttccgctatcggctgaatttgattgcgagtgagatatttatgccagccagccagacgcagacgcgccgagacagaacttaatgggcccgctaacagcgcgatttgctggtgacccaatgcgaccagatgctccacgcccagtcgcgtaccgtcttcatgggagaaaataatactgttgatgggtgtctggtcagagacatcaagaaataacgccggaacattagtgcaggcagcttccacagcaatggcatcctggtcatccagcggatagttaatgatcagcccactgacgcgttgcgcgagaagattgtgcaccgccgctttacaggcttcgacgccgcttcgttctaccatcgacaccaccacgctggcacccagttgatcggcgcgagatttaatcgccgcgacaatttgcgacggcgcgtgcagggccagactggaggtggcaacgccaatcagcaacgactgtttgcccgccagttgttgtgccacgcggttgggaatgtaattcagctccgccatcgccgcttccactttttcccgcgttttcgcagaaacgtggctggcctggttcaccacgcgggaaacggtctgataagagacaccggcatactctgcgacatcgtataacgttactggtttcac

SEQ ID NO: 106 - DNA, 8445 bp, Synthetic construct
  source 1..8445: mol_type = other DNA
attcaccaccctgaattgactctcttccgggcgctatcatgccataccgcgaaaggttttgcgccattcgatggtgtccgggatctcgacgctctcccttatgcgactcctgcattaggaaattaatacgactcactataggggaattgtgagcggataacaattcccctgtagaaataattttgtttaactttaataaggagatataccatgggtgaactgccgagtaggtagctgataacagtacagcgcggctgaaatcatcaaattagcggtgaactgccgagtaggtagctgataacggatccgaattcgagctcggcgcgcctgcaggtcgacaagcttgcggccgcataatgcttaagtcgaacagaaagtaatcgtattgtacacggccgcataatcgaaattaatacgactcactataggggaattgtgagcggataacaattccccatcttagtatattagttaagtataagaaggagatatacatatgtttttgcaaagacctaaaccttacagcgatgaaagtttagaaagtttctttatccgagtggctaacaaaaatggctacggtgatgtccatcgcttcctagaagccactaaacgattccttcaagacattgaccataatggctatcaaacctttccgactgatataactcggataaacccatactcagctaaaaacagttccagcgcacgaactgcgtcattcctgaaacttgcacaattgacatttaatgaaccgccagagctacttgggttggcaattaacagaacaaacatgaaatactcgccgtcaactagcgcggttgttagaggtgcagaagtctttcctcgcagtttactacggacgcactccatcccctgctgtcctttgtgtctgcgagaaaatggctacgcctcctacctttggcactttcaggggtacgaatactgccacagccataacgtacctttaattaccacttgtagctgtggtaaggagtttgactaccgagtatctgggttaaagggcatttgctgcaaatgcaaggagcctatcaccttaaccagcagggagaacggtcatgaggcagcgtgtactgtttcaaactggcttgctggccatgaatctaaacctctgccaaatcttcctaaaagctaccgatggggtttagttcattggtggatgggtattaaagatagcgagttcgatcacttttcgttcgttcaatttttctcaaactggccaaggtcattccactcgataatcgaagatgaagtagagttcaaccttgagcatgctgttgtcagcacgtctgaattacgactaaaagatcttcttggtcgattgtttttcggttcaattcggttacctgagcggaatcttcaacacaatatcatccttggtgagcttctctgctatttagaaaatcgtttatggcaagacaagggattaatcgccaacctcaaaatgaacgcgttagaggcgactgtaatgttaaattgtagcctcgatcagattgcatcaatggttgaacaacgcatcttgaagccaaatcgaaaaagcaagcccaacagccctcttgatgttaccgattatctatttcatttcggcgatattttctgtctttggttagctgagttccaaagcgatgagtttaaccgttcgttttatgtgtcgaggtggtaaatgcaaactctgaaagaactaatcgcatccaatcctgacgacttaacaactgaacttaagagagcatttcgtccactcacaccgcatattgcaattgatggtaatgaacttgacgcactgacgatattagtcaatttaaccgataagactgatgatcagaaagacctgctcgatcgagccaaatgcaagcaaaaacttcgagatgaaaaatggtgggctagctgcataaattgcgttaattacagacaaagccataacccaaaattcccggatatacgttctgaaggcgtgattcgaacccaagccctgggtgaattaccgagtttcctactctcgtcctcaaaaatcccaccataccattggtcatatagccatgattcaaaatacgtcaacaaaagcgcattcctcaccaatgagttttgttgggatggtgagatctcatgtttgggtgagcttcttaaagatgcagatcacccactttggaatactttgaaaaagttaggttgttctcaaaaaacttgcaaagcaatggcaaaacaactagctgatattactctcacgactatcaatgtcacactcgcaccaaattacctgactcaaatatctctccccgatagtgatacatcctacatttcactctctcctgttgcatcgctatcgatgcaaagccactttcatcagaggctccaagatgaaaatcggcatagcgcgataacgcggtttagccgaactaccaacatgggggtcactgcgatgacatgtggcggcgcatttagaatgttaaagtctggcgctaagttttccagcccccctcatcaccgattaaacagtaaacgaagttggttgacgtcagagcatgttcagtcattaaaacagtaccagcgcctcaacaaaagcctcatacctgaaaactctcggattgcactccgtagaaaatacaaaatcgagcttcaaaatatggtcagatcttggtttgcaatgcaagaccatacccttgattcgaacatacttatccaacatttgaatcatgacctatcttacttaggagccacaaaacgttttgcatacgatccagcgatgaccaagctctttactgagcttttgaaacgagagttatcaaattcaatcaataatggtgagcaacacactaatggatcgtttttagtcctaccgaatatcagggtttgtggcgcaacagctttaagctccccggtaacggtggggattccatcacttacagctttctttggcttcgttcacgcatttgaacggaatataaatcgcaccacctcatcgtttcgtgttgaatcctttgcgatatgcgtccatcaactacatgtcgagaagcgaggtttgacagcagagtttgtggaaaaaggcgacgggactatatccgctcccgcgacccgggatgactggcagtgtgatgtcgtatttagccttattttgaacaccaactttgctcaacatattgaccaagatacgttagttacatcactaccaaagcgattggctcggggttcagcaaaaattgcgattgatgactttaaacatatcaactcattctcgacattagaaacagcgatcgaatctctgccaatagaagctggtaggtggttatcactttacgcacagtcaaacaataatctaagtgatctattagcagccatgacagaggaccatcagctcatggcaagctgcgtcggttaccacttgttagaagagcccaaagataaaccaaactccctcagaggttacaaacacgctatcgccgagtgcatcattggactcattaactcaatcacctttagctcagagactgatcccaacacaatcttttggtcgctaaagaactatcaaaactacctagtggtacagccaaggagtatcaacgatgaaactaccgacaaatctagcctatgagcgctctatcgacccatcagatgtctgtttttttgtcgtctggcccgatgatagaaaaacacctttaacctacaattctcgtactctgctcgggcaaatggaagcggcatcattagcctatgatgtctcaggtcaaccaataaaaagtgccaccgctgaggcgttagctcaagggaaccctcatcaagttgatttctgccacgttccatacggtgcgagtcatattgaatgcagtttctccgtctcgttttcttctgaactacgtcaaccatataagtgtaactcaagcaaagttaaacaaacgctagtgcaattagtcgagctctacgaaacgaaaatcggctggactgagctagcaacccgatatttgatgaacatttgcaacggtaaatggctgtggaaaaatacccgtaaagcctattgctggaacattgtacttacaccttggccttggaacggggaaaaggttggatttgaagatattcgtactaactacacctcacggcaagactttaaaaataataaaaattggtctgctatagttgaaatgatcaaaaccgcattttctagtactgatgggctggcgatatttgaagtcagggccaccttgcacttgccaacgaatgctatggtgcggccaagccaagttttcacagaaaaagaaagtggcagtaaaagtaaatctaaaactcaaaacagtcgagtttttcagagtacaactattgatggtgaacgatcgccaatactaggggcctttaaaacgggagcagctattgcaaccattgacgactggtatcctgaagccactgagccactaagggtcggacggtttggggttcatcgcgaagatgtcacttgctaccgtcatccgtctaccggaaaagattttttctcgatattacaacaagcagagcactatattgaagtgttgagcgccaacaaaactcccgctcaagaaactatcaacgacatgcactttttaatggctaacctgattaagggtgggatgttccagcataaaggagactgactgtgaaatggtattataagacaatcacctttctgccagagttgtgcaacaacgagtcactggctgcaaagtgtctccgcgttctgcatggatttaactatcagtatgagacacgaaatatcggcgtttcatttccgctttggtgtgatgcaacggttggaaaaaagatttcatttgtcagcaagaacaagatagaactcgacttactacttaaacaacactatttcgtccaaatggaacaacttcaatactttcatatatccaacactgttctcgtcccagaagattgtacatacgtttcctttagacgctgtcaatctatagataagctcacagcagcagggctggcaaggaaaatcagacgcctggagaaacgtgctctatctagaggcgagcaatttgacccatcatcttttgctcaaaaagagcatactgcaatagcgcactaccactcacttggggagtccagcaaacagacgaaccgcaactttcgactcaatatcaggatgctctcggagcaaccccgtgaggggaactcgatttttagtagctatggcttatcaaattcagaaaactcgtttcagcctgtacccttaatctgacctaggctgctgccaccgctgagcaataactagcataaccccttggggcctctaaacgggtcttgaggggttttttgctgaaacctcaggcatttgagaagcacacggtcacactgcttccggtagtcaataaaccggtaaaccagcaatagacataagcggctatttaacgaccctgccctgaaccgacgaccgggtcatcgtggccggatcttgcggcccctcggcttgaacgaattgttagacattatttgccgactaccttggtgatctcgcctttcacgtagtggacaaattcttccaactgatctgcgcgcgaggccaagcgatcttcttcttgtccaagataagcctgtctagcttcaagtatgacgggctgatactgggccggcaggcgctccattgcccagtcggcagcgacatccttcggcgcgattttgccggttactgcgctgtaccaaatgcgggacaacgtaagcactacatttcgctcatcgccagcccagtcgggcggcgagttccatagcgttaaggtttcatttagcgcctcaaatagatcctgttcaggaaccggatcaaagagttcctccgccgctggacctaccaaggcaacgctatgttctcttgcttttgtcagcaagatagccagatcaatgtcgatcgtggctggctcgaagatacctgcaagaatgtcattgcgctgccattctccaaattgcagttcgcgcttagctggataacgccacggaatgatgtcgtcgtgcacaacaatggtgacttctacagcgcggagaatctcgctctctccaggggaagccgaagtttccaaaaggtcgttgatcaaagctcgccgcgttgtttcatcaagccttacggtcaccgtaaccagcaaatcaatatcactgtgtggcttcaggccgccatccactgcggagccgtacaaatgtacggccagcaacgtcggttcgagatggcgctcgatgacgccaactacctctgatagttgagtcgatacttcggcgatcaccgcttccctcatactcttcctttttcaatattattgaagcatttatcagggttattgtctcatgagcggatacatatttgaatgtatttagaaaaataaacaaatagctagctcactcggtcgctacgctccgggcgtgagactgcggcgggcgctgcggacacatacaaagttacccacagattccgtggataagcaggggactaacatgtgaggcaaaacagcagggccgcgccggtggcgtttttccataggctccgccctcctgccagagttcacataaacagacgcttttccggtgcatctgtgggagccgtgaggctcaaccatgaatctgacagtacgggcgaaacccgacaggacttaaagatccccaccgtttccggcgggtcgctccctcttgcgctctcctgttccgaccctgccgtttaccggatacctgttccgcctttctcccttacgggaagtgtggcgctttctcatagctcacacactggtatctcggctcggtgtaggtcgttcgctccaagctgggctgtaagcaagaactccccgttcagcccgactgctgcgccttatccggtaactgttcacttgagtccaacccggaaaagcacggtaaaacgccactggcagcagccattggtaactgggagttcgcagaggatttgtttagctaaacacgcggttgctcttgaagtgtgcgccaaagtccggctacactggaaggacagatttggttgctgtgctctgcgaaagccagttaccacggttaagcagttccccaactgacttaaccttcgatcaaaccacctccccaggtggttttttcgtttacagggcaaaagattacgcgcagaaaaaaaggatctcaagaagatcctttgatcttttctactgaaccgctctagatttcagtgcaatttatctcttcaaatgtagcacctgaagtcagccccatacgatataagttgtaattctcatgttagtcatgccccgcgcccaccggaaggagctgactgggttgaaggctctcaagggcatcggtcgagatcccggtgcctaatgagtgagctaacttacattaattgcgttgcgctcactgcccgctttccagtcgggaaacctgtcgtgccagctgcattaatgaatcggccaacgcgcggggagaggcggtttgcgtattgggcgccagggtggtttttcttttcaccagtgagacgggcaacagctgattgcccttcaccgcctggccctgagagagttgcagcaagcggtccacgctggtttgccccagcaggcgaaaatcctgtttgatggtggttaacggcgggatataacatgagctgtcttcggtatcgtcgtatcccactaccgagatgtccgcaccaacgcgcagcccggactcggtaatggcgcgcattgcgcccagcgccatctgatcgttggcaaccagcatcgcagtgggaacgatgccctcattcagcatttgcatggtttgttgaaaaccggacatggcactccagtcgccttcccgttccgctatcggctgaatttgattgcgagtgagatatttatgccagccagccagacgcagacgcgccgagacagaacttaatgggcccgctaacagcgcgatttgctggtgacccaatgcgaccagatgctccacgcccagtcgcgtaccgtcttcatgggagaaaataatactgttgatgggtgtctggtcagagacatcaagaaataacgccggaacattagtgcaggcagcttccacagcaatggcatcctggtcatccagcggatagttaatgatcagcccactgacgcgttgcgcgagaagattgtgcaccgccgctttacaggcttcgacgccgcttcgttctaccatcgacaccaccacgctggcacccagttgatcggcgcgagatttaatcgccgcgacaatttgcgacggcgcgtgcagggccagactggaggtggcaacgccaatcagcaacgactgtttgcccgccagttgttgtgccacgcggttgggaatgtaattcagctccgccatcgccgcttccactttttcccgcgttttcgcagaaacgtggctggcctggttcaccacgcgggaaacggtctgataagagacaccggcatactctgcgacatcgtataacgttactggtttcac

SEQ ID NO: 107 - DNA, 8445 bp, Synthetic construct
  source 1..8445: mol_type = other DNA
attcaccaccctgaattgactctcttccgggcgctatcatgccataccgcgaaaggttttgcgccattcgatggtgtccgggatctcgacgctctcccttatgcgactcctgcattaggaaattaatacgactcactataggggaattgtgagcggataacaattcccctgtagaaataattttgtttaactttaataaggagatataccatgggtgaactgccgagtaggtagctgataacagtacagcgcggctgaaatcatcattaatcgcgtgaactgccgagtaggtagctgataacggatccgaattcgagctcggcgcgcctgcaggtcgacaagcttgcggccgcataatgcttaagtcgaacagaaagtaatcgtattgtacacggccgcataatcgaaattaatacgactcactataggggaattgtgagcggataacaattccccatcttagtatattagttaagtataagaaggagatatacatatgtttttgcaaagacctaaaccttacagcgatgaaagtttagaaagtttctttatccgagtggctaacaaaaatggctacggtgatgtccatcgcttcctagaagccactaaacgattccttcaagacattgaccataatggctatcaaacctttccgactgatataactcggataaacccatactcagctaaaaacagttccagcgcacgaactgcgtcattcctgaaacttgcacaattgacatttaatgaaccgccagagctacttgggttggcaattaacagaacaaacatgaaatactcgccgtcaactagcgcggttgttagaggtgcagaagtctttcctcgcagtttactacggacgcactccatcccctgctgtcctttgtgtctgcgagaaaatggctacgcctcctacctttggcactttcaggggtacgaatactgccacagccataacgtacctttaattaccacttgtagctgtggtaaggagtttgactaccgagtatctgggttaaagggcatttgctgcaaatgcaaggagcctatcaccttaaccagcagggagaacggtcatgaggcagcgtgtactgtttcaaactggcttgctggccatgaatctaaacctctgccaaatcttcctaaaagctaccgatggggtttagttcattggtggatgggtattaaagatagcgagttcgatcacttttcgttcgttcaatttttctcaaactggccaaggtcattccactcgataatcgaagatgaagtagagttcaaccttgagcatgctgttgtcagcacgtctgaattacgactaaaagatcttcttggtcgattgtttttcggttcaattcggttacctgagcggaatcttcaacacaatatcatccttggtgagcttctctgctatttagaaaatcgtttatggcaagacaagggattaatcgccaacctcaaaatgaacgcgttagaggcgactgtaatgttaaattgtagcctcgatcagattgcatcaatggttgaacaacgcatcttgaagccaaatcgaaaaagcaagcccaacagccctcttgatgttaccgattatctatttcatttcggcgatattttctgtctttggttagctgagttccaaagcgatgagtttaaccgttcgttttatgtgtcgaggtggtaaatgcaaactctgaaagaactaatcgcatccaatcctgacgacttaacaactgaacttaagagagcatttcgtccactcacaccgcatattgcaattgatggtaatgaacttgacgcactgacgatattagtcaatttaaccgataagactgatgatcagaaagacctgctcgatcgagccaaatgcaagcaaaaacttcgagatgaaaaatggtgggctagctgcataaattgcgttaattacagacaaagccataacccaaaattcccggatatacgttctgaaggcgtgattcgaacccaagccctgggtgaattaccgagtttcctactctcgtcctcaaaaatcccaccataccattggtcatatagccatgattcaaaatacgtcaacaaaagcgcattcctcaccaatgagttttgttgggatggtgagatctcatgtttgggtgagcttcttaaagatgcagatcacccactttggaatactttgaaaaagttaggttgttctcaaaaaacttgcaaagcaatggcaaaacaactagctgatattactctcacgactatcaatgtcacactcgcaccaaattacctgactcaaatatctctccccgatagtgatacatcctacatttcactctctcctgttgcatcgctatcgatgcaaagccactttcatcagaggctccaagatgaaaatcggcatagcgcgataacgcggtttagccgaactaccaacatgggggtcactgcgatgacatgtggcggcgcatttagaatgttaaagtctggcgctaagttttccagcccccctcatcaccgattaaacagtaaacgaagttggttgacgtcagagcatgttcagtcattaaaacagtaccagcgcctcaacaaaagcctcatacctgaaaactctcggattgcactccgtagaaaatacaaaatcgagcttcaaaatatggtcagatcttggtttgcaatgcaagaccatacccttgattcgaacatacttatccaacatttgaatcatgacctatcttacttaggagccacaaaacgttttgcatacgatccagcgatgaccaagctctttactgagcttttgaaacgagagttatcaaattcaatcaataatggtgagcaacacactaatggatcgtttttagtcctaccgaatatcagggtttgtggcgcaacagctttaagctccccggtaacggtggggattccatcacttacagctttctttggcttcgttcacgcatttgaacggaatataaatcgcaccacctcatcgtttcgtgttgaatcctttgcgatatgcgtccatcaactacatgtcgagaagcgaggtttgacagcagagtttgtggaaaaaggcgacgggactatatccgctcccgcgacccgggatgactggcagtgtgatgtcgtatttagccttattttgaacaccaactttgctcaacatattgaccaagatacgttagttacatcactaccaaagcgattggctcggggttcagcaaaaattgcgattgatgactttaaacatatcaactcattctcgacattagaaacagcgatcgaatctctgccaatagaagctggtaggtggttatcactttacgcacagtcaaacaataatctaagtgatctattagcagccatgacagaggaccatcagctcatggcaagctgcgtcggttaccacttgttagaagagcccaaagataaaccaaactccctcagaggttacaaacacgctatcgccgagtgcatcattggactcattaactcaatcacctttagctcagagactgatcccaacacaatcttttggtcgctaaagaactatcaaaactacctagtggtacagccaaggagtatcaacgatgaaactaccgacaaatctagcctatgagcgctctatcgacccatcagatgtctgtttttttgtcgtctggcccgatgatagaaaaacacctttaacctacaattctcgtactctgctcgggcaaatggaagcggcatcattagcctatgatgtctcaggtcaaccaataaaaagtgccaccgctgaggcgttagctcaagggaaccctcatcaagttgatttctgccacgttccatacggtgcgagtcatattgaatgcagtttctccgtctcgttttcttctgaactacgtcaaccatataagtgtaactcaagcaaagttaaacaaacgctagtgcaattagtcgagctctacgaaacgaaaatcggctggactgagctagcaacccgatatttgatgaacatttgcaacggtaaatggctgtggaaaaatacccgtaaagcctattgctggaacattgtacttacaccttggccttggaacggggaaaaggttggatttgaagatattcgtactaactacacctcacggcaagactttaaaaataataaaaattggtctgctatagttgaaatgatcaaaaccgcattttctagtactgatgggctggcgatatttgaagtcagggccaccttgcacttgccaacgaatgctatggtgcggccaagccaagttttcacagaaaaagaaagtggcagtaaaagtaaatctaaaactcaaaacagtcgagtttttcagagtacaactattgatggtgaacgatcgccaatactaggggcctttaaaacgggagcagctattgcaaccattgacgactggtatcctgaagccactgagccactaagggtcggacggtttggggttcatcgcgaagatgtcacttgctaccgtcatccgtctaccggaaaagattttttctcgatattacaacaagcagagcactatattgaagtgttgagcgccaacaaaactcccgctcaagaaactatcaacgacatgcactttttaatggctaacctgattaagggtgggatgttccagcataaaggagactgactgtgaaatggtattataagacaatcacctttctgccagagttgtgcaacaacgagtcactggctgcaaagtgtctccgcgttctgcatggatttaactatcagtatgagacacgaaatatcggcgtttcatttccgctttggtgtgatgcaacggttggaaaaaagatttcatttgtcagcaagaacaagatagaactcgacttactacttaaacaacactatttcgtccaaatggaacaacttcaatactttcatatatccaacactgttctcgtcccagaagattgtacatacgtttcctttagacgctgtcaatctatagataagctcacagcagcagggctggcaaggaaaatcagacgcctggagaaacgtgctctatctagaggcgagcaatttgacccatcatcttttgctcaaaaagagcatactgcaatagcgcactaccactcacttggggagtccagcaaacagacgaaccgcaactttcgactcaatatcaggatgctctcggagcaaccccgtgaggggaactcgatttttagtagctatggcttatcaaattcagaaaactcgtttcagcctgtacccttaatctgacctaggctgctgccaccgctgagcaataactagcataaccccttggggcctctaaacgggtcttgaggggttttttgctgaaacctcaggcatttgagaagcacacggtcacactgcttccggtagtcaataaaccggtaaaccagcaatagacataagcggctatttaacgaccctgccctgaaccgacgaccgggtcatcgtggccggatcttgcggcccctcggcttgaacgaattgttagacattatttgccgactaccttggtgatctcgcctttcacgtagtggacaaattcttccaactgatctgcgcgcgaggccaagcgatcttcttcttgtccaagataagcctgtctagcttcaagtatgacgggctgatactgggccggcaggcgctccattgcccagtcggcagcgacatccttcggcgcgattttgccggttactgcgctgtaccaaatgcgggacaacgtaagcactacatttcgctcatcgccagcccagtcgggcggcgagttccatagcgttaaggtttcatttagcgcctcaaatagatcctgttcaggaaccggatcaaagagttcctccgccgctggacctaccaaggcaacgctatgttctcttgcttttgtcagcaagatagccagatcaatgtcgatcgtggctggctcgaagatacctgcaagaatgtcattgcgctgccattctccaaattgcagttcgcgcttagctggataacgccacggaatgatgtcgtcgtgcacaacaatggtgacttctacagcgcggagaatctcgctctctccaggggaagccgaagtttccaaaaggtcgttgatcaaagctcgccgcgttgtttcatcaagccttacggtcaccgtaaccagcaaatcaatatcactgtgtggcttcaggccgccatccactgcggagccgtacaaatgtacggccagcaacgtcggttcgagatggcgctcgatgacgccaactacctctgatagttgagtcgatacttcggcgatcaccgcttccctcatactcttcctttttcaatattattgaagcatttatcagggttattgtctcatgagcggatacatatttgaatgtatttagaaaaataaacaaatagctagctcactcggtcgctacgctccgggcgtgagactgcggcgggcgctgcggacacatacaaagttacccacagattccgtggataagcaggggactaacatgtgaggcaaaacagcagggccgcgccggtggcgtttttccataggctccgccctcctgccagagttcacataaacagacgcttttccggtgcatctgtgggagccgtgaggctcaaccatgaatctgacagtacgggcgaaacccgacaggacttaaagatccccaccgtttccggcgggtcgctccctcttgcgctctcctgttccgaccctgccgtttaccggatacctgttccgcctttctcccttacgggaagtgtggcgctttctcatagctcacacactggtatctcggctcggtgtaggtcgttcgctccaagctgggctgtaagcaagaactccccgttcagcccgactgctgcgccttatccggtaactgttcacttgagtccaacccggaaaagcacggtaaaacgccactggcagcagccattggtaactgggagttcgcagaggatttgtttagctaaacacgcggttgctcttgaagtgtgcgccaaagtccggctacactggaaggacagatttggttgctgtgctctgcgaaagccagttaccacggttaagcagttccccaactgacttaaccttcgatcaaaccacctccccaggtggttttttcgtttacagggcaaaagattacgcgcagaaaaaaaggatctcaagaagatcctttgatcttttctactgaaccgctctagatttcagtgcaatttatctcttcaaatgtagcacctgaagtcagccccatacgatataagttgtaattctcatgttagtcatgccccgcgcccaccggaaggagctgactgggttgaaggctctcaagggcatcggtcgagatcccggtgcctaatgagtgagctaacttacattaattgcgttgcgctcactgcccgctttccagtcgggaaacctgtcgtgccagctgcattaatgaatcggccaacgcgcggggagaggcggtttgcgtattgggcgccagggtggtttttcttttcaccagtgagacgggcaacagctgattgcccttcaccgcctggccctgagagagttgcagcaagcggtccacgctggtttgccccagcaggcgaaaatcctgtttgatggtggttaacggcgggatataacatgagctgtcttcggtatcgtcgtatcccactaccgagatgtccgcaccaacgcgcagcccggactcggtaatggcgcgcattgcgcccagcgccatctgatcgttggcaaccagcatcgcagtgggaacgatgccctcattcagcatttgcatggtttgttgaaaaccggacatggcactccagtcgccttcccgttccgctatcggctgaatttgattgcgagtgagatatttatgccagccagccagacgcagacgcgccgagacagaacttaatgggcccgctaacagcgcgatttgctggtgacccaatgcgaccagatgctccacgcccagtcgcgtaccgtcttcatgggagaaaataatactgttgatgggtgtctggtcagagacatcaagaaataacgccggaacattagtgcaggcagcttccacagcaatggcatcctggtcatccagcggatagttaatgatcagcccactgacgcgttgcgcgagaagattgtgcaccgccgctttacaggcttcgacgccgcttcgttctaccatcgacaccaccacgctggcacccagttgatcggcgcgagatttaatcgccgcgacaatttgcgacggcgcgtgcagggccagactggaggtggcaacgccaatcagcaacgactgtttgcccgccagttgttgtgccacgcggttgggaatgtaattcagctccgccatcgccgcttccactttttcccgcgttttcgcagaaacgtggctggcctggttcaccacgcgggaaacggtctgataagagacaccggcatactctgcgacatcgtataacgttactggtttcac

SEQ ID NO: 108 - DNA, 8421 bp, Synthetic construct
  source 1..8421: mol_type = other DNA
attcaccaccctgaattgactctcttccgggcgctatcatgccataccgcgaaaggttttgcgccattcgatggtgtccgggatctcgacgctctcccttatgcgactcctgcattaggaaattaatacgactcactataggggaattgtgagcggataacaattcccctgtagaaataattttgtttaactttaataaggagatataccatgggtgaactgccgagtaggtagctgataacagtacagcgtgaactgccgagtaggtagctgataacggatccgaattcgagctcggcgcgcctgcaggtcgacaagcttgcggccgcataatgcttaagtcgaacagaaagtaatcgtattgtacacggccgcataatcgaaattaatacgactcactataggggaattgtgagcggataacaattccccatcttagtatattagttaagtataagaaggagatatacatatgtttttgcaaagacctaaaccttacagcgatgaaagtttagaaagtttctttatccgagtggctaacaaaaatggctacggtgatgtccatcgcttcctagaagccactaaacgattccttcaagacattgaccataatggctatcaaacctttccgactgatataactcggataaacccatactcagctaaaaacagttccagcgcacgaactgcgtcattcctgaaacttgcacaattgacatttaatgaaccgccagagctacttgggttggcaattaacagaacaaacatgaaatactcgccgtcaactagcgcggttgttagaggtgcagaagtctttcctcgcagtttactacggacgcactccatcccctgctgtcctttgtgtctgcgagaaaatggctacgcctcctacctttggcactttcaggggtacgaatactgccacagccataacgtacctttaattaccacttgtagctgtggtaaggagtttgactaccgagtatctgggttaaagggcatttgctgcaaatgcaaggagcctatcaccttaaccagcagggagaacggtcatgaggcagcgtgtactgtttcaaactggcttgctggccatgaatctaaacctctgccaaatcttcctaaaagctaccgatggggtttagttcattggtggatgggtattaaagatagcgagttcgatcacttttcgttcgttcaatttttctcaaactggccaaggtcattccactcgataatcgaagatgaagtagagttcaaccttgagcatgctgttgtcagcacgtctgaattacgactaaaagatcttcttggtcgattgtttttcggttcaattcggttacctgagcggaatcttcaacacaatatcatccttggtgagcttctctgctatttagaaaatcgtttatggcaagacaagggattaatcgccaacctcaaaatgaacgcgttagaggcgactgtaatgttaaattgtagcctcgatcagattgcatcaatggttgaacaacgcatcttgaagccaaatcgaaaaagcaagcccaacagccctcttgatgttaccgattatctatttcatttcggcgatattttctgtctttggttagctgagttccaaagcgatgagtttaaccgttcgttttatgtgtcgaggtggtaaatgcaaactctgaaagaactaatcgcatccaatcctgacgacttaacaactgaacttaagagagcatttcgtccactcacaccgcatattgcaattgatggtaatgaacttgacgcactgacgatattagtcaatttaaccgataagactgatgatcagaaagacctgctcgatcgagccaaatgcaagcaaaaacttcgagatgaaaaatggtgggctagctgcataaattgcgttaattacagacaaagccataacccaaaattcccggatatacgttctgaaggcgtgattcgaacccaagccctgggtgaattaccgagtttcctactctcgtcctcaaaaatcccaccataccattggtcatatagccatgattcaaaatacgtcaacaaaagcgcattcctcaccaatgagttttgttgggatggtgagatctcatgtttgggtgagcttcttaaagatgcagatcacccactttggaatactttgaaaaagttaggttgttctcaaaaaacttgcaaagcaatggcaaaacaactagctgatattactctcacgactatcaatgtcacactcgcaccaaattacctgactcaaatatctctccccgatagtgatacatcctacatttcactctctcctgttgcatcgctatcgatgcaaagccactttcatcagaggctccaagatgaaaatcggcatagcgcgataacgcggtttagccgaactaccaacatgggggtcactgcgatgacatgtggcggcgcatttagaatgttaaagtctggcgctaagttttccagcccccctcatcaccgattaaacagtaaacgaagttggttgacgtcagagcatgttcagtcattaaaacagtaccagcgcctcaacaaaagcctcatacctgaaaactctcggattgcactccgtagaaaatacaaaatcgagcttcaaaatatggtcagatcttggtttgcaatgcaagaccatacccttgattcgaacatacttatccaacatttgaatcatgacctatcttacttaggagccacaaaacgttttgcatacgatccagcgatgaccaagctctttactgagcttttgaaacgagagttatcaaattcaatcaataatggtgagcaacacactaatggatcgtttttagtcctaccgaatatcagggtttgtggcgcaacagctttaagctccccggtaacggtggggattccatcacttacagctttctttggcttcgttcacgcatttgaacggaatataaatcgcaccacctcatcgtttcgtgttgaatcctttgcgatatgcgtccatcaactacatgtcgagaagcgaggtttgacagcagagtttgtggaaaaaggcgacgggactatatccgctcccgcgacccgggatgactggcagtgtgatgtcgtatttagccttattttgaacaccaactttgctcaacatattgaccaagatacgttagttacatcactaccaaagcgattggctcggggttcagcaaaaattgcgattgatgactttaaacatatcaactcattctcgacattagaaacagcgatcgaatctctgccaatagaagctggtaggtggttatcactttacgcacagtcaaacaataatctaagtgatctattagcagccatgacagaggaccatcagctcatggcaagctgcgtcggttaccacttgttagaagagcccaaagataaaccaaactccctcagaggttacaaacacgctatcgccgagtgcatcattggactcattaactcaatcacctttagctcagagactgatcccaacacaatcttttggtcgctaaagaactatcaaaactacctagtggtacagccaaggagtatcaacgatgaaactaccgacaaatctagcctatgagcgctctatcgacccatcagatgtctgtttttttgtcgtctggcccgatgatagaaaaacacctttaacctacaattctcgtactctgctcgggcaaatggaagcggcatcattagcctatgatgtctcaggtcaaccaataaaaagtgccaccgctgaggcgttagctcaagggaaccctcatcaagttgatttctgccacgttccatacggtgcgagtcatattgaatgcagtttctccgtctcgttttcttctgaactacgtcaaccatataagtgtaactcaagcaaagttaaacaaacgctagtgcaattagtcgagctctacgaaacgaaaatcggctggactgagctagcaacccgatatttgatgaacatttgcaacggtaaatggctgtggaaaaatacccgtaaagcctattgctggaacattgtacttacaccttggccttggaacggggaaaaggttggatttgaagatattcgtactaactacacctcacggcaagactttaaaaataataaaaattggtctgctatagttgaaatgatcaaaaccgcattttctagtactgatgggctggcgatatttgaagtcagggccaccttgcacttgccaacgaatgctatggtgcggccaagccaagttttcacagaaaaagaaagtggcagtaaaagtaaatctaaaactcaaaacagtcgagtttttcagagtacaactattgatggtgaacgatcgccaatactaggggcctttaaaacgggagcagctattgcaaccattgacgactggtatcctgaagccactgagccactaagggtcggacggtttggggttcatcgcgaagatgtcacttgctaccgtcatccgtctaccggaaaagattttttctcgatattacaacaagcagagcactatattgaagtgttgagcgccaacaaaactcccgctcaagaaactatcaacgacatgcactttttaatggctaacctgattaagggtgggatgttccagcataaaggagactgactgtgaaatggtattataagacaatcacctttctgccagagttgtgcaacaacgagtcactggctgcaaagtgtctccgcgttctgcatggatttaactatcagtatgagacacgaaatatcggcgtttcatttccgctttggtgtgatgcaacggttggaaaaaagatttcatttgtcagcaagaacaagatagaactcgacttactacttaaacaacactatttcgtccaaatggaacaacttcaatactttcatatatccaacactgttctcgtcccagaagattgtacatacgtttcctttagacgctgtcaatctatagataagctcacagcagcagggctggcaaggaaaatcagacgcctggagaaacgtgctctatctagaggcgagcaatttgacccatcatcttttgctcaaaaagagcatactgcaatagcgcactaccactcacttggggagtccagcaaacagacgaaccgcaactttcgactcaatatcaggatgctctcggagcaaccccgtgaggggaactcgatttttagtagctatggcttatcaaattcagaaaactcgtttcagcctgtacccttaatctgacctaggctgctgccaccgctgagcaataactagcataaccccttggggcctctaaacgggtcttgaggggttttttgctgaaacctcaggcatttgagaagcacacggtcacactgcttccggtagtcaataaaccggtaaaccagcaatagacataagcggctatttaacgaccctgccctgaaccgacgaccgggtcatcgtggccggatcttgcggcccctcggcttgaacgaattgttagacattatttgccgactaccttggtgatctcgcctttcacgtagtggacaaattcttccaactgatctgcgcgcgaggccaagcgatcttcttcttgtccaagataagcctgtctagcttcaagtatgacgggctgatactgggccggcaggcgctccattgcccagtcggcagcgacatccttcggcgcgattttgccggttactgcgctgtaccaaatgcgggacaacgtaagcactacatttcgctcatcgccagcccagtcgggcggcgagttccatagcgttaaggtttcatttagcgcctcaaatagatcctgttcaggaaccggatcaaagagttcctccgccgctggacctaccaaggcaacgctatgttctcttgcttttgtcagcaagatagccagatcaatgtcgatcgtggctggctcgaagatacctgcaagaatgtcattgcgctgccattctccaaattgcagttcgcgcttagctggataacgccacggaatgatgtcgtcgtgcacaacaatggtgacttctacagcgcggagaatctcgctctctccaggggaagccgaagtttccaaaaggtcgttgatcaaagctcgccgcgttgtttcatcaagccttacggtcaccgtaaccagcaaatcaatatcactgtgtggcttcaggccgccatccactgcggagccgtacaaatgtacggccagcaacgtcggttcgagatggcgctcgatgacgccaactacctctgatagttgagtcgatacttcggcgatcaccgcttccctcatactcttcctttttcaatattattgaagcatttatcagggttattgtctcatgagcggatacatatttgaatgtatttagaaaaataaacaaatagctagctcactcggtcgctacgctccgggcgtgagactgcggcgggcgctgcggacacatacaaagttacccacagattccgtggataagcaggggactaacatgtgaggcaaaacagcagggccgcgccggtggcgtttttccataggctccgccctcctgccagagttcacataaacagacgcttttccggtgcatctgtgggagccgtgaggctcaaccatgaatctgacagtacgggcgaaacccgacaggacttaaagatccccaccgtttccggcgggtcgctccctcttgcgctctcctgttccgaccctgccgtttaccggatacctgttccgcctttctcccttacgggaagtgtggcgctttctcatagctcacacactggtatctcggctcggtgtaggtcgttcgctccaagctgggctgtaagcaagaactccccgttcagcccgactgctgcgccttatccggtaactgttcacttgagtccaacccggaaaagcacggtaaaacgccactggcagcagccattggtaactgggagttcgcagaggatttgtttagctaaacacgcggttgctcttgaagtgtgcgccaaagtccggctacactggaaggacagatttggttgctgtgctctgcgaaagccagttaccacggttaagcagttccccaactgacttaaccttcgatcaaaccacctccccaggtggttttttcgtttacagggcaaaagattacgcgcagaaaaaaaggatctcaagaagatcctttgatcttttctactgaaccgctctagatttcagtgcaatttatctcttcaaatgtagcacctgaagtcagccccatacgatataagttgtaattctcatgttagtcatgccccgcgcccaccggaaggagctgactgggttgaaggctctcaagggcatcggtcgagatcccggtgcctaatgagtgagctaacttacattaattgcgttgcgctcactgcccgctttccagtcgggaaacctgtcgtgccagctgcattaatgaatcggccaacgcgcggggagaggcggtttgcgtattgggcgccagggtggtttttcttttcaccagtgagacgggcaacagctgattgcccttcaccgcctggccctgagagagttgcagcaagcggtccacgctggtttgccccagcaggcgaaaatcctgtttgatggtggttaacggcgggatataacatgagctgtcttcggtatcgtcgtatcccactaccgagatgtccgcaccaacgcgcagcccggactcggtaatggcgcgcattgcgcccagcgccatctgatcgttggcaaccagcatcgcagtgggaacgatgccctcattcagcatttgcatggtttgttgaaaaccggacatggcactccagtcgccttcccgttccgctatcggctgaatttgattgcgagtgagatatttatgccagccagccagacgcagacgcgccgagacagaacttaatgggcccgctaacagcgcgatttgctggtgacccaatgcgaccagatgctccacgcccagtcgcgtaccgtcttcatgggagaaaataatactgttgatgggtgtctggtcagagacatcaagaaataacgccggaacattagtgcaggcagcttccacagcaatggcatcctggtcatccagcggatagttaatgatcagcccactgacgcgttgcgcgagaagattgtgcaccgccgctttacaggcttcgacgccgcttcgttctaccatcgacaccaccacgctggcacccagttgatcggcgcgagatttaatcgccgcgacaatttgcgacggcgcgtgcagggccagactggaggtggcaacgccaatcagcaacgactgtttgcccgccagttgttgtgccacgcggttgggaatgtaattcagctccgccatcgccgcttccactttttcccgcgttttcgcagaaacgtggctggcctggttcaccacgcgggaaacggtctgataagagacaccggcatactctgcgacatcgtataacgttactggtttcac

SEQ ID NO: 109 - DNA, 8427 bp, Synthetic construct
  source 1..8427: mol_type = other DNA
attcaccaccctgaattgactctcttccgggcgctatcatgccataccgcgaaaggttttgcgccattcgatggtgtccgggatctcgacgctctcccttatgcgactcctgcattaggaaattaatacgactcactataggggaattgtgagcggataacaattcccctgtagaaataattttgtttaactttaataaggagatataccatgggtgaactgccgagtaggtagctgataacagtacagcgcggctgtgaactgccgagtaggtagctgataacggatccgaattcgagctcggcgcgcctgcaggtcgacaagcttgcggccgcataatgcttaagtcgaacagaaagtaatcgtattgtacacggccgcataatcgaaattaatacgactcactataggggaattgtgagcggataacaattccccatcttagtatattagttaagtataagaaggagatatacatatgtttttgcaaagacctaaaccttacagcgatgaaagtttagaaagtttctttatccgagtggctaacaaaaatggctacggtgatgtccatcgcttcctagaagccactaaacgattccttcaagacattgaccataatggctatcaaacctttccgactgatataactcggataaacccatactcagctaaaaacagttccagcgcacgaactgcgtcattcctgaaacttgcacaattgacatttaatgaaccgccagagctacttgggttggcaattaacagaacaaacatgaaatactcgccgtcaactagcgcggttgttagaggtgcagaagtctttcctcgcagtttactacggacgcactccatcccctgctgtcctttgtgtctgcgagaaaatggctacgcctcctacctttggcactttcaggggtacgaatactgccacagccataacgtacctttaattaccacttgtagctgtggtaaggagtttgactaccgagtatctgggttaaagggcatttgctgcaaatgcaaggagcctatcaccttaaccagcagggagaacggtcatgaggcagcgtgtactgtttcaaactggcttgctggccatgaatctaaacctctgccaaatcttcctaaaagctaccgatggggtttagttcattggtggatgggtattaaagatagcgagttcgatcacttttcgttcgttcaatttttctcaaactggccaaggtcattccactcgataatcgaagatgaagtagagttcaaccttgagcatgctgttgtcagcacgtctgaattacgactaaaagatcttcttggtcgattgtttttcggttcaattcggttacctgagcggaatcttcaacacaatatcatccttggtgagcttctctgctatttagaaaatcgtttatggcaagacaagggattaatcgccaacctcaaaatgaacgcgttagaggcgactgtaatgttaaattgtagcctcgatcagattgcatcaatggttgaacaacgcatcttgaagccaaatcgaaaaagcaagcccaacagccctcttgatgttaccgattatctatttcatttcggcgatattttctgtctttggttagctgagttccaaagcgatgagtttaaccgttcgttttatgtgtcgaggtggtaaatgcaaactctgaaagaactaatcgcatccaatcctgacgacttaacaactgaacttaagagagcatttcgtccactcacaccgcatattgcaattgatggtaatgaacttgacgcactgacgatattagtcaatttaaccgataagactgatgatcagaaagacctgctcgatcgagccaaatgcaagcaaaaacttcgagatgaaaaatggtgggctagctgcataaattgcgttaattacagacaaagccataacccaaaattcccggatatacgttctgaaggcgtgattcgaacccaagccctgggtgaattaccgagtttcctactctcgtcctcaaaaatcccaccataccattggtcatatagccatgattcaaaatacgtcaacaaaagcgcattcctcaccaatgagttttgttgggatggtgagatctcatgtttgggtgagcttcttaaagatgcagatcacccactttggaatactttgaaaaagttaggttgttctcaaaaaacttgcaaagcaatggcaaaacaactagctgatattactctcacgactatcaatgtcacactcgcaccaaattacctgactcaaatatctctccccgatagtgatacatcctacatttcactctctcctgttgcatcgctatcgatgcaaagccactttcatcagaggctccaagatgaaaatcggcatagcgcgataacgcggtttagccgaactaccaacatgggggtcactgcgatgacatgtggcggcgcatttagaatgttaaagtctggcgctaagttttccagcccccctcatcaccgattaaacagtaaacgaagttggttgacgtcagagcatgttcagtcattaaaacagtaccagcgcctcaacaaaagcctcatacctgaaaactctcggattgcactccgtagaaaatacaaaatcgagcttcaaaatatggtcagatcttggtttgcaatgcaagaccatacccttgattcgaacatacttatccaacatttgaatcatgacctatcttacttaggagccacaaaacgttttgcatacgatccagcgatgaccaagctctttactgagcttttgaaacgagagttatcaaattcaatcaataatggtgagcaacacactaatggatcgtttttagtcctaccgaatatcagggtttgtggcgcaacagctttaagctccccggtaacggtggggattccatcacttacagctttctttggcttcgttcacgcatttgaacggaatataaatcgcaccacctcatcgtttcgtgttgaatcctttgcgatatgcgtccatcaactacatgtcgagaagcgaggtttgacagcagagtttgtggaaaaaggcgacgggactatatccgctcccgcgacccgggatgactggcagtgtgatgtcgtatttagccttattttgaacaccaactttgctcaacatattgaccaagatacgttagttacatcactaccaaagcgattggctcggggttcagcaaaaattgcgattgatgactttaaacatatcaactcattctcgacattagaaacagcgatcgaatctctgccaatagaagctggtaggtggttatcactttacgcacagtcaaacaataatctaagtgatctattagcagccatgacagaggaccatcagctcatggcaagctgcgtcggttaccacttgttagaagagcccaaagataaaccaaactccctcagaggttacaaacacgctatcgccgagtgcatcattggactcattaactcaatcacctttagctcagagactgatcccaacacaatcttttggtcgctaaagaactatcaaaactacctagtggtacagccaaggagtatcaacgatgaaactaccgacaaatctagcctatgagcgctctatcgacccatcagatgtctgtttttttgtcgtctggcccgatgatagaaaaacacctttaacctacaattctcgtactctgctcgggcaaatggaagcggcatcattagcctatgatgtctcaggtcaaccaataaaaagtgccaccgctgaggcgttagctcaagggaaccctcatcaagttgatttctgccacgttccatacggtgcgagtcatattgaatgcagtttctccgtctcgttttcttctgaactacgtcaaccatataagtgtaactcaagcaaagttaaacaaacgctagtgcaattagtcgagctctacgaaacgaaaatcggctggactgagctagcaacccgatatttgatgaacatttgcaacggtaaatggctgtggaaaaatacccgtaaagcctattgctggaacattgtacttacaccttggccttggaacggggaaaaggttggatttgaagatattcgtactaactacacctcacggcaagactttaaaaataataaaaattggtctgctatagttgaaatgatcaaaaccgcattttctagtactgatgggctggcgatatttgaagtcagggccaccttgcacttgccaacgaatgctatggtgcggccaagccaagttttcacagaaaaagaaagtggcagtaaaagtaaatctaaaactcaaaacagtcgagtttttcagagtacaactattgatggtgaacgatcgccaatactaggggcctttaaaacgggagcagctattgcaaccattgacgactggtatcctgaagccactgagccactaagggtcggacggtttggggttcatcgcgaagatgtcacttgctaccgtcatccgtctaccggaaaagattttttctcgatattacaacaagcagagcactatattgaagtgttgagcgccaacaaaactcccgctcaagaaactatcaacgacatgcactttttaatggctaacctgattaagggtgggatgttccagcataaaggagactgactgtgaaatggtattataagacaatcacctttctgccagagttgtgcaacaacgagtcactggctgcaaagtgtctccgcgttctgcatggatttaactatcagtatgagacacgaaatatcggcgtttcatttccgctttggtgtgatgcaacggttggaaaaaagatttcatttgtcagcaagaacaagatagaactcgacttactacttaaacaacactatttcgtccaaatggaacaacttcaatactttcatatatccaacactgttctcgtcccagaagattgtacatacgtttcctttagacgctgtcaatctatagataagctcacagcagcagggctggcaaggaaaatcagacgcctggagaaacgtgctctatctagaggcgagcaatttgacccatcatcttttgctcaaaaagagcatactgcaatagcgcactaccactcacttggggagtccagcaaacagacgaaccgcaactttcgactcaatatcaggatgctctcggagcaaccccgtgaggggaactcgatttttagtagctatggcttatcaaattcagaaaactcgtttcagcctgtacccttaatctgacctaggctgctgccaccgctgagcaataactagcataaccccttggggcctctaaacgggtcttgaggggttttttgctgaaacctcaggcatttgagaagcacacggtcacactgcttccggtagtcaataaaccggtaaaccagcaatagacataagcggctatttaacgaccctgccctgaaccgacgaccgggtcatcgtggccggatcttgcggcccctcggcttgaacgaattgttagacattatttgccgactaccttggtgatctcgcctttcacgtagtggacaaattcttccaactgatctgcgcgcgaggccaagcgatcttcttcttgtccaagataagcctgtctagcttcaagtatgacgggctgatactgggccggcaggcgctccattgcccagtcggcagcgacatccttcggcgcgattttgccggttactgcgctgtaccaaatgcgggacaacgtaagcactacatttcgctcatcgccagcccagtcgggcggcgagttccatagcgttaaggtttcatttagcgcctcaaatagatcctgttcaggaaccggatcaaagagttcctccgccgctggacctaccaaggcaacgctatgttctcttgcttttgtcagcaagatagccagatcaatgtcgatcgtggctggctcgaagatacctgcaagaatgtcattgcgctgccattctccaaattgcagttcgcgcttagctggataacgccacggaatgatgtcgtcgtgcacaacaatggtgacttctacagcgcggagaatctcgctctctccaggggaagccgaagtttccaaaaggtcgttgatcaaagctcgccgcgttgtttcatcaagccttacggtcaccgtaaccagcaaatcaatatcactgtgtggcttcaggccgccatccactgcggagccgtacaaatgtacggccagcaacgtcggttcgagatggcgctcgatgacgccaactacctctgatagttgagtcgatacttcggcgatcaccgcttccctcatactcttcctttttcaatattattgaagcatttatcagggttattgtctcatgagcggatacatatttgaatgtatttagaaaaataaacaaatagctagctcactcggtcgctacgctccgggcgtgagactgcggcgggcgctgcggacacatacaaagttacccacagattccgtggataagcaggggactaacatgtgaggcaaaacagcagggccgcgccggtggcgtttttccataggctccgccctcctgccagagttcacataaacagacgcttttccggtgcatctgtgggagccgtgaggctcaaccatgaatctgacagtacgggcgaaacccgacaggacttaaagatccccaccgtttccggcgggtcgctccctcttgcgctctcctgttccgaccctgccgtttaccggatacctgttccgcctttctcccttacgggaagtgtggcgctttctcatagctcacacactggtatctcggctcggtgtaggtcgttcgctccaagctgggctgtaagcaagaactccccgttcagcccgactgctgcgccttatccggtaactgttcacttgagtccaacccggaaaagcacggtaaaacgccactggcagcagccattggtaactgggagttcgcagaggatttgtttagctaaacacgcggttgctcttgaagtgtgcgccaaagtccggctacactggaaggacagatttggttgctgtgctctgcgaaagccagttaccacggttaagcagttccccaactgacttaaccttcgatcaaaccacctccccaggtggttttttcgtttacagggcaaaagattacgcgcagaaaaaaaggatctcaagaagatcctttgatcttttctactgaaccgctctagatttcagtgcaatttatctcttcaaatgtagcacctgaagtcagccccatacgatataagttgtaattctcatgttagtcatgccccgcgcccaccggaaggagctgactgggttgaaggctctcaagggcatcggtcgagatcccggtgcctaatgagtgagctaacttacattaattgcgttgcgctcactgcccgctttccagtcgggaaacctgtcgtgccagctgcattaatgaatcggccaacgcgcggggagaggcggtttgcgtattgggcgccagggtggtttttcttttcaccagtgagacgggcaacagctgattgcccttcaccgcctggccctgagagagttgcagcaagcggtccacgctggtttgccccagcaggcgaaaatcctgtttgatggtggttaacggcgggatataacatgagctgtcttcggtatcgtcgtatcccactaccgagatgtccgcaccaacgcgcagcccggactcggtaatggcgcgcattgcgcccagcgccatctgatcgttggcaaccagcatcgcagtgggaacgatgccctcattcagcatttgcatggtttgttgaaaaccggacatggcactccagtcgccttcccgttccgctatcggctgaatttgattgcgagtgagatatttatgccagccagccagacgcagacgcgccgagacagaacttaatgggcccgctaacagcgcgatttgctggtgacccaatgcgaccagatgctccacgcccagtcgcgtaccgtcttcatgggagaaaataatactgttgatgggtgtctggtcagagacatcaagaaataacgccggaacattagtgcaggcagcttccacagcaatggcatcctggtcatccagcggatagttaatgatcagcccactgacgcgttgcgcgagaagattgtgcaccgccgctttacaggcttcgacgccgcttcgttctaccatcgacaccaccacgctggcacccagttgatcggcgcgagatttaatcgccgcgacaatttgcgacggcgcgtgcagggccagactggaggtggcaacgccaatcagcaacgactgtttgcccgccagttgttgtgccacgcggttgggaatgtaattcagctccgccatcgccgcttccactttttcccgcgttttcgcagaaacgtggctggcctggttcaccacgcgggaaacggtctgataagagacaccggcatactctgcgacatcgtataacgttactggtttcac

SEQ ID NO: 110 - DNA, 8433 bp, Synthetic construct
  source 1..8433: mol_type = other DNA
attcaccaccctgaattgactctcttccgggcgctatcatgccataccgcgaaaggttttgcgccattcgatggtgtccgggatctcgacgctctcccttatgcgactcctgcattaggaaattaatacgactcactataggggaattgtgagcggataacaattcccctgtagaaataattttgtttaactttaataaggagatataccatgggtgaactgccgagtaggtagctgataacagtacagcgcggctgaaatcgtgaactgccgagtaggtagctgataacggatccgaattcgagctcggcgcgcctgcaggtcgacaagcttgcggccgcataatgcttaagtcgaacagaaagtaatcgtattgtacacggccgcataatcgaaattaatacgactcactataggggaattgtgagcggataacaattccccatcttagtatattagttaagtataagaaggagatatacatatgtttttgcaaagacctaaaccttacagcgatgaaagtttagaaagtttctttatccgagtggctaacaaaaatggctacggtgatgtccatcgcttcctagaagccactaaacgattccttcaagacattgaccataatggctatcaaacctttccgactgatataactcggataaacccatactcagctaaaaacagttccagcgcacgaactgcgtcattcctgaaacttgcacaattgacatttaatgaaccgccagagctacttgggttggcaattaacagaacaaacatgaaatactcgccgtcaactagcgcggttgttagaggtgcagaagtctttcctcgcagtttactacggacgcactccatcccctgctgtcctttgtgtctgcgagaaaatggctacgcctcctacctttggcactttcaggggtacgaatactgccacagccataacgtacctttaattaccacttgtagctgtggtaaggagtttgactaccgagtatctgggttaaagggcatttgctgcaaatgcaaggagcctatcaccttaaccagcagggagaacggtcatgaggcagcgtgtactgtttcaaactggcttgctggccatgaatctaaacctctgccaaatcttcctaaaagctaccgatggggtttagttcattggtggatgggtattaaagatagcgagttcgatcacttttcgttcgttcaatttttctcaaactggccaaggtcattccactcgataatcgaagatgaagtagagttcaaccttgagcatgctgttgtcagcacgtctgaattacgactaaaagatcttcttggtcgattgtttttcggttcaattcggttacctgagcggaatcttcaacacaatatcatccttggtgagcttctctgctatttagaaaatcgtttatggcaagacaagggattaatcgccaacctcaaaatgaacgcgttagaggcgactgtaatgttaaattgtagcctcgatcagattgcatcaatggttgaacaacgcatcttgaagccaaatcgaaaaagcaagcccaacagccctcttgatgttaccgattatctatttcatttcggcgatattttctgtctttggttagctgagttccaaagcgatgagtttaaccgttcgttttatgtgtcgaggtggtaaatgcaaactctgaaagaactaatcgcatccaatcctgacgacttaacaactgaacttaagagagcatttcgtccactcacaccgcatattgcaattgatggtaatgaacttgacgcactgacgatattagtcaatttaaccgataagactgatgatcagaaagacctgctcgatcgagccaaatgcaagcaaaaacttcgagatgaaaaatggtgggctagctgcataaattgcgttaattacagacaaagccataacccaaaattcccggatatacgttctgaaggcgtgattcgaacccaagccctgggtgaattaccgagtttcctactctcgtcctcaaaaatcccaccataccattggtcatatagccatgattcaaaatacgtcaacaaaagcgcattcctcaccaatgagttttgttgggatggtgagatctcatgtttgggtgagcttcttaaagatgcagatcacccactttggaatactttgaaaaagttaggttgttctcaaaaaacttgcaaagcaatggcaaaacaactagctgatattactctcacgactatcaatgtcacactcgcaccaaattacctgactcaaatatctctccccgatagtgatacatcctacatttcactctctcctgttgcatcgctatcgatgcaaagccactttcatcagaggctccaagatgaaaatcggcatagcgcgataacgcggtttagccgaactaccaacatgggggtcactgcgatgacatgtggcggcgcatttagaatgttaaagtctggcgctaagttttccagcccccctcatcaccgattaaacagtaaacgaagttggttgacgtcagagcatgttcagtcattaaaacagtaccagcgcctcaacaaaagcctcatacctgaaaactctcggattgcactccgtagaaaatacaaaatcgagcttcaaaatatggtcagatcttggtttgcaatgcaagaccatacccttgattcgaacatacttatccaacatttgaatcatgacctatcttacttaggagccacaaaacgttttgcatacgatccagcgatgaccaagctctttactgagcttttgaaacgagagttatcaaattcaatcaataatggtgagcaacacactaatggatcgtttttagtcctaccgaatatcagggtttgtggcgcaacagctttaagctccccggtaacggtggggattccatcacttacagctttctttggcttcgttcacgcatttgaacggaatataaatcgcaccacctcatcgtttcgtgttgaatcctttgcgatatgcgtccatcaactacatgtcgagaagcgaggtttgacagcagagtttgtggaaaaaggcgacgggactatatccgctcccgcgacccgggatgactggcagtgtgatgtcgtatttagccttattttgaacaccaactttgctcaacatattgaccaagatacgttagttacatcactaccaaagcgattggctcggggttcagcaaaaattgcgattgatgactttaaacatatcaactcattctcgacattagaaacagcgatcgaatctctgccaatagaagctggtaggtggttatcactttacgcacagtcaaacaataatctaagtgatctattagcagccatgacagaggaccatcagctcatggcaagctgcgtcggttaccacttgttagaagagcccaaagataaaccaaactccctcagaggttacaaacacgctatcgccgagtgcatcattggactcattaactcaatcacctttagctcagagactgatcccaacacaatcttttggtcgctaaagaactatcaaaactacctagtggtacagccaaggagtatcaacgatgaaactaccgacaaatctagcctatgagcgctctatcgacccatcagatgtctgtttttttgtcgtctggcccgatgatagaaaaacacctttaacctacaattctcgtactctgctcgggcaaatggaagcggcatcattagcctatgatgtctcaggtcaaccaataaaaagtgccaccgctgaggcgttagctcaagggaaccctcatcaagttgatttctgccacgttccatacggtgcgagtcatattgaatgcagtttctccgtctcgttttcttctgaactacgtcaaccatataagtgtaactcaagcaaagttaaacaaacgctagtgcaattagtcgagctctacgaaacgaaaatcggctggactgagctagcaacccgatatttgatgaacatttgcaacggtaaatggctgtggaaaaatacccgtaaagcctattgctggaacattgtacttacaccttggccttggaacggggaaaaggttggatttgaagatattcgtactaactacacctcacggcaagactttaaaaataataaaaattggtctgctatagttgaaatgatcaaaaccgcattttctagtactgatgggctggcgatatttgaagtcagggccaccttgcacttgccaacgaatgctatggtgcggccaagccaagttttcacagaaaaagaaagtggcagtaaaagtaaatctaaaactcaaaacagtcgagtttttcagagtacaactattgatggtgaacgatcgccaatactaggggcctttaaaacgggagcagctattgcaaccattgacgactggtatcctgaagccactgagccactaagggtcggacggtttggggttcatcgcgaagatgtcacttgctaccgtcatccgtctaccggaaaagattttttctcgatattacaacaagcagagcactatattgaagtgttgagcgccaacaaaactcccgctcaagaaactatcaacgacatgcactttttaatggctaacctgattaagggtgggatgttccagcataaaggagactgactgtgaaatggtattataagacaatcacctttctgccagagttgtgcaacaacgagtcactggctgcaaagtgtctccgcgttctgcatggatttaactatcagtatgagacacgaaatatcggcgtttcatttccgctttggtgtgatgcaacggttggaaaaaagatttcatttgtcagcaagaacaagatagaactcgacttactacttaaacaacactatttcgtccaaatggaacaacttcaatactttcatatatccaacactgttctcgtcccagaagattgtacatacgtttcctttagacgctgtcaatctatagataagctcacagcagcagggctggcaaggaaaatcagacgcctggagaaacgtgctctatctagaggcgagcaatttgacccatcatcttttgctcaaaaagagcatactgcaatagcgcactaccactcacttggggagtccagcaaacagacgaaccgcaactttcgactcaatatcaggatgctctcggagcaaccccgtgaggggaactcgatttttagtagctatggcttatcaaattcagaaaactcgtttcagcctgtacccttaatctgacctaggctgctgccaccgctgagcaataactagcataaccccttggggcctctaaacgggtcttgaggggttttttgctgaaacctcaggcatttgagaagcacacggtcacactgcttccggtagtcaataaaccggtaaaccagcaatagacataagcggctatttaacgaccctgccctgaaccgacgaccgggtcatcgtggccggatcttgcggcccctcggcttgaacgaattgttagacattatttgccgactaccttggtgatctcgcctttcacgtagtggacaaattcttccaactgatctgcgcgcgaggccaagcgatcttcttcttgtccaagataagcctgtctagcttcaagtatgacgggctgatactgggccggcaggcgctccattgcccagtcggcagcgacatccttcggcgcgattttgccggttactgcgctgtaccaaatgcgggacaacgtaagcactacatttcgctcatcgccagcccagtcgggcggcgagttccatagcgttaaggtttcatttagcgcctcaaatagatcctgttcaggaaccggatcaaagagttcctccgccgctggacctaccaaggcaacgctatgttctcttgcttttgtcagcaagatagccagatcaatgtcgatcgtggctggctcgaagatacctgcaagaatgtcattgcgctgccattctccaaattgcagttcgcgcttagctggataacgccacggaatgatgtcgtcgtgcacaacaatggtgacttctacagcgcggagaatctcgctctctccaggggaagccgaagtttccaaaaggtcgttgatcaaagctcgccgcgttgtttcatcaagccttacggtcaccgtaaccagcaaatcaatatcactgtgtggcttcaggccgccatccactgcggagccgtacaaatgtacggccagcaacgtcggttcgagatggcgctcgatgacgccaactacctctgatagttgagtcgatacttcggcgatcaccgcttccctcatactcttcctttttcaatattattgaagcatttatcagggttattgtctcatgagcggatacatatttgaatgtatttagaaaaataaacaaatagctagctcactcggtcgctacgctccgggcgtgagactgcggcgggcgctgcggacacatacaaagttacccacagattccgtggataagcaggggactaacatgtgaggcaaaacagcagggccgcgccggtggcgtttttccataggctccgccctcctgccagagttcacataaacagacgcttttccggtgcatctgtgggagccgtgaggctcaaccatgaatctgacagtacgggcgaaacccgacaggacttaaagatccccaccgtttccggcgggtcgctccctcttgcgctctcctgttccgaccctgccgtttaccggatacctgttccgcctttctcccttacgggaagtgtggcgctttctcatagctcacacactggtatctcggctcggtgtaggtcgttcgctccaagctgggctgtaagcaagaactccccgttcagcccgactgctgcgccttatccggtaactgttcacttgagtccaacccggaaaagcacggtaaaacgccactggcagcagccattggtaactgggagttcgcagaggatttgtttagctaaacacgcggttgctcttgaagtgtgcgccaaagtccggctacactggaaggacagatttggttgctgtgctctgcgaaagccagttaccacggttaagcagttccccaactgacttaaccttcgatcaaaccacctccccaggtggttttttcgtttacagggcaaaagattacgcgcagaaaaaaaggatctcaagaagatcctttgatcttttctactgaaccgctctagatttcagtgcaatttatctcttcaaatgtagcacctgaagtcagccccatacgatataagttgtaattctcatgttagtcatgccccgcgcccaccggaaggagctgactgggttgaaggctctcaagggcatcggtcgagatcccggtgcctaatgagtgagctaacttacattaattgcgttgcgctcactgcccgctttccagtcgggaaacctgtcgtgccagctgcattaatgaatcggccaacgcgcggggagaggcggtttgcgtattgggcgccagggtggtttttcttttcaccagtgagacgggcaacagctgattgcccttcaccgcctggccctgagagagttgcagcaagcggtccacgctggtttgccccagcaggcgaaaatcctgtttgatggtggttaacggcgggatataacatgagctgtcttcggtatcgtcgtatcccactaccgagatgtccgcaccaacgcgcagcccggactcggtaatggcgcgcattgcgcccagcgccatctgatcgttggcaaccagcatcgcagtgggaacgatgccctcattcagcatttgcatggtttgttgaaaaccggacatggcactccagtcgccttcccgttccgctatcggctgaatttgattgcgagtgagatatttatgccagccagccagacgcagacgcgccgagacagaacttaatgggcccgctaacagcgcgatttgctggtgacccaatgcgaccagatgctccacgcccagtcgcgtaccgtcttcatgggagaaaataatactgttgatgggtgtctggtcagagacatcaagaaataacgccggaacattagtgcaggcagcttccacagcaatggcatcctggtcatccagcggatagttaatgatcagcccactgacgcgttgcgcgagaagattgtgcaccgccgctttacaggcttcgacgccgcttcgttctaccatcgacaccaccacgctggcacccagttgatcggcgcgagatttaatcgccgcgacaatttgcgacggcgcgtgcagggccagactggaggtggcaacgccaatcagcaacgactgtttgcccgccagttgttgtgccacgcggttgggaatgtaattcagctccgccatcgccgcttccactttttcccgcgttttcgcagaaacgtggctggcctggttcaccacgcgggaaacggtctgataagagacaccggcatactctgcgacatcgtataacgttactggtttcac

SEQ ID NO: 111 - DNA, 8439 bp, Synthetic construct
  source 1..8439: mol_type = other DNA
attcaccaccctgaattgactctcttccgggcgctatcatgccataccgcgaaaggttttgcgccattcgatggtgtccgggatctcgacgctctcccttatgcgactcctgcattaggaaattaatacgactcactataggggaattgtgagcggataacaattcccctgtagaaataattttgtttaactttaataaggagatataccatgggtgaactgccgagtaggtagctgataacagtacagcgcggctgaaatcatcattgtgaactgccgagtaggtagctgataacggatccgaattcgagctcggcgcgcctgcaggtcgacaagcttgcggccgcataatgcttaagtcgaacagaaagtaatcgtattgtacacggccgcataatcgaaattaatacgactcactataggggaattgtgagcggataacaattccccatcttagtatattagttaagtataagaaggagatatacatatgtttttgcaaagacctaaaccttacagcgatgaaagtttagaaagtttctttatccgagtggctaacaaaaatggctacggtgatgtccatcgcttcctagaagccactaaacgattccttcaagacattgaccataatggctatcaaacctttccgactgatataactcggataaacccatactcagctaaaaacagttccagcgcacgaactgcgtcattcctgaaacttgcacaattgacatttaatgaaccgccagagctacttgggttggcaattaacagaacaaacatgaaatactcgccgtcaactagcgcggttgttagaggtgcagaagtctttcctcgcagtttactacggacgcactccatcccctgctgtcctttgtgtctgcgagaaaatggctacgcctcctacctttggcactttcaggggtacgaatactgccacagccataacgtacctttaattaccacttgtagctgtggtaaggagtttgactaccgagtatctgggttaaagggcatttgctgcaaatgcaaggagcctatcaccttaaccagcagggagaacggtcatgaggcagcgtgtactgtttcaaactggcttgctggccatgaatctaaacctctgccaaatcttcctaaaagctaccgatggggtttagttcattggtggatgggtattaaagatagcgagttcgatcacttttcgttcgttcaatttttctcaaactggccaaggtcattccactcgataatcgaagatgaagtagagttcaaccttgagcatgctgttgtcagcacgtctgaattacgactaaaagatcttcttggtcgattgtttttcggttcaattcggttacctgagcggaatcttcaacacaatatcatccttggtgagcttctctgctatttagaaaatcgtttatggcaagacaagggattaatcgccaacctcaaaatgaacgcgttagaggcgactgtaatgttaaattgtagcctcgatcagattgcatcaatggttgaacaacgcatcttgaagccaaatcgaaaaagcaagcccaacagccctcttgatgttaccgattatctatttcatttcggcgatattttctgtctttggttagctgagttccaaagcgatgagtttaaccgttcgttttatgtgtcgaggtggtaaatgcaaactctgaaagaactaatcgcatccaatcctgacgacttaacaactgaacttaagagagcatttcgtccactcacaccgcatattgcaattgatggtaatgaacttgacgcactgacgatattagtcaatttaaccgataagactgatgatcagaaagacctgctcgatcgagccaaatgcaagcaaaaacttcgagatgaaaaatggtgggctagctgcataaattgcgttaattacagacaaagccataacccaaaattcccggatatacgttctgaaggcgtgattcgaacccaagccctgggtgaattaccgagtttcctactctcgtcctcaaaaatcccaccataccattggtcatatagccatgattcaaaatacgtcaacaaaagcgcattcctcaccaatgagttttgttgggatggtgagatctcatgtttgggtgagcttcttaaagatgcagatcacccactttggaatactttgaaaaagttaggttgttctcaaaaaacttgcaaagcaatggcaaaacaactagctgatattactctcacgactatcaatgtcacactcgcaccaaattacctgactcaaatatctctccccgatagtgatacatcctacatttcactctctcctgttgcatcgctatcgatgcaaagccactttcatcagaggctccaagatgaaaatcggcatagcgcgataacgcggtttagccgaactaccaacatgggggtcactgcgatgacatgtggcggcgcatttagaatgttaaagtctggcgctaagttttccagcccccctcatcaccgattaaacagtaaacgaagttggttgacgtcagagcatgttcagtcattaaaacagtaccagcgcctcaacaaaagcctcatacctgaaaactctcggattgcactccgtagaaaatacaaaatcgagcttcaaaatatggtcagatcttggtttgcaatgcaagaccatacccttgattcgaacatacttatccaacatttgaatcatgacctatcttacttaggagccacaaaacgttttgcatacgatccagcgatgaccaagctctttactgagcttttgaaacgagagttatcaaattcaatcaataatggtgagcaacacactaatggatcgtttttagtcctaccgaatatcagggtttgtggcgcaacagctttaagctccccggtaacggtggggattccatcacttacagctttctttggcttcgttcacgcatttgaacggaatataaatcgcaccacctcatcgtttcgtgttgaatcctttgcgatatgcgtccatcaactacatgtcgagaagcgaggtttgacagcagagtttgtggaaaaaggcgacgggactatatccgctcccgcgacccgggatgactggcagtgtgatgtcgtatttagccttattttgaacaccaactttgctcaacatattgaccaagatacgttagttacatcactaccaaagcgattggctcggggttcagcaaaaattgcgattgatgactttaaacatatcaactcattctcgacattagaaacagcgatcgaatctctgccaatagaagctggtaggtggttatcactttacgcacagtcaaacaataatctaagtgatctattagcagccatgacagaggaccatcagctcatggcaagctgcgtcggttaccacttgttagaagagcccaaagataaaccaaactccctcagaggttacaaacacgctatcgccgagtgcatcattggactcattaactcaatcacctttagctcagagactgatcccaacacaatcttttggtcgctaaagaactatcaaaactacctagtggtacagccaaggagtatcaacgatgaaactaccgacaaatctagcctatgagcgctctatcgacccatcagatgtctgtttttttgtcgtctggcccgatgatagaaaaacacctttaacctacaattctcgtactctgctcgggcaaatggaagcggcatcattagcctatgatgtctcaggtcaaccaataaaaagtgccaccgctgaggcgttagctcaagggaaccctcatcaagttgatttctgccacgttccatacggtgcgagtcatattgaatgcagtttctccgtctcgttttcttctgaactacgtcaaccatataagtgtaactcaagcaaagttaaacaaacgctagtgcaattagtcgagctctacgaaacgaaaatcggctggactgagctagcaacccgatatttgatgaacatttgcaacggtaaatggctgtggaaaaatacccgtaaagcctattgctggaacattgtacttacaccttggccttggaacggggaaaaggttggatttgaagatattcgtactaactacacctcacggcaagactttaaaaataataaaaattggtctgctatagttgaaatgatcaaaaccgcattttctagtactgatgggctggcgatatttgaagtcagggccaccttgcacttgccaacgaatgctatggtgcggccaagccaagttttcacagaaaaagaaagtggcagtaaaagtaaatctaaaactcaaaacagtcgagtttttcagagtacaactattgatggtgaacgatcgccaatactaggggcctttaaaacgggagcagctattgcaaccattgacgactggtatcctgaagccactgagccactaagggtcggacggtttggggttcatcgcgaagatgtcacttgctaccgtcatccgtctaccggaaaagattttttctcgatattacaacaagcagagcactatattgaagtgttgagcgccaacaaaactcccgctcaagaaactatcaacgacatgcactttttaatggctaacctgattaagggtgggatgttccagcataaaggagactgactgtgaaatggtattataagacaatcacctttctgccagagttgtgcaacaacgagtcactggctgcaaagtgtctccgcgttctgcatggatttaactatcagtatgagacacgaaatatcggcgtttcatttccgctttggtgtgatgcaacggttggaaaaaagatttcatttgtcagcaagaacaagatagaactcgacttactacttaaacaacactatttcgtccaaatggaacaacttcaatactttcatatatccaacactgttctcgtcccagaagattgtacatacgtttcctttagacgctgtcaatctatagataagctcacagcagcagggctggcaaggaaaatcagacgcctggagaaacgtgctctatctagaggcgagcaatttgacccatcatcttttgctcaaaaagagcatactgcaatagcgcactaccactcacttggggagtccagcaaacagacgaaccgcaactttcgactcaatatcaggatgctctcggagcaaccccgtgaggggaactcgatttttagtagctatggcttatcaaattcagaaaactcgtttcagcctgtacccttaatctgacctaggctgctgccaccgctgagcaataactagcataaccccttggggcctctaaacgggtcttgaggggttttttgctgaaacctcaggcatttgagaagcacacggtcacactgcttccggtagtcaataaaccggtaaaccagcaatagacataagcggctatttaacgaccctgccctgaaccgacgaccgggtcatcgtggccggatcttgcggcccctcggcttgaacgaattgttagacattatttgccgactaccttggtgatctcgcctttcacgtagtggacaaattcttccaactgatctgcgcgcgaggccaagcgatcttcttcttgtccaagataagcctgtctagcttcaagtatgacgggctgatactgggccggcaggcgctccattgcccagtcggcagcgacatccttcggcgcgattttgccggttactgcgctgtaccaaatgcgggacaacgtaagcactacatttcgctcatcgccagcccagtcgggcggcgagttccatagcgttaaggtttcatttagcgcctcaaatagatcctgttcaggaaccggatcaaagagttcctccgccgctggacctaccaaggcaacgctatgttctcttgcttttgtcagcaagatagccagatcaatgtcgatcgtggctggctcgaagatacctgcaagaatgtcattgcgctgccattctccaaattgcagttcgcgcttagctggataacgccacggaatgatgtcgtcgtgcacaacaatggtgacttctacagcgcggagaatctcgctctctccaggggaagccgaagtttccaaaaggtcgttgatcaaagctcgccgcgttgtttcatcaagccttacggtcaccgtaaccagcaaatcaatatcactgtgtggcttcaggccgccatccactgcggagccgtacaaatgtacggccagcaacgtcggttcgagatggcgctcgatgacgccaactacctctgatagttgagtcgatacttcggcgatcaccgcttccctcatactcttcctttttcaatattattgaagcatttatcagggttattgtctcatgagcggatacatatttgaatgtatttagaaaaataaacaaatagctagctcactcggtcgctacgctccgggcgtgagactgcggcgggcgctgcggacacatacaaagttacccacagattccgtggataagcaggggactaacatgtgaggcaaaacagcagggccgcgccggtggcgtttttccataggctccgccctcctgccagagttcacataaacagacgcttttccggtgcatctgtgggagccgtgaggctcaaccatgaatctgacagtacgggcgaaacccgacaggacttaaagatccccaccgtttccggcgggtcgctccctcttgcgctctcctgttccgaccctgccgtttaccggatacctgttccgcctttctcccttacgggaagtgtggcgctttctcatagctcacacactggtatctcggctcggtgtaggtcgttcgctccaagctgggctgtaagcaagaactccccgttcagcccgactgctgcgccttatccggtaactgttcacttgagtccaacccggaaaagcacggtaaaacgccactggcagcagccattggtaactgggagttcgcagaggatttgtttagctaaacacgcggttgctcttgaagtgtgcgccaaagtccggctacactggaaggacagatttggttgctgtgctctgcgaaagccagttaccacggttaagcagttccccaactgacttaaccttcgatcaaaccacctccccaggtggttttttcgtttacagggcaaaagattacgcgcagaaaaaaaggatctcaagaagatcctttgatcttttctactgaaccgctctagatttcagtgcaatttatctcttcaaatgtagcacctgaagtcagccccatacgatataagttgtaattctcatgttagtcatgccccgcgcccaccggaaggagctgactgggttgaaggctctcaagggcatcggtcgagatcccggtgcctaatgagtgagctaacttacattaattgcgttgcgctcactgcccgctttccagtcgggaaacctgtcgtgccagctgcattaatgaatcggccaacgcgcggggagaggcggtttgcgtattgggcgccagggtggtttttcttttcaccagtgagacgggcaacagctgattgcccttcaccgcctggccctgagagagttgcagcaagcggtccacgctggtttgccccagcaggcgaaaatcctgtttgatggtggttaacggcgggatataacatgagctgtcttcggtatcgtcgtatcccactaccgagatgtccgcaccaacgcgcagcccggactcggtaatggcgcgcattgcgcccagcgccatctgatcgttggcaaccagcatcgcagtgggaacgatgccctcattcagcatttgcatggtttgttgaaaaccggacatggcactccagtcgccttcccgttccgctatcggctgaatttgattgcgagtgagatatttatgccagccagccagacgcagacgcgccgagacagaacttaatgggcccgctaacagcgcgatttgctggtgacccaatgcgaccagatgctccacgcccagtcgcgtaccgtcttcatgggagaaaataatactgttgatgggtgtctggtcagagacatcaagaaataacgccggaacattagtgcaggcagcttccacagcaatggcatcctggtcatccagcggatagttaatgatcagcccactgacgcgttgcgcgagaagattgtgcaccgccgctttacaggcttcgacgccgcttcgttctaccatcgacaccaccacgctggcacccagttgatcggcgcgagatttaatcgccgcgacaatttgcgacggcgcgtgcagggccagactggaggtggcaacgccaatcagcaacgactgtttgcccgccagttgttgtgccacgcggttgggaatgtaattcagctccgccatcgccgcttccactttttcccgcgttttcgcagaaacgtggctggcctggttcaccacgcgggaaacggtctgataagagacaccggcatactctgcgacatcgtataacgttactggtttcac

SEQ ID NO: 112 - DNA, 8451 bp, Synthetic construct
  source 1..8451: mol_type = other DNA
attcaccaccctgaattgactctcttccgggcgctatcatgccataccgcgaaaggttttgcgccattcgatggtgtccgggatctcgacgctctcccttatgcgactcctgcattaggaaattaatacgactcactataggggaattgtgagcggataacaattcccctgtagaaataattttgtttaactttaataaggagatataccatgggtgaactgccgagtaggtagctgataacagtacagcgcggctgaaatcatcattaaagcgagtggcgtgaactgccgagtaggtagctgataacggatccgaattcgagctcggcgcgcctgcaggtcgacaagcttgcggccgcataatgcttaagtcgaacagaaagtaatcgtattgtacacggccgcataatcgaaattaatacgactcactataggggaattgtgagcggataacaattccccatcttagtatattagttaagtataagaaggagatatacatatgtttttgcaaagacctaaaccttacagcgatgaaagtttagaaagtttctttatccgagtggctaacaaaaatggctacggtgatgtccatcgcttcctagaagccactaaacgattccttcaagacattgaccataatggctatcaaacctttccgactgatataactcggataaacccatactcagctaaaaacagttccagcgcacgaactgcgtcattcctgaaacttgcacaattgacatttaatgaaccgccagagctacttgggttggcaattaacagaacaaacatgaaatactcgccgtcaactagcgcggttgttagaggtgcagaagtctttcctcgcagtttactacggacgcactccatcccctgctgtcctttgtgtctgcgagaaaatggctacgcctcctacctttggcactttcaggggtacgaatactgccacagccataacgtacctttaattaccacttgtagctgtggtaaggagtttgactaccgagtatctgggttaaagggcatttgctgcaaatgcaaggagcctatcaccttaaccagcagggagaacggtcatgaggcagcgtgtactgtttcaaactggcttgctggccatgaatctaaacctctgccaaatcttcctaaaagctaccgatggggtttagttcattggtggatgggtattaaagatagcgagttcgatcacttttcgttcgttcaatttttctcaaactggccaaggtcattccactcgataatcgaagatgaagtagagttcaaccttgagcatgctgttgtcagcacgtctgaattacgactaaaagatcttcttggtcgattgtttttcggttcaattcggttacctgagcggaatcttcaacacaatatcatccttggtgagcttctctgctatttagaaaatcgtttatggcaagacaagggattaatcgccaacctcaaaatgaacgcgttagaggcgactgtaatgttaaattgtagcctcgatcagattgcatcaatggttgaacaacgcatcttgaagccaaatcgaaaaagcaagcccaacagccctcttgatgttaccgattatctatttcatttcggcgatattttctgtctttggttagctgagttccaaagcgatgagtttaaccgttcgttttatgtgtcgaggtggtaaatgcaaactctgaaagaactaatcgcatccaatcctgacgacttaacaactgaacttaagagagcatttcgtccactcacaccgcatattgcaattgatggtaatgaacttgacgcactgacgatattagtcaatttaaccgataagactgatgatcagaaagacctgctcgatcgagccaaatgcaagcaaaaacttcgagatgaaaaatggtgggctagctgcataaattgcgttaattacagacaaagccataacccaaaattcccggatatacgttctgaaggcgtgattcgaacccaagccctgggtgaattaccgagtttcctactctcgtcctcaaaaatcccaccataccattggtcatatagccatgattcaaaatacgtcaacaaaagcgcattcctcaccaatgagttttgttgggatggtgagatctcatgtttgggtgagcttcttaaagatgcagatcacccactttggaatactttgaaaaagttaggttgttctcaaaaaacttgcaaagcaatggcaaaacaactagctgatattactctcacgactatcaatgtcacactcgcaccaaattacctgactcaaatatctctccccgatagtgatacatcctacatttcactctctcctgttgcatcgctatcgatgcaaagccactttcatcagaggctccaagatgaaaatcggcatagcgcgataacgcggtttagccgaactaccaacatgggggtcactgcgatgacatgtggcggcgcatttagaatgttaaagtctggcgctaagttttccagcccccctcatcaccgattaaacagtaaacgaagttggttgacgtcagagcatgttcagtcattaaaacagtaccagcgcctcaacaaaagcctcatacctgaaaactctcggattgcactccgtagaaaatacaaaatcgagcttcaaaatatggtcagatcttggtttgcaatgcaagaccatacccttgattcgaacatacttatccaacatttgaatcatgacctatcttacttaggagccacaaaacgttttgcatacgatccagcgatgaccaagctctttactgagcttttgaaacgagagttatcaaattcaatcaataatggtgagcaacacactaatggatcgtttttagtcctaccgaatatcagggtttgtggcgcaacagctttaagctccccggtaacggtggggattccatcacttacagctttctttggcttcgttcacgcatttgaacggaatataaatcgcaccacctcatcgtttcgtgttgaatcctttgcgatatgcgtccatcaactacatgtcgagaagcgaggtttgacagcagagtttgtggaaaaaggcgacgggactatatccgctcccgcgacccgggatgactggcagtgtgatgtcgtatttagccttattttgaacaccaactttgctcaacatattgaccaagatacgttagttacatcactaccaaagcgattggctcggggttcagcaaaaattgcgattgatgactttaaacatatcaactcattctcgacattagaaacagcgatcgaatctctgccaatagaagctggtaggtggttatcactttacgcacagtcaaacaataatctaagtgatctattagcagccatgacagaggaccatcagctcatggcaagctgcgtcggttaccacttgttagaagagcccaaagataaaccaaactccctcagaggttacaaacacgctatcgccgagtgcatcattggactcattaactcaatcacctttagctcagagactgatcccaacacaatcttttggtcgctaaagaactatcaaaactacctagtggtacagccaaggagtatcaacgatgaaactaccgacaaatctagcctatgagcgctctatcgacccatcagatgtctgtttttttgtcgtctggcccgatgatagaaaaacacctttaacctacaattctcgtactctgctcgggcaaatggaagcggcatcattagcctatgatgtctcaggtcaaccaataaaaagtgccaccgctgaggcgttagctcaagggaaccctcatcaagttgatttctgccacgttccatacggtgcgagtcatattgaatgcagtttctccgtctcgttttcttctgaactacgtcaaccatataagtgtaactcaagcaaagttaaacaaacgctagtgcaattagtcgagctctacgaaacgaaaatcggctggactgagctagcaacccgatatttgatgaacatttgcaacggtaaatggctgtggaaaaatacccgtaaagcctattgctggaacattgtacttacaccttggccttggaacggggaaaaggttggatttgaagatattcgtactaactacacctcacggcaagactttaaaaataataaaaattggtctgctatagttgaaatgatcaaaaccgcattttctagtactgatgggctggcgatatttgaagtcagggccaccttgcacttgccaacgaatgctatggtgcggccaagccaagttttcacagaaaaagaaagtggcagtaaaagtaaatctaaaactcaaaacagtcgagtttttcagagtacaactattgatggtgaacgatcgccaatactaggggcctttaaaacgggagcagctattgcaaccattgacgactggtatcctgaagccactgagccactaagggtcggacggtttggggttcatcgcgaagatgtcacttgctaccgtcatccgtctaccggaaaagattttttctcgatattacaacaagcagagcactatattgaagtgttgagcgccaacaaaactcccgctcaagaaactatcaacgacatgcactttttaatggctaacctgattaagggtgggatgttccagcataaaggagactgactgtgaaatggtattataagacaatcacctttctgccagagttgtgcaacaacgagtcactggctgcaaagtgtctccgcgttctgcatggatttaactatcagtatgagacacgaaatatcggcgtttcatttccgctttggtgtgatgcaacggttggaaaaaagatttcatttgtcagcaagaacaagatagaactcgacttactacttaaacaacactatttcgtccaaatggaacaacttcaatactttcatatatccaacactgttctcgtcccagaagattgtacatacgtttcctttagacgctgtcaatctatagataagctcacagcagcagggctggcaaggaaaatcagacgcctggagaaacgtgctctatctagaggcgagcaatttgacccatcatcttttgctcaaaaagagcatactgcaatagcgcactaccactcacttggggagtccagcaaacagacgaaccgcaactttcgactcaatatcaggatgctctcggagcaaccccgtgaggggaactcgatttttagtagctatggcttatcaaattcagaaaactcgtttcagcctgtacccttaatctgacctaggctgctgccaccgctgagcaataactagcataaccccttggggcctctaaacgggtcttgaggggttttttgctgaaacctcaggcatttgagaagcacacggtcacactgcttccggtagtcaataaaccggtaaaccagcaatagacataagcggctatttaacgaccctgccctgaaccgacgaccgggtcatcgtggccggatcttgcggcccctcggcttgaacgaattgttagacattatttgccgactaccttggtgatctcgcctttcacgtagtggacaaattcttccaactgatctgcgcgcgaggccaagcgatcttcttcttgtccaagataagcctgtctagcttcaagtatgacgggctgatactgggccggcaggcgctccattgcccagtcggcagcgacatccttcggcgcgattttgccggttactgcgctgtaccaaatgcgggacaacgtaagcactacatttcgctcatcgccagcccagtcgggcggcgagttccatagcgttaaggtttcatttagcgcctcaaatagatcctgttcaggaaccggatcaaagagttcctccgccgctggacctaccaaggcaacgctatgttctcttgcttttgtcagcaagatagccagatcaatgtcgatcgtggctggctcgaagatacctgcaagaatgtcattgcgctgccattctccaaattgcagttcgcgcttagctggataacgccacggaatgatgtcgtcgtgcacaacaatggtgacttctacagcgcggagaatctcgctctctccaggggaagccgaagtttccaaaaggtcgttgatcaaagctcgccgcgttgtttcatcaagccttacggtcaccgtaaccagcaaatcaatatcactgtgtggcttcaggccgccatccactgcggagccgtacaaatgtacggccagcaacgtcggttcgagatggcgctcgatgacgccaactacctctgatagttgagtcgatacttcggcgatcaccgcttccctcatactcttcctttttcaatattattgaagcatttatcagggttattgtctcatgagcggatacatatttgaatgtatttagaaaaataaacaaatagctagctcactcggtcgctacgctccgggcgtgagactgcggcgggcgctgcggacacatacaaagttacccacagattccgtggataagcaggggactaacatgtgaggcaaaacagcagggccgcgccggtggcgtttttccataggctccgccctcctgccagagttcacataaacagacgcttttccggtgcatctgtgggagccgtgaggctcaaccatgaatctgacagtacgggcgaaacccgacaggacttaaagatccccaccgtttccggcgggtcgctccctcttgcgctctcctgttccgaccctgccgtttaccggatacctgttccgcctttctcccttacgggaagtgtggcgctttctcatagctcacacactggtatctcggctcggtgtaggtcgttcgctccaagctgggctgtaagcaagaactccccgttcagcccgactgctgcgccttatccggtaactgttcacttgagtccaacccggaaaagcacggtaaaacgccactggcagcagccattggtaactgggagttcgcagaggatttgtttagctaaacacgcggttgctcttgaagtgtgcgccaaagtccggctacactggaaggacagatttggttgctgtgctctgcgaaagccagttaccacggttaagcagttccccaactgacttaaccttcgatcaaaccacctccccaggtggttttttcgtttacagggcaaaagattacgcgcagaaaaaaaggatctcaagaagatcctttgatcttttctactgaaccgctctagatttcagtgcaatttatctcttcaaatgtagcacctgaagtcagccccatacgatataagttgtaattctcatgttagtcatgccccgcgcccaccggaaggagctgactgggttgaaggctctcaagggcatcggtcgagatcccggtgcctaatgagtgagctaacttacattaattgcgttgcgctcactgcccgctttccagtcgggaaacctgtcgtgccagctgcattaatgaatcggccaacgcgcggggagaggcggtttgcgtattgggcgccagggtggtttttcttttcaccagtgagacgggcaacagctgattgcccttcaccgcctggccctgagagagttgcagcaagcggtccacgctggtttgccccagcaggcgaaaatcctgtttgatggtggttaacggcgggatataacatgagctgtcttcggtatcgtcgtatcccactaccgagatgtccgcaccaacgcgcagcccggactcggtaatggcgcgcattgcgcccagcgccatctgatcgttggcaaccagcatcgcagtgggaacgatgccctcattcagcatttgcatggtttgttgaaaaccggacatggcactccagtcgccttcccgttccgctatcggctgaatttgattgcgagtgagatatttatgccagccagccagacgcagacgcgccgagacagaacttaatgggcccgctaacagcgcgatttgctggtgacccaatgcgaccagatgctccacgcccagtcgcgtaccgtcttcatgggagaaaataatactgttgatgggtgtctggtcagagacatcaagaaataacgccggaacattagtgcaggcagcttccacagcaatggcatcctggtcatccagcggatagttaatgatcagcccactgacgcgttgcgcgagaagattgtgcaccgccgctttacaggcttcgacgccgcttcgttctaccatcgacaccaccacgctggcacccagttgatcggcgcgagatttaatcgccgcgacaatttgcgacggcgcgtgcagggccagactggaggtggcaacgccaatcagcaacgactgtttgcccgccagttgttgtgccacgcggttgggaatgtaattcagctccgccatcgccgcttccactttttcccgcgttttcgcagaaacgtggctggcctggttcaccacgcgggaaacggtctgataagagacaccggcatactctgcgacatcgtataacgttactggtttcac

SEQ ID NO: 113 - DNA, 8457 bp, Synthetic construct
  source 1..8457: mol_type = other DNA
attcaccaccctgaattgactctcttccgggcgctatcatgccataccgcgaaaggttttgcgccattcgatggtgtccgggatctcgacgctctcccttatgcgactcctgcattaggaaattaatacgactcactataggggaattgtgagcggataacaattcccctgtagaaataattttgtttaactttaataaggagatataccatgggtgaactgccgagtaggtagctgataacagtacagcgcggctgaaatcatcattaaagcgagtggcaacatggtgaactgccgagtaggtagctgataacggatccgaattcgagctcggcgcgcctgcaggtcgacaagcttgcggccgcataatgcttaagtcgaacagaaagtaatcgtattgtacacggccgcataatcgaaattaatacgactcactataggggaattgtgagcggataacaattccccatcttagtatattagttaagtataagaaggagatatacatatgtttttgcaaagacctaaaccttacagcgatgaaagtttagaaagtttctttatccgagtggctaacaaaaatggctacggtgatgtccatcgcttcctagaagccactaaacgattccttcaagacattgaccataatggctatcaaacctttccgactgatataactcggataaacccatactcagctaaaaacagttccagcgcacgaactgcgtcattcctgaaacttgcacaattgacatttaatgaaccgccagagctacttgggttggcaattaacagaacaaacatgaaatactcgccgtcaactagcgcggttgttagaggtgcagaagtctttcctcgcagtttactacggacgcactccatcccctgctgtcctttgtgtctgcgagaaaatggctacgcctcctacctttggcactttcaggggtacgaatactgccacagccataacgtacctttaattaccacttgtagctgtggtaaggagtttgactaccgagtatctgggttaaagggcatttgctgcaaatgcaaggagcctatcaccttaaccagcagggagaacggtcatgaggcagcgtgtactgtttcaaactggcttgctggccatgaatctaaacctctgccaaatcttcctaaaagctaccgatggggtttagttcattggtggatgggtattaaagatagcgagttcgatcacttttcgttcgttcaatttttctcaaactggccaaggtcattccactcgataatcgaagatgaagtagagttcaaccttgagcatgctgttgtcagcacgtctgaattacgactaaaagatcttcttggtcgattgtttttcggttcaattcggttacctgagcggaatcttcaacacaatatcatccttggtgagcttctctgctatttagaaaatcgtttatggcaagacaagggattaatcgccaacctcaaaatgaacgcgttagaggcgactgtaatgttaaattgtagcctcgatcagattgcatcaatggttgaacaacgcatcttgaagccaaatcgaaaaagcaagcccaacagccctcttgatgttaccgattatctatttcatttcggcgatattttctgtctttggttagctgagttccaaagcgatgagtttaaccgttcgttttatgtgtcgaggtggtaaatgcaaactctgaaagaactaatcgcatccaatcctgacgacttaacaactgaacttaagagagcatttcgtccactcacaccgcatattgcaattgatggtaatgaacttgacgcactgacgatattagtcaatttaaccgataagactgatgatcagaaagacctgctcgatcgagccaaatgcaagcaaaaacttcgagatgaaaaatggtgggctagctgcataaattgcgttaattacagacaaagccataacccaaaattcccggatatacgttctgaaggcgtgattcgaacccaagccctgggtgaattaccgagtttcctactctcgtcctcaaaaatcccaccataccattggtcatatagccatgattcaaaatacgtcaacaaaagcgcattcctcaccaatgagttttgttgggatggtgagatctcatgtttgggtgagcttcttaaagatgcagatcacccactttggaatactttgaaaaagttaggttgttctcaaaaaacttgcaaagcaatggcaaaacaactagctgatattactctcacgactatcaatgtcacactcgcaccaaattacctgactcaaatatctctccccgatagtgatacatcctacatttcactctctcctgttgcatcgctatcgatgcaaagccactttcatcagaggctccaagatgaaaatcggcatagcgcgataacgcggtttagccgaactaccaacatgggggtcactgcgatgacatgtggcggcgcatttagaatgttaaagtctggcgctaagttttccagcccccctcatcaccgattaaacagtaaacgaagttggttgacgtcagagcatgttcagtcattaaaacagtaccagcgcctcaacaaaagcctcatacctgaaaactctcggattgcactccgtagaaaatacaaaatcgagcttcaaaatatggtcagatcttggtttgcaatgcaagaccatacccttgattcgaacatacttatccaacatttgaatcatgacctatcttacttaggagccacaaaacgttttgcatacgatccagcgatgaccaagctctttactgagcttttgaaacgagagttatcaaattcaatcaataatggtgagcaacacactaatggatcgtttttagtcctaccgaatatcagggtttgtggcgcaacagctttaagctccccggtaacggtggggattccatcacttacagctttctttggcttcgttcacgcatttgaacggaatataaatcgcaccacctcatcgtttcgtgttgaatcctttgcgatatgcgtccatcaactacatgtcgagaagcgaggtttgacagcagagtttgtggaaaaaggcgacgggactatatccgctcccgcgacccgggatgactggcagtgtgatgtcgtatttagccttattttgaacaccaactttgctcaacatattgaccaagatacgttagttacatcactaccaaagcgattggctcggggttcagcaaaaattgcgattgatgactttaaacatatcaactcattctcgacattagaaacagcgatcgaatctctgccaatagaagctggtaggtggttatcactttacgcacagtcaaacaataatctaagtgatctattagcagccatgacagaggaccatcagctcatggcaagctgcgtcggttaccacttgttagaagagcccaaagataaaccaaactccctcagaggttacaaacacgctatcgccgagtgcatcattggactcattaactcaatcacctttagctcagagactgatcccaacacaatcttttggtcgctaaagaactatcaaaactacctagtggtacagccaaggagtatcaacgatgaaactaccgacaaatctagcctatgagcgctctatcgacccatcagatgtctgtttttttgtcgtctggcccgatgatagaaaaacacctttaacctacaattctcgtactctgctcgggcaaatggaagcggcatcattagcctatgatgtctcaggtcaaccaataaaaagtgccaccgctgaggcgttagctcaagggaaccctcatcaagttgatttctgccacgttccatacggtgcgagtcatattgaatgcagtttctccgtctcgttttcttctgaactacgtcaaccatataagtgtaactcaagcaaagttaaacaaacgctagtgcaattagtcgagctctacgaaacgaaaatcggctggactgagctagcaacccgatatttgatgaacatttgcaacggtaaatggctgtggaaaaatacccgtaaagcctattgctggaacattgtacttacaccttggccttggaacggggaaaaggttggatttgaagatattcgtactaactacacctcacggcaagactttaaaaataataaaaattggtctgctatagttgaaatgatcaaaaccgcattttctagtactgatgggctggcgatatttgaagtcagggccaccttgcacttgccaacgaatgctatggtgcggccaagccaagttttcacagaaaaagaaagtggcagtaaaagtaaatctaaaactcaaaacagtcgagtttttcagagtacaactattgatggtgaacgatcgccaatactaggggcctttaaaacgggagcagctattgcaaccattgacgactggtatcctgaagccactgagccactaagggtcggacggtttggggttcatcgcgaagatgtcacttgctaccgtcatccgtctaccggaaaagattttttctcgatattacaacaagcagagcactatattgaagtgttgagcgccaacaaaactcccgctcaagaaactatcaacgacatgcactttttaatggctaacctgattaagggtgggatgttccagcataaaggagactgactgtgaaatggtattataagacaatcacctttctgccagagttgtgcaacaacgagtcactggctgcaaagtgtctccgcgttctgcatggatttaactatcagtatgagacacgaaatatcggcgtttcatttccgctttggtgtgatgcaacggttggaaaaaagatttcatttgtcagcaagaacaagatagaactcgacttactacttaaacaacactatttcgtccaaatggaacaacttcaatactttcatatatccaacactgttctcgtcccagaagattgtacatacgtttcctttagacgctgtcaatctatagataagctcacagcagcagggctggcaaggaaaatcagacgcctggagaaacgtgctctatctagaggcgagcaatttgacccatcatcttttgctcaaaaagagcatactgcaatagcgcactaccactcacttggggagtccagcaaacagacgaaccgcaactttcgactcaatatcaggatgctctcggagcaaccccgtgaggggaactcgatttttagtagctatggcttatcaaattcagaaaactcgtttcagcctgtacccttaatctgacctaggctgctgccaccgctgagcaataactagcataaccccttggggcctctaaacgggtcttgaggggttttttgctgaaacctcaggcatttgagaagcacacggtcacactgcttccggtagtcaataaaccggtaaaccagcaatagacataagcggctatttaacgaccctgccctgaaccgacgaccgggtcatcgtggccggatcttgcggcccctcggcttgaacgaattgttagacattatttgccgactaccttggtgatctcgcctttcacgtagtggacaaattcttccaactgatctgcgcgcgaggccaagcgatcttcttcttgtccaagataagcctgtctagcttcaagtatgacgggctgatactgggccggcaggcgctccattgcccagtcggcagcgacatccttcggcgcgattttgccggttactgcgctgtaccaaatgcgggacaacgtaagcactacatttcgctcatcgccagcccagtcgggcggcgagttccatagcgttaaggtttcatttagcgcctcaaatagatcctgttcaggaaccggatcaaagagttcctccgccgctggacctaccaaggcaacgctatgttctcttgcttttgtcagcaagatagccagatcaatgtcgatcgtggctggctcgaagatacctgcaagaatgtcattgcgctgccattctccaaattgcagttcgcgcttagctggataacgccacggaatgatgtcgtcgtgcacaacaatggtgacttctacagcgcggagaatctcgctctctccaggggaagccgaagtttccaaaaggtcgttgatcaaagctcgccgcgttgtttcatcaagccttacggtcaccgtaaccagcaaatcaatatcactgtgtggcttcaggccgccatccactgcggagccgtacaaatgtacggccagcaacgtcggttcgagatggcgctcgatgacgccaactacctctgatagttgagtcgatacttcggcgatcaccgcttccctcatactcttcctttttcaatattattgaagcatttatcagggttattgtctcatgagcggatacatatttgaatgtatttagaaaaataaacaaatagctagctcactcggtcgctacgctccgggcgtgagactgcggcgggcgctgcggacacatacaaagttacccacagattccgtggataagcaggggactaacatgtgaggcaaaacagcagggccgcgccggtggcgtttttccataggctccgccctcctgccagagttcacataaacagacgcttttccggtgcatctgtgggagccgtgaggctcaaccatgaatctgacagtacgggcgaaacccgacaggacttaaagatccccaccgtttccggcgggtcgctccctcttgcgctctcctgttccgaccctgccgtttaccggatacctgttccgcctttctcccttacgggaagtgtggcgctttctcatagctcacacactggtatctcggctcggtgtaggtcgttcgctccaagctgggctgtaagcaagaactccccgttcagcccgactgctgcgccttatccggtaactgttcacttgagtccaacccggaaaagcacggtaaaacgccactggcagcagccattggtaactgggagttcgcagaggatttgtttagctaaacacgcggttgctcttgaagtgtgcgccaaagtccggctacactggaaggacagatttggttgctgtgctctgcgaaagccagttaccacggttaagcagttccccaactgacttaaccttcgatcaaaccacctccccaggtggttttttcgtttacagggcaaaagattacgcgcagaaaaaaaggatctcaagaagatcctttgatcttttctactgaaccgctctagatttcagtgcaatttatctcttcaaatgtagcacctgaagtcagccccatacgatataagttgtaattctcatgttagtcatgccccgcgcccaccggaaggagctgactgggttgaaggctctcaagggcatcggtcgagatcccggtgcctaatgagtgagctaacttacattaattgcgttgcgctcactgcccgctttccagtcgggaaacctgtcgtgccagctgcattaatgaatcggccaacgcgcggggagaggcggtttgcgtattgggcgccagggtggtttttcttttcaccagtgagacgggcaacagctgattgcccttcaccgcctggccctgagagagttgcagcaagcggtccacgctggtttgccccagcaggcgaaaatcctgtttgatggtggttaacggcgggatataacatgagctgtcttcggtatcgtcgtatcccactaccgagatgtccgcaccaacgcgcagcccggactcggtaatggcgcgcattgcgcccagcgccatctgatcgttggcaaccagcatcgcagtgggaacgatgccctcattcagcatttgcatggtttgttgaaaaccggacatggcactccagtcgccttcccgttccgctatcggctgaatttgattgcgagtgagatatttatgccagccagccagacgcagacgcgccgagacagaacttaatgggcccgctaacagcgcgatttgctggtgacccaatgcgaccagatgctccacgcccagtcgcgtaccgtcttcatgggagaaaataatactgttgatgggtgtctggtcagagacatcaagaaataacgccggaacattagtgcaggcagcttccacagcaatggcatcctggtcatccagcggatagttaatgatcagcccactgacgcgttgcgcgagaagattgtgcaccgccgctttacaggcttcgacgccgcttcgttctaccatcgacaccaccacgctggcacccagttgatcggcgcgagatttaatcgccgcgacaatttgcgacggcgcgtgcagggccagactggaggtggcaacgccaatcagcaacgactgtttgcccgccagttgttgtgccacgcggttgggaatgtaattcagctccgccatcgccgcttccactttttcccgcgttttcgcagaaacgtggctggcctggttcaccacgcgggaaacggtctgataagagacaccggcatactctgcgacatcgtataacgttactggtttcac

SEQ ID NO: 114 - DNA, 8463 bp, Synthetic construct
  source 1..8463: mol_type = other DNA
attcaccaccctgaattgactctcttccgggcgctatcatgccataccgcgaaaggttttgcgccattcgatggtgtccgggatctcgacgctctcccttatgcgactcctgcattaggaaattaatacgactcactataggggaattgtgagcggataacaattcccctgtagaaataattttgtttaactttaataaggagatataccatgggtgaactgccgagtaggtagctgataacagtacagcgcggctgaaatcatcattaaagcgagtggcaacatggaaatcgtgaactgccgagtaggtagctgataacggatccgaattcgagctcggcgcgcctgcaggtcgacaagcttgcggccgcataatgcttaagtcgaacagaaagtaatcgtattgtacacggccgcataatcgaaattaatacgactcactataggggaattgtgagcggataacaattccccatcttagtatattagttaagtataagaaggagatatacatatgtttttgcaaagacctaaaccttacagcgatgaaagtttagaaagtttctttatccgagtggctaacaaaaatggctacggtgatgtccatcgcttcctagaagccactaaacgattccttcaagacattgaccataatggctatcaaacctttccgactgatataactcggataaacccatactcagctaaaaacagttccagcgcacgaactgcgtcattcctgaaacttgcacaattgacatttaatgaaccgccagagctacttgggttggcaattaacagaacaaacatgaaatactcgccgtcaactagcgcggttgttagaggtgcagaagtctttcctcgcagtttactacggacgcactccatcccctgctgtcctttgtgtctgcgagaaaatggctacgcctcctacctttggcactttcaggggtacgaatactgccacagccataacgtacctttaattaccacttgtagctgtggtaaggagtttgactaccgagtatctgggttaaagggcatttgctgcaaatgcaaggagcctatcaccttaaccagcagggagaacggtcatgaggcagcgtgtactgtttcaaactggcttgctggccatgaatctaaacctctgccaaatcttcctaaaagctaccgatggggtttagttcattggtggatgggtattaaagatagcgagttcgatcacttttcgttcgttcaatttttctcaaactggccaaggtcattccactcgataatcgaagatgaagtagagttcaaccttgagcatgctgttgtcagcacgtctgaattacgactaaaagatcttcttggtcgattgtttttcggttcaattcggttacctgagcggaatcttcaacacaatatcatccttggtgagcttctctgctatttagaaaatcgtttatggcaagacaagggattaatcgccaacctcaaaatgaacgcgttagaggcgactgtaatgttaaattgtagcctcgatcagattgcatcaatggttgaacaacgcatcttgaagccaaatcgaaaaagcaagcccaacagccctcttgatgttaccgattatctatttcatttcggcgatattttctgtctttggttagctgagttccaaagcgatgagtttaaccgttcgttttatgtgtcgaggtggtaaatgcaaactctgaaagaactaatcgcatccaatcctgacgacttaacaactgaacttaagagagcatttcgtccactcacaccgcatattgcaattgatggtaatgaacttgacgcactgacgatattagtcaatttaaccgataagactgatgatcagaaagacctgctcgatcgagccaaatgcaagcaaaaacttcgagatgaaaaatggtgggctagctgcataaattgcgttaattacagacaaagccataacccaaaattcccggatatacgttctgaaggcgtgattcgaacccaagccctgggtgaattaccgagtttcctactctcgtcctcaaaaatcccaccataccattggtcatatagccatgattcaaaatacgtcaacaaaagcgcattcctcaccaatgagttttgttgggatggtgagatctcatgtttgggtgagcttcttaaagatgcagatcacccactttggaatactttgaaaaagttaggttgttctcaaaaaacttgcaaagcaatggcaaaacaactagctgatattactctcacgactatcaatgtcacactcgcaccaaattacctgactcaaatatctctccccgatagtgatacatcctacatttcactctctcctgttgcatcgctatcgatgcaaagccactttcatcagaggctccaagatgaaaatcggcatagcgcgataacgcggtttagccgaactaccaacatgggggtcactgcgatgacatgtggcggcgcatttagaatgttaaagtctggcgctaagttttccagcccccctcatcaccgattaaacagtaaacgaagttggttgacgtcagagcatgttcagtcattaaaacagtaccagcgcctcaacaaaagcctcatacctgaaaactctcggattgcactccgtagaaaatacaaaatcgagcttcaaaatatggtcagatcttggtttgcaatgcaagaccatacccttgattcgaacatacttatccaacatttgaatcatgacctatcttacttaggagccacaaaacgttttgcatacgatccagcgatgaccaagctctttactgagcttttgaaacgagagttatcaaattcaatcaataatggtgagcaacacactaatggatcgtttttagtcctaccgaatatcagggtttgtggcgcaacagctttaagctccccggtaacggtggggattccatcacttacagctttctttggcttcgttcacgcatttgaacggaatataaatcgcaccacctcatcgtttcgtgttgaatcctttgcgatatgcgtccatcaactacatgtcgagaagcgaggtttgacagcagagtttgtggaaaaaggcgacgggactatatccgctcccgcgacccgggatgactggcagtgtgatgtcgtatttagccttattttgaacaccaactttgctcaacatattgaccaagatacgttagttacatcactaccaaagcgattggctcggggttcagcaaaaattgcgattgatgactttaaacatatcaactcattctcgacattagaaacagcgatcgaatctctgccaatagaagctggtaggtggttatcactttacgcacagtcaaacaataatctaagtgatctattagcagccatgacagaggaccatcagctcatggcaagctgcgtcggttaccacttgttagaagagcccaaagataaaccaaactccctcagaggttacaaacacgctatcgccgagtgcatcattggactcattaactcaatcacctttagctcagagactgatcccaacacaatcttttggtcgctaaagaactatcaaaactacctagtggtacagccaaggagtatcaacgatgaaactaccgacaaatctagcctatgagcgctctatcgacccatcagatgtctgtttttttgtcgtctggcccgatgatagaaaaacacctttaacctacaattctcgtactctgctcgggcaaatggaagcggcatcattagcctatgatgtctcaggtcaaccaataaaaagtgccaccgctgaggcgttagctcaagggaaccctcatcaagttgatttctgccacgttccatacggtgcgagtcatattgaatgcagtttctccgtctcgttttcttctgaactacgtcaaccatataagtgtaactcaagcaaagttaaacaaacgctagtgcaattagtcgagctctacgaaacgaaaatcggctggactgagctagcaacccgatatttgatgaacatttgcaacggtaaatggctgtggaaaaatacccgtaaagcctattgctggaacattgtacttacaccttggccttggaacggggaaaaggttggatttgaagatattcgtactaactacacctcacggcaagactttaaaaataataaaaattggtctgctatagttgaaatgatcaaaaccgcattttctagtactgatgggctggcgatatttgaagtcagggccaccttgcacttgccaacgaatgctatggtgcggccaagccaagttttcacagaaaaagaaagtggcagtaaaagtaaatctaaaactcaaaacagtcgagtttttcagagtacaactattgatggtgaacgatcgccaatactaggggcctttaaaacgggagcagctattgcaaccattgacgactggtatcctgaagccactgagccactaagggtcggacggtttggggttcatcgcgaagatgtcacttgctaccgtcatccgtctaccggaaaagattttttctcgatattacaacaagcagagcactatattgaagtgttgagcgccaacaaaactcccgctcaagaaactatcaacgacatgcactttttaatggctaacctgattaagggtgggatgttccagcataaaggagactgactgtgaaatggtattataagacaatcacctttctgccagagttgtgcaacaacgagtcactggctgcaaagtgtctccgcgttctgcatggatttaactatcagtatgagacacgaaatatcggcgtttcatttccgctttggtgtgatgcaacggttggaaaaaagatttcatttgtcagcaagaacaagatagaactcgacttactacttaaacaacactatttcgtccaaatggaacaacttcaatactttcatatatccaacactgttctcgtcccagaagattgtacatacgtttcctttagacgctgtcaatctatagataagctcacagcagcagggctggcaaggaaaatcagacgcctggagaaacgtgctctatctagaggcgagcaatttgacccatcatcttttgctcaaaaagagcatactgcaatagcgcactaccactcacttggggagtccagcaaacagacgaaccgcaactttcgactcaatatcaggatgctctcggagcaaccccgtgaggggaactcgatttttagtagctatggcttatcaaattcagaaaactcgtttcagcctgtacccttaatctgacctaggctgctgccaccgctgagcaataactagcataaccccttggggcctctaaacgggtcttgaggggttttttgctgaaacctcaggcatttgagaagcacacggtcacactgcttccggtagtcaataaaccggtaaaccagcaatagacataagcggctatttaacgaccctgccctgaaccgacgaccgggtcatcgtggccggatcttgcggcccctcggcttgaacgaattgttagacattatttgccgactaccttggtgatctcgcctttcacgtagtggacaaattcttccaactgatctgcgcgcgaggccaagcgatcttcttcttgtccaagataagcctgtctagcttcaagtatgacgggctgatactgggccggcaggcgctccattgcccagtcggcagcgacatccttcggcgcgattttgccggttactgcgctgtaccaaatgcgggacaacgtaagcactacatttcgctcatcgccagcccagtcgggcggcgagttccatagcgttaaggtttcatttagcgcctcaaatagatcctgttcaggaaccggatcaaagagttcctccgccgctggacctaccaaggcaacgctatgttctcttgcttttgtcagcaagatagccagatcaatgtcgatcgtggctggctcgaagatacctgcaagaatgtcattgcgctgccattctccaaattgcagttcgcgcttagctggataacgccacggaatgatgtcgtcgtgcacaacaatggtgacttctacagcgcggagaatctcgctctctccaggggaagccgaagtttccaaaaggtcgttgatcaaagctcgccgcgttgtttcatcaagccttacggtcaccgtaaccagcaaatcaatatcactgtgtggcttcaggccgccatccactgcggagccgtacaaatgtacggccagcaacgtcggttcgagatggcgctcgatgacgccaactacctctgatagttgagtcgatacttcggcgatcaccgcttccctcatactcttcctttttcaatattattgaagcatttatcagggttattgtctcatgagcggatacatatttgaatgtatttagaaaaataaacaaatagctagctcactcggtcgctacgctccgggcgtgagactgcggcgggcgctgcggacacatacaaagttacccacagattccgtggataagcaggggactaacatgtgaggcaaaacagcagggccgcgccggtggcgtttttccataggctccgccctcctgccagagttcacataaacagacgcttttccggtgcatctgtgggagccgtgaggctcaaccatgaatctgacagtacgggcgaaacccgacaggacttaaagatccccaccgtttccggcgggtcgctccctcttgcgctctcctgttccgaccctgccgtttaccggatacctgttccgcctttctcccttacgggaagtgtggcgctttctcatagctcacacactggtatctcggctcggtgtaggtcgttcgctccaagctgggctgtaagcaagaactccccgttcagcccgactgctgcgccttatccggtaactgttcacttgagtccaacccggaaaagcacggtaaaacgccactggcagcagccattggtaactgggagttcgcagaggatttgtttagctaaacacgcggttgctcttgaagtgtgcgccaaagtccggctacactggaaggacagatttggttgctgtgctctgcgaaagccagttaccacggttaagcagttccccaactgacttaaccttcgatcaaaccacctccccaggtggttttttcgtttacagggcaaaagattacgcgcagaaaaaaaggatctcaagaagatcctttgatcttttctactgaaccgctctagatttcagtgcaatttatctcttcaaatgtagcacctgaagtcagccccatacgatataagttgtaattctcatgttagtcatgccccgcgcccaccggaaggagctgactgggttgaaggctctcaagggcatcggtcgagatcccggtgcctaatgagtgagctaacttacattaattgcgttgcgctcactgcccgctttccagtcgggaaacctgtcgtgccagctgcattaatgaatcggccaacgcgcggggagaggcggtttgcgtattgggcgccagggtggtttttcttttcaccagtgagacgggcaacagctgattgcccttcaccgcctggccctgagagagttgcagcaagcggtccacgctggtttgccccagcaggcgaaaatcctgtttgatggtggttaacggcgggatataacatgagctgtcttcggtatcgtcgtatcccactaccgagatgtccgcaccaacgcgcagcccggactcggtaatggcgcgcattgcgcccagcgccatctgatcgttggcaaccagcatcgcagtgggaacgatgccctcattcagcatttgcatggtttgttgaaaaccggacatggcactccagtcgccttcccgttccgctatcggctgaatttgattgcgagtgagatatttatgccagccagccagacgcagacgcgccgagacagaacttaatgggcccgctaacagcgcgatttgctggtgacccaatgcgaccagatgctccacgcccagtcgcgtaccgtcttcatgggagaaaataatactgttgatgggtgtctggtcagagacatcaagaaataacgccggaacattagtgcaggcagcttccacagcaatggcatcctggtcatccagcggatagttaatgatcagcccactgacgcgttgcgcgagaagattgtgcaccgccgctttacaggcttcgacgccgcttcgttctaccatcgacaccaccacgctggcacccagttgatcggcgcgagatttaatcgccgcgacaatttgcgacggcgcgtgcagggccagactggaggtggcaacgccaatcagcaacgactgtttgcccgccagttgttgtgccacgcggttgggaatgtaattcagctccgccatcgccgcttccactttttcccgcgttttcgcagaaacgtggctggcctggttcaccacgcgggaaacggtctgataagagacaccggcatactctgcgacatcgtataacgttactggtttcac

SEQ ID NO: 115 - DNA, 8469 bp, Synthetic construct
  source 1..8469: mol_type = other DNA
attcaccaccctgaattgactctcttccgggcgctatcatgccataccgcgaaaggttttgcgccattcgatggtgtccgggatctcgacgctctcccttatgcgactcctgcattaggaaattaatacgactcactataggggaattgtgagcggataacaattcccctgtagaaataattttgtttaactttaataaggagatataccatgggtgaactgccgagtaggtagctgataacagtacagcgcggctgaaatcatcattaaagcgagtggcaacatggaaatcgctgatgtgaactgccgagtaggtagctgataacggatccgaattcgagctcggcgcgcctgcaggtcgacaagcttgcggccgcataatgcttaagtcgaacagaaagtaatcgtattgtacacggccgcataatcgaaattaatacgactcactataggggaattgtgagcggataacaattccccatcttagtatattagttaagtataagaaggagatatacatatgtttttgcaaagacctaaaccttacagcgatgaaagtttagaaagtttctttatccgagtggctaacaaaaatggctacggtgatgtccatcgcttcctagaagccactaaacgattccttcaagacattgaccataatggctatcaaacctttccgactgatataactcggataaacccatactcagctaaaaacagttccagcgcacgaactgcgtcattcctgaaacttgcacaattgacatttaatgaaccgccagagctacttgggttggcaattaacagaacaaacatgaaatactcgccgtcaactagcgcggttgttagaggtgcagaagtctttcctcgcagtttactacggacgcactccatcccctgctgtcctttgtgtctgcgagaaaatggctacgcctcctacctttggcactttcaggggtacgaatactgccacagccataacgtacctttaattaccacttgtagctgtggtaaggagtttgactaccgagtatctgggttaaagggcatttgctgcaaatgcaaggagcctatcaccttaaccagcagggagaacggtcatgaggcagcgtgtactgtttcaaactggcttgctggccatgaatctaaacctctgccaaatcttcctaaaagctaccgatggggtttagttcattggtggatgggtattaaagatagcgagttcgatcacttttcgttcgttcaatttttctcaaactggccaaggtcattccactcgataatcgaagatgaagtagagttcaaccttgagcatgctgttgtcagcacgtctgaattacgactaaaagatcttcttggtcgattgtttttcggttcaattcggttacctgagcggaatcttcaacacaatatcatccttggtgagcttctctgctatttagaaaatcgtttatggcaagacaagggattaatcgccaacctcaaaatgaacgcgttagaggcgactgtaatgttaaattgtagcctcgatcagattgcatcaatggttgaacaacgcatcttgaagccaaatcgaaaaagcaagcccaacagccctcttgatgttaccgattatctatttcatttcggcgatattttctgtctttggttagctgagttccaaagcgatgagtttaaccgttcgttttatgtgtcgaggtggtaaatgcaaactctgaaagaactaatcgcatccaatcctgacgacttaacaactgaacttaagagagcatttcgtccactcacaccgcatattgcaattgatggtaatgaacttgacgcactgacgatattagtcaatttaaccgataagactgatgatcagaaagacctgctcgatcgagccaaatgcaagcaaaaacttcgagatgaaaaatggtgggctagctgcataaattgcgttaattacagacaaagccataacccaaaattcccggatatacgttctgaaggcgtgattcgaacccaagccctgggtgaattaccgagtttcctactctcgtcctcaaaaatcccaccataccattggtcatatagccatgattcaaaatacgtcaacaaaagcgcattcctcaccaatgagttttgttgggatggtgagatctcatgtttgggtgagcttcttaaagatgcagatcacccactttggaatactttgaaaaagttaggttgttctcaaaaaacttgcaaagcaatggcaaaacaactagctgatattactctcacgactatcaatgtcacactcgcaccaaattacctgactcaaatatctctccccgatagtgatacatcctacatttcactctctcctgttgcatcgctatcgatgcaaagccactttcatcagaggctccaagatgaaaatcggcatagcgcgataacgcggtttagccgaactaccaacatgggggtcactgcgatgacatgtggcggcgcatttagaatgttaaagtctggcgctaagttttccagcccccctcatcaccgattaaacagtaaacgaagttggttgacgtcagagcatgttcagtcattaaaacagtaccagcgcctcaacaaaagcctcatacctgaaaactctcggattgcactccgtagaaaatacaaaatcgagcttcaaaatatggtcagatcttggtttgcaatgcaagaccatacccttgattcgaacatacttatccaacatttgaatcatgacctatcttacttaggagccacaaaacgttttgcatacgatccagcgatgaccaagctctttactgagcttttgaaacgagagttatcaaattcaatcaataatggtgagcaacacactaatggatcgtttttagtcctaccgaatatcagggtttgtggcgcaacagctttaagctccccggtaacggtggggattccatcacttacagctttctttggcttcgttcacgcatttgaacggaatataaatcgcaccacctcatcgtttcgtgttgaatcctttgcgatatgcgtccatcaactacatgtcgagaagcgaggtttgacagcagagtttgtggaaaaaggcgacgggactatatccgctcccgcgacccgggatgactggcagtgtgatgtcgtatttagccttattttgaacaccaactttgctcaacatattgaccaagatacgttagttacatcactaccaaagcgattggctcggggttcagcaaaaattgcgattgatgactttaaacatatcaactcattctcgacattagaaacagcgatcgaatctctgccaatagaagctggtaggtggttatcactttacgcacagtcaaacaataatctaagtgatctattagcagccatgacagaggaccatcagctcatggcaagctgcgtcggttaccacttgttagaagagcccaaagataaaccaaactccctcagaggttacaaacacgctatcgccgagtgcatcattggactcattaactcaatcacctttagctcagagactgatcccaacacaatcttttggtcgctaaagaactatcaaaactacctagtggtacagccaaggagtatcaacgatgaaactaccgacaaatctagcctatgagcgctctatcgacccatcagatgtctgtttttttgtcgtctggcccgatgatagaaaaacacctttaacctacaattctcgtactctgctcgggcaaatggaagcggcatcattagcctatgatgtctcaggtcaaccaataaaaagtgccaccgctgaggcgttagctcaagggaaccctcatcaagttgatttctgccacgttccatacggtgcgagtcatattgaatgcagtttctccgtctcgttttcttctgaactacgtcaaccatataagtgtaactcaagcaaagttaaacaaacgctagtgcaattagtcgagctctacgaaacgaaaatcggctggactgagctagcaacccgatatttgatgaacatttgcaacggtaaatggctgtggaaaaatacccgtaaagcctattgctggaacattgtacttacaccttggccttggaacggggaaaaggttggatttgaagatattcgtactaactacacctcacggcaagactttaaaaataataaaaattggtctgctatagttgaaatgatcaaaaccgcattttctagtactgatgggctggcgatatttgaagtcagggccaccttgcacttgccaacgaatgctatggtgcggccaagccaagttttcacagaaaaagaaagtggcagtaaaagtaaatctaaaactcaaaacagtcgagtttttcagagtacaactattgatggtgaacgatcgccaatactaggggcctttaaaacgggagcagctattgcaaccattgacgactggtatcctgaagccactgagccactaagggtcggacggtttggggttcatcgcgaagatgtcacttgctaccgtcatccgtctaccggaaaagattttttctcgatattacaacaagcagagcactatattgaagtgttgagcgccaacaaaactcccgctcaagaaactatcaacgacatgcactttttaatggctaacctgattaagggtgggatgttccagcataaaggagactgactgtgaaatggtattataagacaatcacctttctgccagagttgtgcaacaacgagtcactggctgcaaagtgtctccgcgttctgcatggatttaactatcagtatgagacacgaaatatcggcgtttcatttccgctttggtgtgatgcaacggttggaaaaaagatttcatttgtcagcaagaacaagatagaactcgacttactacttaaacaacactatttcgtccaaatggaacaacttcaatactttcatatatccaacactgttctcgtcccagaagattgtacatacgtttcctttagacgctgtcaatctatagataagctcacagcagcagggctggcaaggaaaatcagacgcctggagaaacgtgctctatctagaggcgagcaatttgacccatcatcttttgctcaaaaagagcatactgcaatagcgcactaccactcacttggggagtccagcaaacagacgaaccgcaactttcgactcaatatcaggatgctctcggagcaaccccgtgaggggaactcgatttttagtagctatggcttatcaaattcagaaaactcgtttcagcctgtacccttaatctgacctaggctgctgccaccgctgagcaataactagcataaccccttggggcctctaaacgggtcttgaggggttttttgctgaaacctcaggcatttgagaagcacacggtcacactgcttccggtagtcaataaaccggtaaaccagcaatagacataagcggctatttaacgaccctgccctgaaccgacgaccgggtcatcgtggccggatcttgcggcccctcggcttgaacgaattgttagacattatttgccgactaccttggtgatctcgcctttcacgtagtggacaaattcttccaactgatctgcgcgcgaggccaagcgatcttcttcttgtccaagataagcctgtctagcttcaagtatgacgggctgatactgggccggcaggcgctccattgcccagtcggcagcgacatccttcggcgcgattttgccggttactgcgctgtaccaaatgcgggacaacgtaagcactacatttcgctcatcgccagcccagtcgggcggcgagttccatagcgttaaggtttcatttagcgcctcaaatagatcctgttcaggaaccggatcaaagagttcctccgccgctggacctaccaaggcaacgctatgttctcttgcttttgtcagcaagatagccagatcaatgtcgatcgtggctggctcgaagatacctgcaagaatgtcattgcgctgccattctccaaattgcagttcgcgcttagctggataacgccacggaatgatgtcgtcgtgcacaacaatggtgacttctacagcgcggagaatctcgctctctccaggggaagccgaagtttccaaaaggtcgttgatcaaagctcgccgcgttgtttcatcaagccttacggtcaccgtaaccagcaaatcaatatcactgtgtggcttcaggccgccatccactgcggagccgtacaaatgtacggccagcaacgtcggttcgagatggcgctcgatgacgccaactacctctgatagttgagtcgatacttcggcgatcaccgcttccctcatactcttcctttttcaatattattgaagcatttatcagggttattgtctcatgagcggatacatatttgaatgtatttagaaaaataaacaaatagctagctcactcggtcgctacgctccgggcgtgagactgcggcgggcgctgcggacacatacaaagttacccacagattccgtggataagcaggggactaacatgtgaggcaaaacagcagggccgcgccggtggcgtttttccataggctccgccctcctgccagagttcacataaacagacgcttttccggtgcatctgtgggagccgtgaggctcaaccatgaatctgacagtacgggcgaaacccgacaggacttaaagatccccaccgtttccggcgggtcgctccctcttgcgctctcctgttccgaccctgccgtttaccggatacctgttccgcctttctcccttacgggaagtgtggcgctttctcatagctcacacactggtatctcggctcggtgtaggtcgttcgctccaagctgggctgtaagcaagaactccccgttcagcccgactgctgcgccttatccggtaactgttcacttgagtccaacccggaaaagcacggtaaaacgccactggcagcagccattggtaactgggagttcgcagaggatttgtttagctaaacacgcggttgctcttgaagtgtgcgccaaagtccggctacactggaaggacagatttggttgctgtgctctgcgaaagccagttaccacggttaagcagttccccaactgacttaaccttcgatcaaaccacctccccaggtggttttttcgtttacagggcaaaagattacgcgcagaaaaaaaggatctcaagaagatcctttgatcttttctactgaaccgctctagatttcagtgcaatttatctcttcaaatgtagcacctgaagtcagccccatacgatataagttgtaattctcatgttagtcatgccccgcgcccaccggaaggagctgactgggttgaaggctctcaagggcatcggtcgagatcccggtgcctaatgagtgagctaacttacattaattgcgttgcgctcactgcccgctttccagtcgggaaacctgtcgtgccagctgcattaatgaatcggccaacgcgcggggagaggcggtttgcgtattgggcgccagggtggtttttcttttcaccagtgagacgggcaacagctgattgcccttcaccgcctggccctgagagagttgcagcaagcggtccacgctggtttgccccagcaggcgaaaatcctgtttgatggtggttaacggcgggatataacatgagctgtcttcggtatcgtcgtatcccactaccgagatgtccgcaccaacgcgcagcccggactcggtaatggcgcgcattgcgcccagcgccatctgatcgttggcaaccagcatcgcagtgggaacgatgccctcattcagcatttgcatggtttgttgaaaaccggacatggcactccagtcgccttcccgttccgctatcggctgaatttgattgcgagtgagatatttatgccagccagccagacgcagacgcgccgagacagaacttaatgggcccgctaacagcgcgatttgctggtgacccaatgcgaccagatgctccacgcccagtcgcgtaccgtcttcatgggagaaaataatactgttgatgggtgtctggtcagagacatcaagaaataacgccggaacattagtgcaggcagcttccacagcaatggcatcctggtcatccagcggatagttaatgatcagcccactgacgcgttgcgcgagaagattgtgcaccgccgctttacaggcttcgacgccgcttcgttctaccatcgacaccaccacgctggcacccagttgatcggcgcgagatttaatcgccgcgacaatttgcgacggcgcgtgcagggccagactggaggtggcaacgccaatcagcaacgactgtttgcccgccagttgttgtgccacgcggttgggaatgtaattcagctccgccatcgccgcttccactttttcccgcgttttcgcagaaacgtggctggcctggttcaccacgcgggaaacggtctgataagagacaccggcatactctgcgacatcgtataacgttactggtttcac

SEQ ID NO: 116 - DNA, 8445 bp, Synthetic construct
  source 1..8445: mol_type = other DNA
attcaccaccctgaattgactctcttccgggcgctatcatgccataccgcgaaaggttttgcgccattcgatggtgtccgggatctcgacgctctcccttatgcgactcctgcattaggaaattaatacgactcactataggggaattgtgagcggataacaattcccctgtagaaataattttgtttaactttaataaggagatataccatgggtgaactgccgagtaggtagctgataacagcggtgcacgggtgaactgatcgcgcagcgggtgaactgccgagtaggtagctgataacggatccgaattcgagctcggcgcgcctgcaggtcgacaagcttgcggccgcataatgcttaagtcgaacagaaagtaatcgtattgtacacggccgcataatcgaaattaatacgactcactataggggaattgtgagcggataacaattccccatcttagtatattagttaagtataagaaggagatatacatatgtttttgcaaagacctaaaccttacagcgatgaaagtttagaaagtttctttatccgagtggctaacaaaaatggctacggtgatgtccatcgcttcctagaagccactaaacgattccttcaagacattgaccataatggctatcaaacctttccgactgatataactcggataaacccatactcagctaaaaacagttccagcgcacgaactgcgtcattcctgaaacttgcacaattgacatttaatgaaccgccagagctacttgggttggcaattaacagaacaaacatgaaatactcgccgtcaactagcgcggttgttagaggtgcagaagtctttcctcgcagtttactacggacgcactccatcccctgctgtcctttgtgtctgcgagaaaatggctacgcctcctacctttggcactttcaggggtacgaatactgccacagccataacgtacctttaattaccacttgtagctgtggtaaggagtttgactaccgagtatctgggttaaagggcatttgctgcaaatgcaaggagcctatcaccttaaccagcagggagaacggtcatgaggcagcgtgtactgtttcaaactggcttgctggccatgaatctaaacctctgccaaatcttcctaaaagctaccgatggggtttagttcattggtggatgggtattaaagatagcgagttcgatcacttttcgttcgttcaatttttctcaaactggccaaggtcattccactcgataatcgaagatgaagtagagttcaaccttgagcatgctgttgtcagcacgtctgaattacgactaaaagatcttcttggtcgattgtttttcggttcaattcggttacctgagcggaatcttcaacacaatatcatccttggtgagcttctctgctatttagaaaatcgtttatggcaagacaagggattaatcgccaacctcaaaatgaacgcgttagaggcgactgtaatgttaaattgtagcctcgatcagattgcatcaatggttgaacaacgcatcttgaagccaaatcgaaaaagcaagcccaacagccctcttgatgttaccgattatctatttcatttcggcgatattttctgtctttggttagctgagttccaaagcgatgagtttaaccgttcgttttatgtgtcgaggtggtaaatgcaaactctgaaagaactaatcgcatccaatcctgacgacttaacaactgaacttaagagagcatttcgtccactcacaccgcatattgcaattgatggtaatgaacttgacgcactgacgatattagtcaatttaaccgataagactgatgatcagaaagacctgctcgatcgagccaaatgcaagcaaaaacttcgagatgaaaaatggtgggctagctgcataaattgcgttaattacagacaaagccataacccaaaattcccggatatacgttctgaaggcgtgattcgaacccaagccctgggtgaattaccgagtttcctactctcgtcctcaaaaatcccaccataccattggtcatatagccatgattcaaaatacgtcaacaaaagcgcattcctcaccaatgagttttgttgggatggtgagatctcatgtttgggtgagcttcttaaagatgcagatcacccactttggaatactttgaaaaagttaggttgttctcaaaaaacttgcaaagcaatggcaaaacaactagctgatattactctcacgactatcaatgtcacactcgcaccaaattacctgactcaaatatctctccccgatagtgatacatcctacatttcactctctcctgttgcatcgctatcgatgcaaagccactttcatcagaggctccaagatgaaaatcggcatagcgcgataacgcggtttagccgaactaccaacatgggggtcactgcgatgacatgtggcggcgcatttagaatgttaaagtctggcgctaagttttccagcccccctcatcaccgattaaacagtaaacgaagttggttgacgtcagagcatgttcagtcattaaaacagtaccagcgcctcaacaaaagcctcatacctgaaaactctcggattgcactccgtagaaaatacaaaatcgagcttcaaaatatggtcagatcttggtttgcaatgcaagaccatacccttgattcgaacatacttatccaacatttgaatcatgacctatcttacttaggagccacaaaacgttttgcatacgatccagcgatgaccaagctctttactgagcttttgaaacgagagttatcaaattcaatcaataatggtgagcaacacactaatggatcgtttttagtcctaccgaatatcagggtttgtggcgcaacagctttaagctccccggtaacggtggggattccatcacttacagctttctttggcttcgttcacgcatttgaacggaatataaatcgcaccacctcatcgtttcgtgttgaatcctttgcgatatgcgtccatcaactacatgtcgagaagcgaggtttgacagcagagtttgtggaaaaaggcgacgggactatatccgctcccgcgacccgggatgactggcagtgtgatgtcgtatttagccttattttgaacaccaactttgctcaacatattgaccaagatacgttagttacatcactaccaaagcgattggctcggggttcagcaaaaattgcgattgatgactttaaacatatcaactcattctcgacattagaaacagcgatcgaatctctgccaatagaagctggtaggtggttatcactttacgcacagtcaaacaataatctaagtgatctattagcagccatgacagaggaccatcagctcatggcaagctgcgtcggttaccacttgttagaagagcccaaagataaaccaaactccctcagaggttacaaacacgctatcgccgagtgcatcattggactcattaactcaatcacctttagctcagagactgatcccaacacaatcttttggtcgctaaagaactatcaaaactacctagtggtacagccaaggagtatcaacgatgaaactaccgacaaatctagcctatgagcgctctatcgacccatcagatgtctgtttttttgtcgtctggcccgatgatagaaaaacacctttaacctacaattctcgtactctgctcgggcaaatggaagcggcatcattagcctatgatgtctcaggtcaaccaataaaaagtgccaccgctgaggcgttagctcaagggaaccctcatcaagttgatttctgccacgttccatacggtgcgagtcatattgaatgcagtttctccgtctcgttttcttctgaactacgtcaaccatataagtgtaactcaagcaaagttaaacaaacgctagtgcaattagtcgagctctacgaaacgaaaatcggctggactgagctagcaacccgatatttgatgaacatttgcaacggtaaatggctgtggaaaaatacccgtaaagcctattgctggaacattgtacttacaccttggccttggaacggggaaaaggttggatttgaagatattcgtactaactacacctcacggcaagactttaaaaataataaaaattggtctgctatagttgaaatgatcaaaaccgcattttctagtactgatgggctggcgatatttgaagtcagggccaccttgcacttgccaacgaatgctatggtgcggccaagccaagttttcacagaaaaagaaagtggcagtaaaagtaaatctaaaactcaaaacagtcgagtttttcagagtacaactattgatggtgaacgatcgccaatactaggggcctttaaaacgggagcagctattgcaaccattgacgactggtatcctgaagccactgagccactaagggtcggacggtttggggttcatcgcgaagatgtcacttgctaccgtcatccgtctaccggaaaagattttttctcgatattacaacaagcagagcactatattgaagtgttgagcgccaacaaaactcccgctcaagaaactatcaacgacatgcactttttaatggctaacctgattaagggtgggatgttccagcataaaggagactgactgtgaaatggtattataagacaatcacctttctgccagagttgtgcaacaacgagtcactggctgcaaagtgtctccgcgttctgcatggatttaactatcagtatgagacacgaaatatcggcgtttcatttccgctttggtgtgatgcaacggttggaaaaaagatttcatttgtcagcaagaacaagatagaactcgacttactacttaaacaacactatttcgtccaaatggaacaacttcaatactttcatatatccaacactgttctcgtcccagaagattgtacatacgtttcctttagacgctgtcaatctatagataagctcacagcagcagggctggcaaggaaaatcagacgcctggagaaacgtgctctatctagaggcgagcaatttgacccatcatcttttgctcaaaaagagcatactgcaatagcgcactaccactcacttggggagtccagcaaacagacgaaccgcaactttcgactcaatatcaggatgctctcggagcaaccccgtgaggggaactcgatttttagtagctatggcttatcaaattcagaaaactcgtttcagcctgtacccttaatctgacctaggctgctgccaccgctgagcaataactagcataaccccttggggcctctaaacgggtcttgaggggttttttgctgaaacctcaggcatttgagaagcacacggtcacactgcttccggtagtcaataaaccggtaaaccagcaatagacataagcggctatttaacgaccctgccctgaaccgacgaccgggtcatcgtggccggatcttgcggcccctcggcttgaacgaattgttagacattatttgccgactaccttggtgatctcgcctttcacgtagtggacaaattcttccaactgatctgcgcgcgaggccaagcgatcttcttcttgtccaagataagcctgtctagcttcaagtatgacgggctgatactgggccggcaggcgctccattgcccagtcggcagcgacatccttcggcgcgattttgccggttactgcgctgtaccaaatgcgggacaacgtaagcactacatttcgctcatcgccagcccagtcgggcggcgagttccatagcgttaaggtttcatttagcgcctcaaatagatcctgttcaggaaccggatcaaagagttcctccgccgctggacctaccaaggcaacgctatgttctcttgcttttgtcagcaagatagccagatcaatgtcgatcgtggctggctcgaagatacctgcaagaatgtcattgcgctgccattctccaaattgcagttcgcgcttagctggataacgccacggaatgatgtcgtcgtgcacaacaatggtgacttctacagcgcggagaatctcgctctctccaggggaagccgaagtttccaaaaggtcgttgatcaaagctcgccgcgttgtttcatcaagccttacggtcaccgtaaccagcaaatcaatatcactgtgtggcttcaggccgccatccactgcggagccgtacaaatgtacggccagcaacgtcggttcgagatggcgctcgatgacgccaactacctctgatagttgagtcgatacttcggcgatcaccgcttccctcatactcttcctttttcaatattattgaagcatttatcagggttattgtctcatgagcggatacatatttgaatgtatttagaaaaataaacaaatagctagctcactcggtcgctacgctccgggcgtgagactgcggcgggcgctgcggacacatacaaagttacccacagattccgtggataagcaggggactaacatgtgaggcaaaacagcagggccgcgccggtggcgtttttccataggctccgccctcctgccagagttcacataaacagacgcttttccggtgcatctgtgggagccgtgaggctcaaccatgaatctgacagtacgggcgaaacccgacaggacttaaagatccccaccgtttccggcgggtcgctccctcttgcgctctcctgttccgaccctgccgtttaccggatacctgttccgcctttctcccttacgggaagtgtggcgctttctcatagctcacacactggtatctcggctcggtgtaggtcgttcgctccaagctgggctgtaagcaagaactccccgttcagcccgactgctgcgccttatccggtaactgttcacttgagtccaacccggaaaagcacggtaaaacgccactggcagcagccattggtaactgggagttcgcagaggatttgtttagctaaacacgcggttgctcttgaagtgtgcgccaaagtccggctacactggaaggacagatttggttgctgtgctctgcgaaagccagttaccacggttaagcagttccccaactgacttaaccttcgatcaaaccacctccccaggtggttttttcgtttacagggcaaaagattacgcgcagaaaaaaaggatctcaagaagatcctttgatcttttctactgaaccgctctagatttcagtgcaatttatctcttcaaatgtagcacctgaagtcagccccatacgatataagttgtaattctcatgttagtcatgccccgcgcccaccggaaggagctgactgggttgaaggctctcaagggcatcggtcgagatcccggtgcctaatgagtgagctaacttacattaattgcgttgcgctcactgcccgctttccagtcgggaaacctgtcgtgccagctgcattaatgaatcggccaacgcgcggggagaggcggtttgcgtattgggcgccagggtggtttttcttttcaccagtgagacgggcaacagctgattgcccttcaccgcctggccctgagagagttgcagcaagcggtccacgctggtttgccccagcaggcgaaaatcctgtttgatggtggttaacggcgggatataacatgagctgtcttcggtatcgtcgtatcccactaccgagatgtccgcaccaacgcgcagcccggactcggtaatggcgcgcattgcgcccagcgccatctgatcgttggcaaccagcatcgcagtgggaacgatgccctcattcagcatttgcatggtttgttgaaaaccggacatggcactccagtcgccttcccgttccgctatcggctgaatttgattgcgagtgagatatttatgccagccagccagacgcagacgcgccgagacagaacttaatgggcccgctaacagcgcgatttgctggtgacccaatgcgaccagatgctccacgcccagtcgcgtaccgtcttcatgggagaaaataatactgttgatgggtgtctggtcagagacatcaagaaataacgccggaacattagtgcaggcagcttccacagcaatggcatcctggtcatccagcggatagttaatgatcagcccactgacgcgttgcgcgagaagattgtgcaccgccgctttacaggcttcgacgccgcttcgttctaccatcgacaccaccacgctggcacccagttgatcggcgcgagatttaatcgccgcgacaatttgcgacggcgcgtgcagggccagactggaggtggcaacgccaatcagcaacgactgtttgcccgccagttgttgtgccacgcggttgggaatgtaattcagctccgccatcgccgcttccactttttcccgcgttttcgcagaaacgtggctggcctggttcaccacgcgggaaacggtctgataagagacaccggcatactctgcgacatcgtataacgttactggtttcac

SEQ ID NO: 117 - DNA, 8445 bp, Synthetic construct
  source 1..8445: mol_type = other DNA
attcaccaccctgaattgactctcttccgggcgctatcatgccataccgcgaaaggttttgcgccattcgatggtgtccgggatctcgacgctctcccttatgcgactcctgcattaggaaattaatacgactcactataggggaattgtgagcggataacaattcccctgtagaaataattttgtttaactttaataaggagatataccatgggtgaactgccgagtaggtagctgataacgcgccactggtgtgggccataattcaattcgcgtgaactgccgagtaggtagctgataacggatccgaattcgagctcggcgcgcctgcaggtcgacaagcttgcggccgcataatgcttaagtcgaacagaaagtaatcgtattgtacacggccgcataatcgaaattaatacgactcactataggggaattgtgagcggataacaattccccatcttagtatattagttaagtataagaaggagatatacatatgtttttgcaaagacctaaaccttacagcgatgaaagtttagaaagtttctttatccgagtggctaacaaaaatggctacggtgatgtccatcgcttcctagaagccactaaacgattccttcaagacattgaccataatggctatcaaacctttccgactgatataactcggataaacccatactcagctaaaaacagttccagcgcacgaactgcgtcattcctgaaacttgcacaattgacatttaatgaaccgccagagctacttgggttggcaattaacagaacaaacatgaaatactcgccgtcaactagcgcggttgttagaggtgcagaagtctttcctcgcagtttactacggacgcactccatcccctgctgtcctttgtgtctgcgagaaaatggctacgcctcctacctttggcactttcaggggtacgaatactgccacagccataacgtacctttaattaccacttgtagctgtggtaaggagtttgactaccgagtatctgggttaaagggcatttgctgcaaatgcaaggagcctatcaccttaaccagcagggagaacggtcatgaggcagcgtgtactgtttcaaactggcttgctggccatgaatctaaacctctgccaaatcttcctaaaagctaccgatggggtttagttcattggtggatgggtattaaagatagcgagttcgatcacttttcgttcgttcaatttttctcaaactggccaaggtcattccactcgataatcgaagatgaagtagagttcaaccttgagcatgctgttgtcagcacgtctgaattacgactaaaagatcttcttggtcgattgtttttcggttcaattcggttacctgagcggaatcttcaacacaatatcatccttggtgagcttctctgctatttagaaaatcgtttatggcaagacaagggattaatcgccaacctcaaaatgaacgcgttagaggcgactgtaatgttaaattgtagcctcgatcagattgcatcaatggttgaacaacgcatcttgaagccaaatcgaaaaagcaagcccaacagccctcttgatgttaccgattatctatttcatttcggcgatattttctgtctttggttagctgagttccaaagcgatgagtttaaccgttcgttttatgtgtcgaggtggtaaatgcaaactctgaaagaactaatcgcatccaatcctgacgacttaacaactgaacttaagagagcatttcgtccactcacaccgcatattgcaattgatggtaatgaacttgacgcactgacgatattagtcaatttaaccgataagactgatgatcagaaagacctgctcgatcgagccaaatgcaagcaaaaacttcgagatgaaaaatggtgggctagctgcataaattgcgttaattacagacaaagccataacccaaaattcccggatatacgttctgaaggcgtgattcgaacccaagccctgggtgaattaccgagtttcctactctcgtcctcaaaaatcccaccataccattggtcatatagccatgattcaaaatacgtcaacaaaagcgcattcctcaccaatgagttttgttgggatggtgagatctcatgtttgggtgagcttcttaaagatgcagatcacccactttggaatactttgaaaaagttaggttgttctcaaaaaacttgcaaagcaatggcaaaacaactagctgatattactctcacgactatcaatgtcacactcgcaccaaattacctgactcaaatatctctccccgatagtgatacatcctacatttcactctctcctgttgcatcgctatcgatgcaaagccactttcatcagaggctccaagatgaaaatcggcatagcgcgataacgcggtttagccgaactaccaacatgggggtcactgcgatgacatgtggcggcgcatttagaatgttaaagtctggcgctaagttttccagcccccctcatcaccgattaaacagtaaacgaagttggttgacgtcagagcatgttcagtcattaaaacagtaccagcgcctcaacaaaagcctcatacctgaaaactctcggattgcactccgtagaaaatacaaaatcgagcttcaaaatatggtcagatcttggtttgcaatgcaagaccatacccttgattcgaacatacttatccaacatttgaatcatgacctatcttacttaggagccacaaaacgttttgcatacgatccagcgatgaccaagctctttactgagcttttgaaacgagagttatcaaattcaatcaataatggtgagcaacacactaatggatcgtttttagtcctaccgaatatcagggtttgtggcgcaacagctttaagctccccggtaacggtggggattccatcacttacagctttctttggcttcgttcacgcatttgaacggaatataaatcgcaccacctcatcgtttcgtgttgaatcctttgcgatatgcgtccatcaactacatgtcgagaagcgaggtttgacagcagagtttgtggaaaaaggcgacgggactatatccgctcccgcgacccgggatgactggcagtgtgatgtcgtatttagccttattttgaacaccaactttgctcaacatattgaccaagatacgttagttacatcactaccaaagcgattggctcggggttcagcaaaaattgcgattgatgactttaaacatatcaactcattctcgacattagaaacagcgatcgaatctctgccaatagaagctggtaggtggttatcactttacgcacagtcaaacaataatctaagtgatctattagcagccatgacagaggaccatcagctcatggcaagctgcgtcggttaccacttgttagaagagcccaaagataaaccaaactccctcagaggttacaaacacgctatcgccgagtgcatcattggactcattaactcaatcacctttagctcagagactgatcccaacacaatcttttggtcgctaaagaactatcaaaactacctagtggtacagccaaggagtatcaacgatgaaactaccgacaaatctagcctatgagcgctctatcgacccatcagatgtctgtttttttgtcgtctggcccgatgatagaaaaacacctttaacctacaattctcgtactctgctcgggcaaatggaagcggcatcattagcctatgatgtctcaggtcaaccaataaaaagtgccaccgctgaggcgttagctcaagggaaccctcatcaagttgatttctgccacgttccatacggtgcgagtcatattgaatgcagtttctccgtctcgttttcttctgaactacgtcaaccatataagtgtaactcaagcaaagttaaacaaacgctagtgcaattagtcgagctctacgaaacgaaaatcggctggactgagctagcaacccgatatttgatgaacatttgcaacggtaaatggctgtggaaaaatacccgtaaagcctattgctggaacattgtacttacaccttggccttggaacggggaaaaggttggatttgaagatattcgtactaactacacctcacggcaagactttaaaaataataaaaattggtctgctatagttgaaatgatcaaaaccgcattttctagtactgatgggctggcgatatttgaagtcagggccaccttgcacttgccaacgaatgctatggtgcggccaagccaagttttcacagaaaaagaaagtggcagtaaaagtaaatctaaaactcaaaacagtcgagtttttcagagtacaactattgatggtgaacgatcgccaatactaggggcctttaaaacgggagcagctattgcaaccattgacgactggtatcctgaagccactgagccactaagggtcggacggtttggggttcatcgcgaagatgtcacttgctaccgtcatccgtctaccggaaaagattttttctcgatattacaacaagcagagcactatattgaagtgttgagcgccaacaaaactcccgctcaagaaactatcaacgacatgcactttttaatggctaacctgattaagggtgggatgttccagcataaaggagactgactgtgaaatggtattataagacaatcacctttctgccagagttgtgcaacaacgagtcactggctgcaaagtgtctccgcgttctgcatggatttaactatcagtatgagacacgaaatatcggcgtttcatttccgctttggtgtgatgcaacggttggaaaaaagatttcatttgtcagcaagaacaagatagaactcgacttactacttaaacaacactatttcgtccaaatggaacaacttcaatactttcatatatccaacactgttctcgtcccagaagattgtacatacgtttcctttagacgctgtcaatctatagataagctcacagcagcagggctggcaaggaaaatcagacgcctggagaaacgtgctctatctagaggcgagcaatttgacccatcatcttttgctcaaaaagagcatactgcaatagcgcactaccactcacttggggagtccagcaaacagacgaaccgcaactttcgactcaatatcaggatgctctcggagcaaccccgtgaggggaactcgatttttagtagctatggcttatcaaattcagaaaactcgtttcagcctgtacccttaatctgacctaggctgctgccaccgctgagcaataactagcataaccccttggggcctctaaacgggtcttgaggggttttttgctgaaacctcaggcatttgagaagcacacggtcacactgcttccggtagtcaataaaccggtaaaccagcaatagacataagcggctatttaacgaccctgccctgaaccgacgaccgggtcatcgtggccggatcttgcggcccctcggcttgaacgaattgttagacattatttgccgactaccttggtgatctcgcctttcacgtagtggacaaattcttccaactgatctgcgcgcgaggccaagcgatcttcttcttgtccaagataagcctgtctagcttcaagtatgacgggctgatactgggccggcaggcgctccattgcccagtcggcagcgacatccttcggcgcgattttgccggttactgcgctgtaccaaatgcgggacaacgtaagcactacatttcgctcatcgccagcccagtcgggcggcgagttccatagcgttaaggtttcatttagcgcctcaaatagatcctgttcaggaaccggatcaaagagttcctccgccgctggacctaccaaggcaacgctatgttctcttgcttttgtcagcaagatagccagatcaatgtcgatcgtggctggctcgaagatacctgcaagaatgtcattgcgctgccattctccaaattgcagttcgcgcttagctggataacgccacggaatgatgtcgtcgtgcacaacaatggtgacttctacagcgcggagaatctcgctctctccaggggaagccgaagtttccaaaaggtcgttgatcaaagctcgccgcgttgtttcatcaagccttacggtcaccgtaaccagcaaatcaatatcactgtgtggcttcaggccgccatccactgcggagccgtacaaatgtacggccagcaacgtcggttcgagatggcgctcgatgacgccaactacctctgatagttgagtcgatacttcggcgatcaccgcttccctcatactcttcctttttcaatattattgaagcatttatcagggttattgtctcatgagcggatacatatttgaatgtatttagaaaaataaacaaatagctagctcactcggtcgctacgctccgggcgtgagactgcggcgggcgctgcggacacatacaaagttacccacagattccgtggataagcaggggactaacatgtgaggcaaaacagcagggccgcgccggtggcgtttttccataggctccgccctcctgccagagttcacataaacagacgcttttccggtgcatctgtgggagccgtgaggctcaaccatgaatctgacagtacgggcgaaacccgacaggacttaaagatccccaccgtttccggcgggtcgctccctcttgcgctctcctgttccgaccctgccgtttaccggatacctgttccgcctttctcccttacgggaagtgtggcgctttctcatagctcacacactggtatctcggctcggtgtaggtcgttcgctccaagctgggctgtaagcaagaactccccgttcagcccgactgctgcgccttatccggtaactgttcacttgagtccaacccggaaaagcacggtaaaacgccactggcagcagccattggtaactgggagttcgcagaggatttgtttagctaaacacgcggttgctcttgaagtgtgcgccaaagtccggctacactggaaggacagatttggttgctgtgctctgcgaaagccagttaccacggttaagcagttccccaactgacttaaccttcgatcaaaccacctccccaggtggttttttcgtttacagggcaaaagattacgcgcagaaaaaaaggatctcaagaagatcctttgatcttttctactgaaccgctctagatttcagtgcaatttatctcttcaaatgtagcacctgaagtcagccccatacgatataagttgtaattctcatgttagtcatgccccgcgcccaccggaaggagctgactgggttgaaggctctcaagggcatcggtcgagatcccggtgcctaatgagtgagctaacttacattaattgcgttgcgctcactgcccgctttccagtcgggaaacctgtcgtgccagctgcattaatgaatcggccaacgcgcggggagaggcggtttgcgtattgggcgccagggtggtttttcttttcaccagtgagacgggcaacagctgattgcccttcaccgcctggccctgagagagttgcagcaagcggtccacgctggtttgccccagcaggcgaaaatcctgtttgatggtggttaacggcgggatataacatgagctgtcttcggtatcgtcgtatcccactaccgagatgtccgcaccaacgcgcagcccggactcggtaatggcgcgcattgcgcccagcgccatctgatcgttggcaaccagcatcgcagtgggaacgatgccctcattcagcatttgcatggtttgttgaaaaccggacatggcactccagtcgccttcccgttccgctatcggctgaatttgattgcgagtgagatatttatgccagccagccagacgcagacgcgccgagacagaacttaatgggcccgctaacagcgcgatttgctggtgacccaatgcgaccagatgctccacgcccagtcgcgtaccgtcttcatgggagaaaataatactgttgatgggtgtctggtcagagacatcaagaaataacgccggaacattagtgcaggcagcttccacagcaatggcatcctggtcatccagcggatagttaatgatcagcccactgacgcgttgcgcgagaagattgtgcaccgccgctttacaggcttcgacgccgcttcgttctaccatcgacaccaccacgctggcacccagttgatcggcgcgagatttaatcgccgcgacaatttgcgacggcgcgtgcagggccagactggaggtggcaacgccaatcagcaacgactgtttgcccgccagttgttgtgccacgcggttgggaatgtaattcagctccgccatcgccgcttccactttttcccgcgttttcgcagaaacgtggctggcctggttcaccacgcgggaaacggtctgataagagacaccggcatactctgcgacatcgtataacgttactggtttcac

SEQ ID NO: 118 - DNA, 8445 bp, Synthetic construct
  source 1..8445: mol_type = other DNA
attcaccaccctgaattgactctcttccgggcgctatcatgccataccgcgaaaggttttgcgccattcgatggtgtccgggatctcgacgctctcccttatgcgactcctgcattaggaaattaatacgactcactataggggaattgtgagcggataacaattcccctgtagaaataattttgtttaactttaataaggagatataccatgggtgaactgccgagtaggtagctgataacaaaagtttgtgttttttaaatagtacataatggtgaactgccgagtaggtagctgataacggatccgaattcgagctcggcgcgcctgcaggtcgacaagcttgcggccgcataatgcttaagtcgaacagaaagtaatcgtattgtacacggccgcataatcgaaattaatacgactcactataggggaattgtgagcggataacaattccccatcttagtatattagttaagtataagaaggagatatacatatgtttttgcaaagacctaaaccttacagcgatgaaagtttagaaagtttctttatccgagtggctaacaaaaatggctacggtgatgtccatcgcttcctagaagccactaaacgattccttcaagacattgaccataatggctatcaaacctttccgactgatataactcggataaacccatactcagctaaaaacagttccagcgcacgaactgcgtcattcctgaaacttgcacaattgacatttaatgaaccgccagagctacttgggttggcaattaacagaacaaacatgaaatactcgccgtcaactagcgcggttgttagaggtgcagaagtctttcctcgcagtttactacggacgcactccatcccctgctgtcctttgtgtctgcgagaaaatggctacgcctcctacctttggcactttcaggggtacgaatactgccacagccataacgtacctttaattaccacttgtagctgtggtaaggagtttgactaccgagtatctgggttaaagggcatttgctgcaaatgcaaggagcctatcaccttaaccagcagggagaacggtcatgaggcagcgtgtactgtttcaaactggcttgctggccatgaatctaaacctctgccaaatcttcctaaaagctaccgatggggtttagttcattggtggatgggtattaaagatagcgagttcgatcacttttcgttcgttcaatttttctcaaactggccaaggtcattccactcgataatcgaagatgaagtagagttcaaccttgagcatgctgttgtcagcacgtctgaattacgactaaaagatcttcttggtcgattgtttttcggttcaattcggttacctgagcggaatcttcaacacaatatcatccttggtgagcttctctgctatttagaaaatcgtttatggcaagacaagggattaatcgccaacctcaaaatgaacgcgttagaggcgactgtaatgttaaattgtagcctcgatcagattgcatcaatggttgaacaacgcatcttgaagccaaatcgaaaaagcaagcccaacagccctcttgatgttaccgattatctatttcatttcggcgatattttctgtctttggttagctgagttccaaagcgatgagtttaaccgttcgttttatgtgtcgaggtggtaaatgcaaactctgaaagaactaatcgcatccaatcctgacgacttaacaactgaacttaagagagcatttcgtccactcacaccgcatattgcaattgatggtaatgaacttgacgcactgacgatattagtcaatttaaccgataagactgatgatcagaaagacctgctcgatcgagccaaatgcaagcaaaaacttcgagatgaaaaatggtgggctagctgcataaattgcgttaattacagacaaagccataacccaaaattcccggatatacgttctgaaggcgtgattcgaacccaagccctgggtgaattaccgagtttcctactctcgtcctcaaaaatcccaccataccattggtcatatagccatgattcaaaatacgtcaacaaaagcgcattcctcaccaatgagttttgttgggatggtgagatctcatgtttgggtgagcttcttaaagatgcagatcacccactttggaatactttgaaaaagttaggttgttctcaaaaaacttgcaaagcaatggcaaaacaactagctgatattactctcacgactatcaatgtcacactcgcaccaaattacctgactcaaatatctctccccgatagtgatacatcctacatttcactctctcctgttgcatcgctatcgatgcaaagccactttcatcagaggctccaagatgaaaatcggcatagcgcgataacgcggtttagccgaactaccaacatgggggtcactgcgatgacatgtggcggcgcatttagaatgttaaagtctggcgctaagttttccagcccccctcatcaccgattaaacagtaaacgaagttggttgacgtcagagcatgttcagtcattaaaacagtaccagcgcctcaacaaaagcctcatacctgaaaactctcggattgcactccgtagaaaatacaaaatcgagcttcaaaatatggtcagatcttggtttgcaatgcaagaccatacccttgattcgaacatacttatccaacatttgaatcatgacctatcttacttaggagccacaaaacgttttgcatacgatccagcgatgaccaagctctttactgagcttttgaaacgagagttatcaaattcaatcaataatggtgagcaacacactaatggatcgtttttagtcctaccgaatatcagggtttgtggcgcaacagctttaagctccccggtaacggtggggattccatcacttacagctttctttggcttcgttcacgcatttgaacggaatataaatcgcaccacctcatcgtttcgtgttgaatcctttgcgatatgcgtccatcaactacatgtcgagaagcgaggtttgacagcagagtttgtggaaaaaggcgacgggactatatccgctcccgcgacccgggatgactggcagtgtgatgtcgtatttagccttattttgaacaccaactttgctcaacatattgaccaagatacgttagttacatcactaccaaagcgattggctcggggttcagcaaaaattgcgattgatgactttaaacatatcaactcattctcgacattagaaacagcgatcgaatctctgccaatagaagctggtaggtggttatcactttacgcacagtcaaacaataatctaagtgatctattagcagccatgacagaggaccatcagctcatggcaagctgcgtcggttaccacttgttagaagagcccaaagataaaccaaactccctcagaggttacaaacacgctatcgccgagtgcatcattggactcattaactcaatcacctttagctcagagactgatcccaacacaatcttttggtcgctaaagaactatcaaaactacctagtggtacagccaaggagtatcaacgatgaaactaccgacaaatctagcctatgagcgctctatcgacccatcagatgtctgtttttttgtcgtctggcccgatgatagaaaaacacctttaacctacaattctcgtactctgctcgggcaaatggaagcggcatcattagcctatgatgtctcaggtcaaccaataaaaagtgccaccgctgaggcgttagctcaagggaaccctcatcaagttgatttctgccacgttccatacggtgcgagtcatattgaatgcagtttctccgtctcgttttcttctgaactacgtcaaccatataagtgtaactcaagcaaagttaaacaaacgctagtgcaattagtcgagctctacgaaacgaaaatcggctggactgagctagcaacccgatatttgatgaacatttgcaacggtaaatggctgtggaaaaatacccgtaaagcctattgctggaacattgtacttacaccttggccttggaacggggaaaaggttggatttgaagatattcgtactaactacacctcacggcaagactttaaaaataataaaaattggtctgctatagttgaaatgatcaaaaccgcattttctagtactgatgggctggcgatatttgaagtcagggccaccttgcacttgccaacgaatgctatggtgcggccaagccaagttttcacagaaaaagaaagtggcagtaaaagtaaatctaaaactcaaaacagtcgagtttttcagagtacaactattgatggtgaacgatcgccaatactaggggcctttaaaacgggagcagctattgcaaccattgacgactggtatcctgaagccactgagccactaagggtcggacggtttggggttcatcgcgaagatgtcacttgctaccgtcatccgtctaccggaaaagattttttctcgatattacaacaagcagagcactatattgaagtgttgagcgccaacaaaactcccgctcaagaaactatcaacgacatgcactttttaatggctaacctgattaagggtgggatgttccagcataaaggagactgactgtgaaatggtattataagacaatcacctttctgccagagttgtgcaacaacgagtcactggctgcaaagtgtctccgcgttctgcatggatttaactatcagtatgagacacgaaatatcggcgtttcatttccgctttggtgtgatgcaacggttggaaaaaagatttcatttgtcagcaagaacaagatagaactcgacttactacttaaacaacactatttcgtccaaatggaacaacttcaatactttcatatatccaacactgttctcgtcccagaagattgtacatacgtttcctttagacgctgtcaatctatagataagctcacagcagcagggctggcaaggaaaatcagacgcctggagaaacgtgctctatctagaggcgagcaatttgacccatcatcttttgctcaaaaagagcatactgcaatagcgcactaccactcacttggggagtccagcaaacagacgaaccgcaactttcgactcaatatcaggatgctctcggagcaaccccgtgaggggaactcgatttttagtagctatggcttatcaaattcagaaaactcgtttcagcctgtacccttaatctgacctaggctgctgccaccgctgagcaataactagcataaccccttggggcctctaaacgggtcttgaggggttttttgctgaaacctcaggcatttgagaagcacacggtcacactgcttccggtagtcaataaaccggtaaaccagcaatagacataagcggctatttaacgaccctgccctgaaccgacgaccgggtcatcgtggccggatcttgcggcccctcggcttgaacgaattgttagacattatttgccgactaccttggtgatctcgcctttcacgtagtggacaaattcttccaactgatctgcgcgcgaggccaagcgatcttcttcttgtccaagataagcctgtctagcttcaagtatgacgggctgatactgggccggcaggcgctccattgcccagtcggcagcgacatccttcggcgcgattttgccggttactgcgctgtaccaaatgcgggacaacgtaagcactacatttcgctcatcgccagcccagtcgggcggcgagttccatagcgttaaggtttcatttagcgcctcaaatagatcctgttcaggaaccggatcaaagagttcctccgccgctggacctaccaaggcaacgctatgttctcttgcttttgtcagcaagatagccagatcaatgtcgatcgtggctggctcgaagatacctgcaagaatgtcattgcgctgccattctccaaattgcagttcgcgcttagctggataacgccacggaatgatgtcgtcgtgcacaacaatggtgacttctacagcgcggagaatctcgctctctccaggggaagccgaagtttccaaaaggtcgttgatcaaagctcgccgcgttgtttcatcaagccttacggtcaccgtaaccagcaaatcaatatcactgtgtggcttcaggccgccatccactgcggagccgtacaaatgtacggccagcaacgtcggttcgagatggcgctcgatgacgccaactacctctgatagttgagtcgatacttcggcgatcaccgcttccctcatactcttcctttttcaatattattgaagcatttatcagggttattgtctcatgagcggatacatatttgaatgtatttagaaaaataaacaaatagctagctcactcggtcgctacgctccgggcgtgagactgcggcgggcgctgcggacacatacaaagttacccacagattccgtggataagcaggggactaacatgtgaggcaaaacagcagggccgcgccggtggcgtttttccataggctccgccctcctgccagagttcacataaacagacgcttttccggtgcatctgtgggagccgtgaggctcaaccatgaatctgacagtacgggcgaaacccgacaggacttaaagatccccaccgtttccggcgggtcgctccctcttgcgctctcctgttccgaccctgccgtttaccggatacctgttccgcctttctcccttacgggaagtgtggcgctttctcatagctcacacactggtatctcggctcggtgtaggtcgttcgctccaagctgggctgtaagcaagaactccccgttcagcccgactgctgcgccttatccggtaactgttcacttgagtccaacccggaaaagcacggtaaaacgccactggcagcagccattggtaactgggagttcgcagaggatttgtttagctaaacacgcggttgctcttgaagtgtgcgccaaagtccggctacactggaaggacagatttggttgctgtgctctgcgaaagccagttaccacggttaagcagttccccaactgacttaaccttcgatcaaaccacctccccaggtggttttttcgtttacagggcaaaagattacgcgcagaaaaaaaggatctcaagaagatcctttgatcttttctactgaaccgctctagatttcagtgcaatttatctcttcaaatgtagcacctgaagtcagccccatacgatataagttgtaattctcatgttagtcatgccccgcgcccaccggaaggagctgactgggttgaaggctctcaagggcatcggtcgagatcccggtgcctaatgagtgagctaacttacattaattgcgttgcgctcactgcccgctttccagtcgggaaacctgtcgtgccagctgcattaatgaatcggccaacgcgcggggagaggcggtttgcgtattgggcgccagggtggtttttcttttcaccagtgagacgggcaacagctgattgcccttcaccgcctggccctgagagagttgcagcaagcggtccacgctggtttgccccagcaggcgaaaatcctgtttgatggtggttaacggcgggatataacatgagctgtcttcggtatcgtcgtatcccactaccgagatgtccgcaccaacgcgcagcccggactcggtaatggcgcgcattgcgcccagcgccatctgatcgttggcaaccagcatcgcagtgggaacgatgccctcattcagcatttgcatggtttgttgaaaaccggacatggcactccagtcgccttcccgttccgctatcggctgaatttgattgcgagtgagatatttatgccagccagccagacgcagacgcgccgagacagaacttaatgggcccgctaacagcgcgatttgctggtgacccaatgcgaccagatgctccacgcccagtcgcgtaccgtcttcatgggagaaaataatactgttgatgggtgtctggtcagagacatcaagaaataacgccggaacattagtgcaggcagcttccacagcaatggcatcctggtcatccagcggatagttaatgatcagcccactgacgcgttgcgcgagaagattgtgcaccgccgctttacaggcttcgacgccgcttcgttctaccatcgacaccaccacgctggcacccagttgatcggcgcgagatttaatcgccgcgacaatttgcgacggcgcgtgcagggccagactggaggtggcaacgccaatcagcaacgactgtttgcccgccagttgttgtgccacgcggttgggaatgtaattcagctccgccatcgccgcttccactttttcccgcgttttcgcagaaacgtggctggcctggttcaccacgcgggaaacggtctgataagagacaccggcatactctgcgacatcgtataacgttactggtttcac

SEQ ID NO: 119 - DNA, 8445 bp, Synthetic construct
  source 1..8445: mol_type = other DNA
attcaccaccctgaattgactctcttccgggcgctatcatgccataccgcgaaaggttttgcgccattcgatggtgtccgggatctcgacgctctcccttatgcgactcctgcattaggaaattaatacgactcactataggggaattgtgagcggataacaattcccctgtagaaataattttgtttaactttaataaggagatataccatgggtgaactgccgagtaggtagctgataaccgagtttgtcagaaagcagaccaaacagcggtgtgaactgccgagtaggtagctgataacggatccgaattcgagctcggcgcgcctgcaggtcgacaagcttgcggccgcataatgcttaagtcgaacagaaagtaatcgtattgtacacggccgcataatcgaaattaatacgactcactataggggaattgtgagcggataacaattccccatcttagtatattagttaagtataagaaggagatatacatatgtttttgcaaagacctaaaccttacagcgatgaaagtttagaaagtttctttatccgagtggctaacaaaaatggctacggtgatgtccatcgcttcctagaagccactaaacgattccttcaagacattgaccataatggctatcaaacctttccgactgatataactcggataaacccatactcagctaaaaacagttccagcgcacgaactgcgtcattcctgaaacttgcacaattgacatttaatgaaccgccagagctacttgggttggcaattaacagaacaaacatgaaatactcgccgtcaactagcgcggttgttagaggtgcagaagtctttcctcgcagtttactacggacgcactccatcccctgctgtcctttgtgtctgcgagaaaatggctacgcctcctacctttggcactttcaggggtacgaatactgccacagccataacgtacctttaattaccacttgtagctgtggtaaggagtttgactaccgagtatctgggttaaagggcatttgctgcaaatgcaaggagcctatcaccttaaccagcagggagaacggtcatgaggcagcgtgtactgtttcaaactggcttgctggccatgaatctaaacctctgccaaatcttcctaaaagctaccgatggggtttagttcattggtggatgggtattaaagatagcgagttcgatcacttttcgttcgttcaatttttctcaaactggccaaggtcattccactcgataatcgaagatgaagtagagttcaaccttgagcatgctgttgtcagcacgtctgaattacgactaaaagatcttcttggtcgattgtttttcggttcaattcggttacctgagcggaatcttcaacacaatatcatccttggtgagcttctctgctatttagaaaatcgtttatggcaagacaagggattaatcgccaacctcaaaatgaacgcgttagaggcgactgtaatgttaaattgtagcctcgatcagattgcatcaatggttgaacaacgcatcttgaagccaaatcgaaaaagcaagcccaacagccctcttgatgttaccgattatctatttcatttcggcgatattttctgtctttggttagctgagttccaaagcgatgagtttaaccgttcgttttatgtgtcgaggtggtaaatgcaaactctgaaagaactaatcgcatccaatcctgacgacttaacaactgaacttaagagagcatttcgtccactcacaccgcatattgcaattgatggtaatgaacttgacgcactgacgatattagtcaatttaaccgataagactgatgatcagaaagacctgctcgatcgagccaaatgcaagcaaaaacttcgagatgaaaaatggtgggctagctgcataaattgcgttaattacagacaaagccataacccaaaattcccggatatacgttctgaaggcgtgattcgaacccaagccctgggtgaattaccgagtttcctactctcgtcctcaaaaatcccaccataccattggtcatatagccatgattcaaaatacgtcaacaaaagcgcattcctcaccaatgagttttgttgggatggtgagatctcatgtttgggtgagcttcttaaagatgcagatcacccactttggaatactttgaaaaagttaggttgttctcaaaaaacttgcaaagcaatggcaaaacaactagctgatattactctcacgactatcaatgtcacactcgcaccaaattacctgactcaaatatctctccccgatagtgatacatcctacatttcactctctcctgttgcatcgctatcgatgcaaagccactttcatcagaggctccaagatgaaaatcggcatagcgcgataacgcggtttagccgaactaccaacatgggggtcactgcgatgacatgtggcggcgcatttagaatgttaaagtctggcgctaagttttccagcccccctcatcaccgattaaacagtaaacgaagttggttgacgtcagagcatgttcagtcattaaaacagtaccagcgcctcaacaaaagcctcatacctgaaaactctcggattgcactccgtagaaaatacaaaatcgagcttcaaaatatggtcagatcttggtttgcaatgcaagaccatacccttgattcgaacatacttatccaacatttgaatcatgacctatcttacttaggagccacaaaacgttttgcatacgatccagcgatgaccaagctctttactgagcttttgaaacgagagttatcaaattcaatcaataatggtgagcaacacactaatggatcgtttttagtcctaccgaatatcagggtttgtggcgcaacagctttaagctccccggtaacggtggggattccatcacttacagctttctttggcttcgttcacgcatttgaacggaatataaatcgcaccacctcatcgtttcgtgttgaatcctttgcgatatgcgtccatcaactacatgtcgagaagcgaggtttgacagcagagtttgtggaaaaaggcgacgggactatatccgctcccgcgacccgggatgactggcagtgtgatgtcgtatttagccttattttgaacaccaactttgctcaacatattgaccaagatacgttagttacatcactaccaaagcgattggctcggggttcagcaaaaattgcgattgatgactttaaacatatcaactcattctcgacattagaaacagcgatcgaatctctgccaatagaagctggtaggtggttatcactttacgcacagtcaaacaataatctaagtgatctattagcagccatgacagaggaccatcagctcatggcaagctgcgtcggttaccacttgttagaagagcccaaagataaaccaaactccctcagaggttacaaacacgctatcgccgagtgcatcattggactcattaactcaatcacctttagctcagagactgatcccaacacaatcttttggtcgctaaagaactatcaaaactacctagtggtacagccaaggagtatcaacgatgaaactaccgacaaatctagcctatgagcgctctatcgacccatcagatgtctgtttttttgtcgtctggcccgatgatagaaaaacacctttaacctacaattctcgtactctgctcgggcaaatggaagcggcatcattagcctatgatgtctcaggtcaaccaataaaaagtgccaccgctgaggcgttagctcaagggaaccctcatcaagttgatttctgccacgttccatacggtgcgagtcatattgaatgcagtttctccgtctcgttttcttctgaactacgtcaaccatataagtgtaactcaagcaaagttaaacaaacgctagtgcaattagtcgagctctacgaaacgaaaatcggctggactgagctagcaacccgatatttgatgaacatttgcaacggtaaatggctgtggaaaaatacccgtaaagcctattgctggaacattgtacttacaccttggccttggaacggggaaaaggttggatttgaagatattcgtactaactacacctcacggcaagactttaaaaataataaaaattggtctgctatagttgaaatgatcaaaaccgcattttctagtactgatgggctggcgatatttgaagtcagggccaccttgcacttgccaacgaatgctatggtgcggccaagccaagttttcacagaaaaagaaagtggcagtaaaagtaaatctaaaactcaaaacagtcgagtttttcagagtacaactattgatggtgaacgatcgccaatactaggggcctttaaaacgggagcagctattgcaaccattgacgactggtatcctgaagccactgagccactaagggtcggacggtttggggttcatcgcgaagatgtcacttgctaccgtcatccgtctaccggaaaagattttttctcgatattacaacaagcagagcactatattgaagtgttgagcgccaacaaaactcccgctcaagaaactatcaacgacatgcactttttaatggctaacctgattaagggtgggatgttccagcataaaggagactgactgtgaaatggtattataagacaatcacctttctgccagagttgtgcaacaacgagtcactggctgcaaagtgtctccgcgttctgcatggatttaactatcagtatgagacacgaaatatcggcgtttcatttccgctttggtgtgatgcaacggttggaaaaaagatttcatttgtcagcaagaacaagatagaactcgacttactacttaaacaacactatttcgtccaaatggaacaacttcaatactttcatatatccaacactgttctcgtcccagaagattgtacatacgtttcctttagacgctgtcaatctatagataagctcacagcagcagggctggcaaggaaaatcagacgcctggagaaacgtgctctatctagaggcgagcaatttgacccatcatcttttgctcaaaaagagcatactgcaatagcgcactaccactcacttggggagtccagcaaacagacgaaccgcaactttcgactcaatatcaggatgctctcggagcaaccccgtgaggggaactcgatttttagtagctatggcttatcaaattcagaaaactcgtttcagcctgtacccttaatctgacctaggctgctgccaccgctgagcaataactagcataaccccttggggcctctaaacgggtcttgaggggttttttgctgaaacctcaggcatttgagaagcacacggtcacactgcttccggtagtcaataaaccggtaaaccagcaatagacataagcggctatttaacgaccctgccctgaaccgacgaccgggtcatcgtggccggatcttgcggcccctcggcttgaacgaattgttagacattatttgccgactaccttggtgatctcgcctttcacgtagtggacaaattcttccaactgatctgcgcgcgaggccaagcgatcttcttcttgtccaagataagcctgtctagcttcaagtatgacgggctgatactgggccggcaggcgctccattgcccagtcggcagcgacatccttcggcgcgattttgccggttactgcgctgtaccaaatgcgggacaacgtaagcactacatttcgctcatcgccagcccagtcgggcggcgagttccatagcgttaaggtttcatttagcgcctcaaatagatcctgttcaggaaccggatcaaagagttcctccgccgctggacctaccaaggcaacgctatgttctcttgcttttgtcagcaagatagccagatcaatgtcgatcgtggctggctcgaagatacctgcaagaatgtcattgcgctgccattctccaaattgcagttcgcgcttagctggataacgccacggaatgatgtcgtcgtgcacaacaatggtgacttctacagcgcggagaatctcgctctctccaggggaagccgaagtttccaaaaggtcgttgatcaaagctcgccgcgttgtttcatcaagccttacggtcaccgtaaccagcaaatcaatatcactgtgtggcttcaggccgccatccactgcggagccgtacaaatgtacggccagcaacgtcggttcgagatggcgctcgatgacgccaactacctctgatagttgagtcgatacttcggcgatcaccgcttccctcatactcttcctttttcaatattattgaagcatttatcagggttattgtctcatgagcggatacatatttgaatgtatttagaaaaataaacaaatagctagctcactcggtcgctacgctccgggcgtgagactgcggcgggcgctgcggacacatacaaagttacccacagattccgtggataagcaggggactaacatgtgaggcaaaacagcagggccgcgccggtggcgtttttccataggctccgccctcctgccagagttcacataaacagacgcttttccggtgcatctgtgggagccgtgaggctcaaccatgaatctgacagtacgggcgaaacccgacaggacttaaagatccccaccgtttccggcgggtcgctccctcttgcgctctcctgttccgaccctgccgtttaccggatacctgttccgcctttctcccttacgggaagtgtggcgctttctcatagctcacacactggtatctcggctcggtgtaggtcgttcgctccaagctgggctgtaagcaagaactccccgttcagcccgactgctgcgccttatccggtaactgttcacttgagtccaacccggaaaagcacggtaaaacgccactggcagcagccattggtaactgggagttcgcagaggatttgtttagctaaacacgcggttgctcttgaagtgtgcgccaaagtccggctacactggaaggacagatttggttgctgtgctctgcgaaagccagttaccacggttaagcagttccccaactgacttaaccttcgatcaaaccacctccccaggtggttttttcgtttacagggcaaaagattacgcgcagaaaaaaaggatctcaagaagatcctttgatcttttctactgaaccgctctagatttcagtgcaatttatctcttcaaatgtagcacctgaagtcagccccatacgatataagttgtaattctcatgttagtcatgccccgcgcccaccggaaggagctgactgggttgaaggctctcaagggcatcggtcgagatcccggtgcctaatgagtgagctaacttacattaattgcgttgcgctcactgcccgctttccagtcgggaaacctgtcgtgccagctgcattaatgaatcggccaacgcgcggggagaggcggtttgcgtattgggcgccagggtggtttttcttttcaccagtgagacgggcaacagctgattgcccttcaccgcctggccctgagagagttgcagcaagcggtccacgctggtttgccccagcaggcgaaaatcctgtttgatggtggttaacggcgggatataacatgagctgtcttcggtatcgtcgtatcccactaccgagatgtccgcaccaacgcgcagcccggactcggtaatggcgcgcattgcgcccagcgccatctgatcgttggcaaccagcatcgcagtgggaacgatgccctcattcagcatttgcatggtttgttgaaaaccggacatggcactccagtcgccttcccgttccgctatcggctgaatttgattgcgagtgagatatttatgccagccagccagacgcagacgcgccgagacagaacttaatgggcccgctaacagcgcgatttgctggtgacccaatgcgaccagatgctccacgcccagtcgcgtaccgtcttcatgggagaaaataatactgttgatgggtgtctggtcagagacatcaagaaataacgccggaacattagtgcaggcagcttccacagcaatggcatcctggtcatccagcggatagttaatgatcagcccactgacgcgttgcgcgagaagattgtgcaccgccgctttacaggcttcgacgccgcttcgttctaccatcgacaccaccacgctggcacccagttgatcggcgcgagatttaatcgccgcgacaatttgcgacggcgcgtgcagggccagactggaggtggcaacgccaatcagcaacgactgtttgcccgccagttgttgtgccacgcggttgggaatgtaattcagctccgccatcgccgcttccactttttcccgcgttttcgcagaaacgtggctggcctggttcaccacgcgggaaacggtctgataagagacaccggcatactctgcgacatcgtataacgttactggtttcac

SEQ ID NO: 120 - DNA, 5335 bp, Synthetic construct
  source 1..5335: mol_type = other DNA
tcgcgcgtttcggtgatgacggtgaaaacctctgacacatgcagctcccggagacggtcacagcttgtctgtaagcggatgccgggagcagacaagcccgtcagggcgcgtcagcgggtgttggcgggtgtcggggctggcttaactatgcggcatcagagcagattgtactgagagtgcaccatatgcggtgtgaaataccgcacagatgcgtaaggagaaaataccgcatcaggcgccattcgccattcaggctgcgcaactgttgggaagggcgatcggtgcgggcctcttcgctattacgccagctggcgaaagggggatgtgctgcaaggcgattaagttgggtaacgccagggttttcccagtcacgacgttgtaaaacgacggccagtgaattcgagctcggtacctaacaggttggatgataagtccccggtcttcgtatgccgtcttctgcttggcgcgccctcgagcaattgaggaagcggaacacgtagaaagccagtccgcagaaacggtgctgaccccggatgaatgtcagctactgggctatctggacaagggaaaacgcaagcgcaaagagaaagcaggtagcttgcagtgggcttacatggcgatagctagactgggcggttttatggacagcaagcgaaccggaattgccagctggggcgccctctggtaaggttgggaagccctgcaaagtaaactggatggctttcttgccgccaaggatctgatggcgcaggggatcaagatctgatcaagagacaggatgaggatcgtttcgcatgattgaacaagatggattgcacgcaggttctccggccgcttgggtggagaggctattcggctatgactgggcacaacagacaatcggctgctctgatgccgccgtgttccggctgtcagcgcaggggcgcccggttctttttgtcaagaccgacctgtccggtgccctgaatgaactgcaggacgaggcagcgcggctatcgtggctggccacgacgggcgttccttgcgcagctgtgctcgacgttgtcactgaagcgggaagggactggctgctattgggcgaagtgccggggcaggatctcctgtcatctcaccttgctcctgccgagaaagtatccatcatggctgatgcaatgcggcggctgcatacgcttgatccggctacctgcccattcgaccaccaagcgaaacatcgcatcgagcgagcacgtactcggatggaagccggtcttgtcgatcaggatgatctggacgaagagcatcaggggctcgcgccagccgaactgttcgccaggctcaaggcgcgcatgcccgacggcgaggatctcgtcgtgacccatggcgatgcctgcttgccgaatatcatggtggaaaatggccgcttttctggattcatcgactgtggccggctgggtgtggcggaccgctatcaggacatagcgttggctacccgtgatattgctgaagagcttggcggcgaatgggctgaccgcttcctcgtgctttacggtatcgccgctcccgattcgcagcgcatcgccttctatcgccttcttgacgagttcttctgagcgggactctggggttcgaaatgactctagaatgcgagagtagggaactgccaggcatcaaataaaacgaaaggctcagtcgaaagactgggcctttcgttttatctgttgtttgtcggtgaacgctctcctgagtaggacaaatccgccgggagcggatttgaacgttgcgaagcaacggcccggagggtggcgggcaggacgcccgccataaactgccaggcatcaaattaagcagaaggccatcctgacggatggcctttttgcgtttctacctgcagggcgcgccaagcagaagacggcatacgaagaccggggacttatcatccaacctgttaggatccagtgagcgcaacgcaattaatgtgagttagctcactcattaggcaccccaggctttacactttatgcttccggctcgtatgttgtgtggaattgtgagcggatacatatggaaaaaaaggaatttcgtgttttgataaaatactgttttctgaagggaaaaaatacagtggaagcaaaaacttggcttgataatgagtttccggactctgccccagggaaatcaacaataattgattggtatgcaaaattcaagcgtggtgaaatgagcacggaggacggtgaacgcagtggacgcccgaaagaggtggttaccgacgaaaacatcaaaaaaatccacaaaatgattttgaatgaccgtaaaatgaagttgatcgagatagcagaggccttaaagatatcaaaggaacgtgttggtcatatcattcatcaatatttggatatgcggaagctctgtgcgaaatgggtgccgcgcgagctcacatttgaccaaaaacaacgacgtgttgatgattctaagcggtgtttgcagctgttaactcgtaatacacccgagtttttccgtcgatatgtgacaatggatgaaacatggctccatcactacactcctgagtccaatcgacagtcggctgagtggacagcgaccggtgaaccgtctccgaagcgtggaaagactcaaaagtccgctggcaaagtaatggcctctgttttttgggatgcgcatggaataatttttatcgattatcttgagaagggaaaaaccatcaacagtgactattatatggcgttattggagcgtttgaaggtcgaaatcgcggcaaaacggccccacatgaagaagaaaaaagtgttgttccaccaagacaacgcaccgtgccacaagtcattgagaacgatggcaaaaattcatgaattgggcttcgaattgcttccccacccgccgtattctccagatctggcccccagcgactttttcttgttctcagacctcaaaaggatgctcgcagggaaaaaatttggctgcaatgaagaggtgatcgccgaaactgaggcctattttgaggcaaaaccgaaggagtactaccaaaatggtatcaaaaaattggaaggtcgttataatcgttgtatcgctcttgaagggaactatgttgaataagcggccgcaagcttggcgtaatcatggtcatagctgtttcctgtgtgaaattgttatccgctcacaattccacacaacatacgagccggaagcataaagtgtaaagcctggggtgcctaatgagtgagctaactcacattaattgcgttgcgctcactgcccgctttccagtcgggaaacctgtcgtgccagctgcattaatgaatcggccaacgcgcggggagaggcggtttgcgtattgggcgctcttccgcttcctcgctcactgactcgctgcgctcggtcgttcggctgcggcgagcggtatcagctcactcaaaggcggtaatacggttatccacagaatcaggggataacgcaggaaagaacatgtgagcaaaaggccagcaaaaggccaggaaccgtaaaaaggccgcgttgctggcgtttttccataggctccgcccccctgacgagcatcacaaaaatcgacgctcaagtcagaggtggcgaaacccgacaggactataaagataccaggcgtttccccctggaagctccctcgtgcgctctcctgttccgaccctgccgcttaccggatacctgtccgcctttctcccttcgggaagcgtggcgctttctcatagctcacgctgtaggtatctcagttcggtgtaggtcgttcgctccaagctgggctgtgtgcacgaaccccccgttcagcccgaccgctgcgccttatccggtaactatcgtcttgagtccaacccggtaagacacgacttatcgccactggcagcagccactggtaacaggattagcagagcgaggtatgtaggcggtgctacagagttcttgaagtggtggcctaactacggctacactagaagaacagtatttggtatctgcgctctgctgaagccagttaccttcggaaaaagagttggtagctcttgatccggcaaacaaaccaccgctggtagcggtggtttttttgtttgcaagcagcagattacgcgcagaaaaaaaggatctcaagaagatcctttgatcttttctacggggtctgacgctcagtggaacgaaaactcacgttaagggattttggtcatgagattatcaaaaaggatcttcacctagatccttttaaattaaaaatgaagttttaaatcaatctaaagtatatatgagtaaacttggtctgacagttaccaatgcttaatcagtgaggcacctatctcagcgatctgtctatttcgttcatccatagttgcctgactccccgtcgtgtagataactacgatacgggagggcttaccatctggccccagtgctgcaatgataccgcgagacccacgctcaccggctccagatttatcagcaataaaccagccagccggaagggccgagcgcagaagtggtcctgcaactttatccgcctccatccagtctattaattgttgccgggaagctagagtaagtagttcgccagttaatagtttgcgcaacgttgttgccattgctacaggcatcgtggtgtcacgctcgtcgtttggtatggcttcattcagctccggttcccaacgatcaaggcgagttacatgatcccccatgttgtgcaaaaaagcggttagctccttcggtcctccgatcgttgtcagaagtaagttggccgcagtgttatcactcatggttatggcagcactgcataattctcttactgtcatgccatccgtaagatgcttttctgtgactggtgagtactcaaccaagtcattctgagaatagtgtatgcggcgaccgagttgctcttgcccggcgtcaatacgggataataccgcgccacatagcagaactttaaaagtgctcatcattggaaaacgttcttcggggcgaaaactctcaaggatcttaccgctgttgagatccagttcgatgtaacccactcgtgcacccaactgatcttcagcatcttttactttcaccagcgtttctgggtgagcaaaaacaggaaggcaaaatgccgcaaaaaagggaataagggcgacacggaaatgttgaatactcatactcttcctttttcaatattattgaagcatttatcagggttattgtctcatgagcggatacatatttgaatgtatttagaaaaataaacaaataggggttccgcgcacatttccccgaaaagtgccacctgacgtctaagaaaccattattatcatgacattaacctataaaaataggcgtatcacgaggccctttcgtc

SEQ ID NO: 121 - DNA, 3630 bp, Synthetic construct
  source 1..3630: mol_type = other DNA
aacgccagcaacgcggcctttttacggttcctggccttttgctggccttttgctcacatgttctttcctgcgttatcccctgattctgtggataaccgtattaccgcctttgagtgagctgataccgctcgccgcagccgaacgaccgagcgcagcgagtcagtgagcgaggaagcggaagagcgcccaatacgcaaaccgcctctccccgcgcgttggccgattcattaatgcagctggcacgacaggtttcccgactggaaagcgggcagtgagcgcaacgcaattaatgtgagttagctcactcattaggcaccccaggctttacactttatgcttccggctcgtatgttgtgtggaattgtgagcggataacaatttcacacaggaaacagctatgaccatgattacgccaagctttgttggaacaaccataaaatgataattacacccataaattgataattatcacacccataaattgatattgcctcttcatggtctaaacttcagtaagtttacgacattttcatgaagaggtcatttccggggatccatggagaaaaaaatcactggatataccaccgttgatatatcccaatggcatcgtaaagaacattttgaggcatttcagtcagttgctcaatgtacctataaccagaccgttcagctggatattacggcctttttaaagaccgtaaagaaaaataagcacaagttttatccggcctttattcacattcttgcccgcctgatgaatgctcatccggagttccgtatggcaatgaaagacggtgagctggtgatatgggatagtgttcacccttgttacaccgttttccatgagcaaactgaaacgttttcatcgctctggagtgaataccacgacgatttccggcagtttctacacatatattcgcaagatgtggcgtgttacggtgaaaacctggcctatttccctaaagggtttattgagaatatgtttttcgtctcagccaatccctgggtgagtttcaccagttttgatttaaacgtggccaatatggacaacttcttcgcccccgttttcactatgggcaaatattatacgcaaggcgacaaggtgctgatgccgctggcgattcaggttcatcatgccgtttgtgatggcttccatgtcggcagaatgcttaatgaattacaacagtactgcgatgagtggcagggcggggcgtaatttttttaaggcagttattggtgcccttctagagtccttactgcagtagttttgctgaaatactcgattcacaaaaatatcaacttatggttgttttgtgagatatcaatatatggttgttttgtggttaagttgctgattataaataattattaaatatcactttatggttgcatcaacaggtaccgagctcgaattcactggccgtcgttttacaacgtcgtgactgggaaaaccctggcgttacccaacttaatcgccttgcagcacatccccctttcgccagctggcgtaatagcgaagaggcccgcaccgatcgcccttcccaacagttgcgcagcctgaatggcgaatggcgcctgatgcggtattttctccttacgcatctgtgcggtatttcacaccgcatatggtgcactctcagtacaatctgctctgatgccgcatagttaagccagccccgacacccgccaacacccgctgacgcgccctgacgggcttgtctgctcccggcatccgcttacagacaagctgtgaccgtctccgggagctgcatgtgtcagaggttttcaccgtcatcaccgaaacgcgcgagacgaaagggcctcgtgatacgcctatttttataggttaatgtcatgataataatggtttcttagacgtcaggtggcacttttcggggaaatgtgcgcggaacccctatttgtttatttttctaaatacattcaaatatgtatccgctcatgagacaataaccctgataaatgcttcaataatattgaaaaaggaagagtatgagtattcaacatttccgtgtcgcccttattcccttttttgcggcattttgccttcctgtttttgctcacccagaaacgctggtgaaagtaaaagatgctgaagatcagttgggtgcacgagtgggttacatcgaactggatctcaacagcggtaagatccttgagagttttcgccccgaagaacgttttccaatgatgagcacttttaaagttctgctatgtggcgcggtattatcccgtattgacgccgggcaagagcaactcggtcgccgcatacactattctcagaatgacttggttgagtactcaccagtcacagaaaagcatcttacggatggcatgacagtaagagaattatgcagtgctgccataaccatgagtgataacactgcggccaacttacttctgacaacgatcggaggaccgaaggagctaaccgcttttttgcacaacatgggggatcatgtaactcgccttgatcgttgggaaccggagctgaatgaagccataccaaacgacgagcgtgacaccacgatgcctgtagcaatggcaacaacgttgcgcaaactattaactggcgaactacttactctagcttcccggcaacaattaatagactggatggaggcggataaagttgcaggaccacttctgcgctcggcccttccggctggctggtttattgctgataaatctggagccggtgagcgtgggtctcgcggtatcattgcagcactggggccagatggtaagccctcccgtatcgtagttatctacacgacggggagtcaggcaactatggatgaacgaaatagacagatcgctgagataggtgcctcactgattaagcattggtaactgtcagaccaagtttactcatatatactttagattgatttaaaacttcatttttaatttaaaaggatctaggtgaagatcctttttgataatctcatgaccaaaatcccttaacgtgagttttcgttccactgagcgtcagaccccgtagaaaagatcaaaggatcttcttgagatcctttttttctgcgcgtaatctgctgcttgcaaacaaaaaaaccaccgctaccagcggtggtttgtttgccggatcaagagctaccaactctttttccgaaggtaactggcttcagcagagcgcagataccaaatactgttcttctagtgtagccgtagttaggccaccacttcaagaactctgtagcaccgcctacatacctcgctctgctaatcctgttaccagtggctgctgccagtggcgataagtcgtgtcttaccgggttggactcaagacgatagttaccggataaggcgcagcggtcgggctgaacggggggttcgtgcacacagcccagcttggagcgaacgacctacaccgaactgagatacctacagcgtgagctatgagaaagcgccacgcttcccgaagggagaaaggcggacaggtatccggtaagcggcagggtcggaacaggagagcgcacgagggagcttccagggggaaacgcctggtatctttatagtcctgtcgggtttcgccacctctgacttgagcgtcgatttttgtgatgctcgtcaggggggcggagcctatggaaa

SEQ ID NO: 122 - DNA, 3630 bp, Synthetic construct
  source 1..3630: mol_type = other DNA
gccgggcaagagcaactcggtcgccgcatacactattctcagaatgacttggttgagtactcaccagtcacagaaaagcatcttacggatggcatgacagtaagagaattatgcagtgctgccataaccatgagtgataacactgcggccaacttacttctgacaacgatcggaggaccgaaggagctaaccgcttttttgcacaacatgggggatcatgtaactcgccttgatcgttgggaaccggagctgaatgaagccataccaaacgacgagcgtgacaccacgatgcctgtagcaatggcaacaacgttgcgcaaactattaactggcgaactacttactctagcttcccggcaacaattaatagactggatggaggcggataaagttgcaggaccacttctgcgctcggcccttccggctggctggtttattgctgataaatctggagccggtgagcgtgggtctcgcggtatcattgcagcactggggccagatggtaagccctcccgtatcgtagttatctacacgacggggagtcaggcaactatggatgaacgaaatagacagatcgctgagataggtgcctcactgattaagcattggtaactgtcagaccaagtttactcatatatactttagattgatttaaaacttcatttttaatttaaaaggatctaggtgaagatcctttttgataatctcatgaccaaaatcccttaacgtgagttttcgttccactgagcgtcagaccccgtagaaaagatcaaaggatcttcttgagatcctttttttctgcgcgtaatctgctgcttgcaaacaaaaaaaccaccgctaccagcggtggtttgtttgccggatcaagagctaccaactctttttccgaaggtaactggcttcagcagagcgcagataccaaatactgttcttctagtgtagccgtagttaggccaccacttcaagaactctgtagcaccgcctacatacctcgctctgctaatcctgttaccagtggctgctgccagtggcgataagtcgtgtcttaccgggttggactcaagacgatagttaccggataaggcgcagcggtcgggctgaacggggggttcgtgcacacagcccagcttggagcgaacgacctacaccgaactgagatacctacagcgtgagctatgagaaagcgccacgcttcccgaagggagaaaggcggacaggtatccggtaagcggcagggtcggaacaggagagcgcacgagggagcttccagggggaaacgcctggtatctttatagtcctgtcgggtttcgccacctctgacttgagcgtcgatttttgtgatgctcgtcaggggggcggagcctatggaaaaacgccagcaacgcggcctttttacggttcctggccttttgctggccttttgctcacatgttctttcctgcgttatcccctgattctgtggataaccgtattaccgcctttgagtgagctgataccgctcgccgcagccgaacgaccgagcgcagcgagtcagtgagcgaggaagcggaagagcgcccaatacgcaaaccgcctctccccgcgcgttggccgattcattaatgcagctggcacgacaggtttcccgactggaaagcgggcagtgagcgcaacgcaattaatgtgagttagctcactcattaggcaccccaggctttacactttatgcttccggctcgtatgttgtgtggaattgtgagcggataacaatttcacacaggaaacagctatgaccatgattacgccaagctttgttgatacaaccataaaatgataattacacccataaattgataattatcacacccataaattgatattgcctcttcatggtctaaacttcagtaagtttacgacattttcatgaagaggtcatttccggggatccatggagaaaaaaatcactggatataccaccgttgatatatcccaatggcatcgtaaagaacattttgaggcatttcagtcagttgctcaatgtacctataaccagaccgttcagctggatattacggcctttttaaagaccgtaaagaaaaataagcacaagttttatccggcctttattcacattcttgcccgcctgatgaatgctcatccggagttccgtatggcaatgaaagacggtgagctggtgatatgggatagtgttcacccttgttacaccgttttccatgagcaaactgaaacgttttcatcgctctggagtgaataccacgacgatttccggcagtttctacacatatattcgcaagatgtggcgtgttacggtgaaaacctggcctatttccctaaagggtttattgagaatatgtttttcgtctcagccaatccctgggtgagtttcaccagttttgatttaaacgtggccaatatggacaacttcttcgcccccgttttcactatgggcaaatattatacgcaaggcgacaaggtgctgatgccgctggcgattcaggttcatcatgccgtttgtgatggcttccatgtcggcagaatgcttaatgaattacaacagtactgcgatgagtggcagggcggggcgtaatttttttaaggcagttattggtgcccttctagagtccttactgcagtagttttgctgaaatactcgattcacaaaaatatcaacttatggttgttttgtgagatatcaatatatggttgttttgtggttaagttgctgattataaataattattaaatatcactttatggttgctccaacaggtaccgagctcgaattcactggccgtcgttttacaacgtcgtgactgggaaaaccctggcgttacccaacttaatcgccttgcagcacatccccctttcgccagctggcgtaatagcgaagaggcccgcaccgatcgcccttcccaacagttgcgcagcctgaatggcgaatggcgcctgatgcggtattttctccttacgcatctgtgcggtatttcacaccgcatatggtgcactctcagtacaatctgctctgatgccgcatagttaagccagccccgacacccgccaacacccgctgacgcgccctgacgggcttgtctgctcccggcatccgcttacagacaagctgtgaccgtctccgggagctgcatgtgtcagaggttttcaccgtcatcaccgaaacgcgcgagacgaaagggcctcgtgatacgcctatttttataggttaatgtcatgataataatggtttcttagacgtcaggtggcacttttcggggaaatgtgcgcggaacccctatttgtttatttttctaaatacattcaaatatgtatccgctcatgagacaataaccctgataaatgcttcaataatattgaaaaaggaagagtatgagtattcaacatttccgtgtcgcccttattcccttttttgcggcattttgccttcctgtttttgctcacccagaaacgctggtgaaagtaaaagatgctgaagatcagttgggtgcacgagtgggttacatcgaactggatctcaacagcggtaagatccttgagagttttcgccccgaagaacgttttccaatgatgagcacttttaaagttctgctatgtggcgcggtattatcccgtattgac

SEQ ID NO: 123 - DNA, 3630 bp, Synthetic construct
  source 1..3630: mol_type = other DNA
gccgggcaagagcaactcggtcgccgcatacactattctcagaatgacttggttgagtactcaccagtcacagaaaagcatcttacggatggcatgacagtaagagaattatgcagtgctgccataaccatgagtgataacactgcggccaacttacttctgacaacgatcggaggaccgaaggagctaaccgcttttttgcacaacatgggggatcatgtaactcgccttgatcgttgggaaccggagctgaatgaagccataccaaacgacgagcgtgacaccacgatgcctgtagcaatggcaacaacgttgcgcaaactattaactggcgaactacttactctagcttcccggcaacaattaatagactggatggaggcggataaagttgcaggaccacttctgcgctcggcccttccggctggctggtttattgctgataaatctggagccggtgagcgtgggtctcgcggtatcattgcagcactggggccagatggtaagccctcccgtatcgtagttatctacacgacggggagtcaggcaactatggatgaacgaaatagacagatcgctgagataggtgcctcactgattaagcattggtaactgtcagaccaagtttactcatatatactttagattgatttaaaacttcatttttaatttaaaaggatctaggtgaagatcctttttgataatctcatgaccaaaatcccttaacgtgagttttcgttccactgagcgtcagaccccgtagaaaagatcaaaggatcttcttgagatcctttttttctgcgcgtaatctgctgcttgcaaacaaaaaaaccaccgctaccagcggtggtttgtttgccggatcaagagctaccaactctttttccgaaggtaactggcttcagcagagcgcagataccaaatactgttcttctagtgtagccgtagttaggccaccacttcaagaactctgtagcaccgcctacatacctcgctctgctaatcctgttaccagtggctgctgccagtggcgataagtcgtgtcttaccgggttggactcaagacgatagttaccggataaggcgcagcggtcgggctgaacggggggttcgtgcacacagcccagcttggagcgaacgacctacaccgaactgagatacctacagcgtgagctatgagaaagcgccacgcttcccgaagggagaaaggcggacaggtatccggtaagcggcagggtcggaacaggagagcgcacgagggagcttccagggggaaacgcctggtatctttatagtcctgtcgggtttcgccacctctgacttgagcgtcgatttttgtgatgctcgtcaggggggcggagcctatggaaaaacgccagcaacgcggcctttttacggttcctggccttttgctggccttttgctcacatgttctttcctgcgttatcccctgattctgtggataaccgtattaccgcctttgagtgagctgataccgctcgccgcagccgaacgaccgagcgcagcgagtcagtgagcgaggaagcggaagagcgcccaatacgcaaaccgcctctccccgcgcgttggccgattcattaatgcagctggcacgacaggtttcccgactggaaagcgggcagtgagcgcaacgcaattaatgtgagttagctcactcattaggcaccccaggctttacactttatgcttccggctcgtatgttgtgtggaattgtgagcggataacaatttcacacaggaaacagctatgaccatgattacgccaagctttgttggaacaaccataaaatgataattacacccataaattgataattatcacacccataaattgatattgcctcttcatggtctaaacttcagtaagtttacgacattttcatgaagaggtcatttccggggatccatggagaaaaaaatcactggatataccaccgttgatatatcccaatggcatcgtaaagaacattttgaggcatttcagtcagttgctcaatgtacctataaccagaccgttcagctggatattacggcctttttaaagaccgtaaagaaaaataagcacaagttttatccggcctttattcacattcttgcccgcctgatgaatgctcatccggagttccgtatggcaatgaaagacggtgagctggtgatatgggatagtgttcacccttgttacaccgttttccatgagcaaactgaaacgttttcatcgctctggagtgaataccacgacgatttccggcagtttctacacatatattcgcaagatgtggcgtgttacggtgaaaacctggcctatttccctaaagggtttattgagaatatgtttttcgtctcagccaatccctgggtgagtttcaccagttttgatttaaacgtggccaatatggacaacttcttcgcccccgttttcactatgggcaaatattatacgcaaggcgacaaggtgctgatgccgctggcgattcaggttcatcatgccgtttgtgatggcttccatgtcggcagaatgcttaatgaattacaacagtactgcgatgagtggcagggcggggcgtaatttttttaaggcagttattggtgcccttctagagtccttactgcagtagttttgctgaaatactcgattcacaaaaatatcaacttatggttgttttgtgagatatcaatatatggttgttttgtggttaagttgctgattataaataattattaaatatcactttatggttgctccaacaggtaccgagctcgaattcactggccgtcgttttacaacgtcgtgactgggaaaaccctggcgttacccaacttaatcgccttgcagcacatccccctttcgccagctggcgtaatagcgaagaggcccgcaccgatcgcccttcccaacagttgcgcagcctgaatggcgaatggcgcctgatgcggtattttctccttacgcatctgtgcggtatttcacaccgcatatggtgcactctcagtacaatctgctctgatgccgcatagttaagccagccccgacacccgccaacacccgctgacgcgccctgacgggcttgtctgctcccggcatccgcttacagacaagctgtgaccgtctccgggagctgcatgtgtcagaggttttcaccgtcatcaccgaaacgcgcgagacgaaagggcctcgtgatacgcctatttttataggttaatgtcatgataataatggtttcttagacgtcaggtggcacttttcggggaaatgtgcgcggaacccctatttgtttatttttctaaatacattcaaatatgtatccgctcatgagacaataaccctgataaatgcttcaataatattgaaaaaggaagagtatgagtattcaacatttccgtgtcgcccttattcccttttttgcggcattttgccttcctgtttttgctcacccagaaacgctggtgaaagtaaaagatgctgaagatcagttgggtgcacgagtgggttacatcgaactggatctcaacagcggtaagatccttgagagttttcgccccgaagaacgttttccaatgatgagcacttttaaagttctgctatgtggcgcggtattatcccgtattgac

SEQ ID NO: 124 - DNA, 8445 bp, Synthetic construct
  source 1..8445: mol_type = other DNA
attcaccaccctgaattgactctcttccgggcgctatcatgccataccgcgaaaggttttgcgccattcgatggtgtccgggatctcgacgctctcccttatgcgactcctgcattaggaaattaatacgactcactataggggaattgtgagcggataacaattcccctgtagaaataattttgtttaactttaataaggagatataccatgggtgaactgccgagtaggtagctgataacgcctggcttggcgatgctcgcctgatcgacaagtgaactgccgagtaggtagctgataacggatccgaattcgagctcggcgcgcctgcaggtcgacaagcttgcggccgcataatgcttaagtcgaacagaaagtaatcgtattgtacacggccgcataatcgaaattaatacgactcactataggggaattgtgagcggataacaattccccatcttagtatattagttaagtataagaaggagatatacatatgtttttgcaaagacctaaaccttacagcgatgaaagtttagaaagtttctttatccgagtggctaacaaaaatggctacggtgatgtccatcgcttcctagaagccactaaacgattccttcaagacattgaccataatggctatcaaacctttccgactgatataactcggataaacccatactcagctaaaaacagttccagcgcacgaactgcgtcattcctgaaacttgcacaattgacatttaatgaaccgccagagctacttgggttggcaattaacagaacaaacatgaaatactcgccgtcaactagcgcggttgttagaggtgcagaagtctttcctcgcagtttactacggacgcactccatcccctgctgtcctttgtgtctgcgagaaaatggctacgcctcctacctttggcactttcaggggtacgaatactgccacagccataacgtacctttaattaccacttgtagctgtggtaaggagtttgactaccgagtatctgggttaaagggcatttgctgcaaatgcaaggagcctatcaccttaaccagcagggagaacggtcatgaggcagcgtgtactgtttcaaactggcttgctggccatgaatctaaacctctgccaaatcttcctaaaagctaccgatggggtttagttcattggtggatgggtattaaagatagcgagttcgatcacttttcgttcgttcaatttttctcaaactggccaaggtcattccactcgataatcgaagatgaagtagagttcaaccttgagcatgctgttgtcagcacgtctgaattacgactaaaagatcttcttggtcgattgtttttcggttcaattcggttacctgagcggaatcttcaacacaatatcatccttggtgagcttctctgctatttagaaaatcgtttatggcaagacaagggattaatcgccaacctcaaaatgaacgcgttagaggcgactgtaatgttaaattgtagcctcgatcagattgcatcaatggttgaacaacgcatcttgaagccaaatcgaaaaagcaagcccaacagccctcttgatgttaccgattatctatttcatttcggcgatattttctgtctttggttagctgagttccaaagcgatgagtttaaccgttcgttttatgtgtcgaggtggtaaatgcaaactctgaaagaactaatcgcatccaatcctgacgacttaacaactgaacttaagagagcatttcgtccactcacaccgcatattgcaattgatggtaatgaacttgacgcactgacgatattagtcaatttaaccgataagactgatgatcagaaagacctgctcgatcgagccaaatgcaagcaaaaacttcgagatgaaaaatggtgggctagctgcataaattgcgttaattacagacaaagccataacccaaaattcccggatatacgttctgaaggcgtgattcgaacccaagccctgggtgaattaccgagtttcctactctcgtcctcaaaaatcccaccataccattggtcatatagccatgattcaaaatacgtcaacaaaagcgcattcctcaccaatgagttttgttgggatggtgagatctcatgtttgggtgagcttcttaaagatgcagatcacccactttggaatactttgaaaaagttaggttgttctcaaaaaacttgcaaagcaatggcaaaacaactagctgatattactctcacgactatcaatgtcacactcgcaccaaattacctgactcaaatatctctccccgatagtgatacatcctacatttcactctctcctgttgcatcgctatcgatgcaaagccactttcatcagaggctccaagatgaaaatcggcatagcgcgataacgcggtttagccgaactaccaacatgggggtcactgcgatgacatgtggcggcgcatttagaatgttaaagtctggcgctaagttttccagcccccctcatcaccgattaaacagtaaacgaagttggttgacgtcagagcatgttcagtcattaaaacagtaccagcgcctcaacaaaagcctcatacctgaaaactctcggattgcactccgtagaaaatacaaaatcgagcttcaaaatatggtcagatcttggtttgcaatgcaagaccatacccttgattcgaacatacttatccaacatttgaatcatgacctatcttacttaggagccacaaaacgttttgcatacgatccagcgatgaccaagctctttactgagcttttgaaacgagagttatcaaattcaatcaataatggtgagcaacacactaatggatcgtttttagtcctaccgaatatcagggtttgtggcgcaacagctttaagctccccggtaacggtggggattccatcacttacagctttctttggcttcgttcacgcatttgaacggaatataaatcgcaccacctcatcgtttcgtgttgaatcctttgcgatatgcgtccatcaactacatgtcgagaagcgaggtttgacagcagagtttgtggaaaaaggcgacgggactatatccgctcccgcgacccgggatgactggcagtgtgatgtcgtatttagccttattttgaacaccaactttgctcaacatattgaccaagatacgttagttacatcactaccaaagcgattggctcggggttcagcaaaaattgcgattgatgactttaaacatatcaactcattctcgacattagaaacagcgatcgaatctctgccaatagaagctggtaggtggttatcactttacgcacagtcaaacaataatctaagtgatctattagcagccatgacagaggaccatcagctcatggcaagctgcgtcggttaccacttgttagaagagcccaaagataaaccaaactccctcagaggttacaaacacgctatcgccgagtgcatcattggactcattaactcaatcacctttagctcagagactgatcccaacacaatcttttggtcgctaaagaactatcaaaactacctagtggtacagccaaggagtatcaacgatgaaactaccgacaaatctagcctatgagcgctctatcgacccatcagatgtctgtttttttgtcgtctggcccgatgatagaaaaacacctttaacctacaattctcgtactctgctcgggcaaatggaagcggcatcattagcctatgatgtctcaggtcaaccaataaaaagtgccaccgctgaggcgttagctcaagggaaccctcatcaagttgatttctgccacgttccatacggtgcgagtcatattgaatgcagtttctccgtctcgttttcttctgaactacgtcaaccatataagtgtaactcaagcaaagttaaacaaacgctagtgcaattagtcgagctctacgaaacgaaaatcggctggactgagctagcaacccgatatttgatgaacatttgcaacggtaaatggctgtggaaaaatacccgtaaagcctattgctggaacattgtacttacaccttggccttggaacggggaaaaggttggatttgaagatattcgtactaactacacctcacggcaagactttaaaaataataaaaattggtctgctatagttgaaatgatcaaaaccgcattttctagtactgatgggctggcgatatttgaagtcagggccaccttgcacttgccaacgaatgctatggtgcggccaagccaagttttcacagaaaaagaaagtggcagtaaaagtaaatctaaaactcaaaacagtcgagtttttcagagtacaactattgatggtgaacgatcgccaatactaggggcctttaaaacgggagcagctattgcaaccattgacgactggtatcctgaagccactgagccactaagggtcggacggtttggggttcatcgcgaagatgtcacttgctaccgtcatccgtctaccggaaaagattttttctcgatattacaacaagcagagcactatattgaagtgttgagcgccaacaaaactcccgctcaagaaactatcaacgacatgcactttttaatggctaacctgattaagggtgggatgttccagcataaaggagactgactgtgaaatggtattataagacaatcacctttctgccagagttgtgcaacaacgagtcactggctgcaaagtgtctccgcgttctgcatggatttaactatcagtatgagacacgaaatatcggcgtttcatttccgctttggtgtgatgcaacggttggaaaaaagatttcatttgtcagcaagaacaagatagaactcgacttactacttaaacaacactatttcgtccaaatggaacaacttcaatactttcatatatccaacactgttctcgtcccagaagattgtacatacgtttcctttagacgctgtcaatctatagataagctcacagcagcagggctggcaaggaaaatcagacgcctggagaaacgtgctctatctagaggcgagcaatttgacccatcatcttttgctcaaaaagagcatactgcaatagcgcactaccactcacttggggagtccagcaaacagacgaaccgcaactttcgactcaatatcaggatgctctcggagcaaccccgtgaggggaactcgatttttagtagctatggcttatcaaattcagaaaactcgtttcagcctgtacccttaatctgacctaggctgctgccaccgctgagcaataactagcataaccccttggggcctctaaacgggtcttgaggggttttttgctgaaacctcaggcatttgagaagcacacggtcacactgcttccggtagtcaataaaccggtaaaccagcaatagacataagcggctatttaacgaccctgccctgaaccgacgaccgggtcatcgtggccggatcttgcggcccctcggcttgaacgaattgttagacattatttgccgactaccttggtgatctcgcctttcacgtagtggacaaattcttccaactgatctgcgcgcgaggccaagcgatcttcttcttgtccaagataagcctgtctagcttcaagtatgacgggctgatactgggccggcaggcgctccattgcccagtcggcagcgacatccttcggcgcgattttgccggttactgcgctgtaccaaatgcgggacaacgtaagcactacatttcgctcatcgccagcccagtcgggcggcgagttccatagcgttaaggtttcatttagcgcctcaaatagatcctgttcaggaaccggatcaaagagttcctccgccgctggacctaccaaggcaacgctatgttctcttgcttttgtcagcaagatagccagatcaatgtcgatcgtggctggctcgaagatacctgcaagaatgtcattgcgctgccattctccaaattgcagttcgcgcttagctggataacgccacggaatgatgtcgtcgtgcacaacaatggtgacttctacagcgcggagaatctcgctctctccaggggaagccgaagtttccaaaaggtcgttgatcaaagctcgccgcgttgtttcatcaagccttacggtcaccgtaaccagcaaatcaatatcactgtgtggcttcaggccgccatccactgcggagccgtacaaatgtacggccagcaacgtcggttcgagatggcgctcgatgacgccaactacctctgatagttgagtcgatacttcggcgatcaccgcttccctcatactcttcctttttcaatattattgaagcatttatcagggttattgtctcatgagcggatacatatttgaatgtatttagaaaaataaacaaatagctagctcactcggtcgctacgctccgggcgtgagactgcggcgggcgctgcggacacatacaaagttacccacagattccgtggataagcaggggactaacatgtgaggcaaaacagcagggccgcgccggtggcgtttttccataggctccgccctcctgccagagttcacataaacagacgcttttccggtgcatctgtgggagccgtgaggctcaaccatgaatctgacagtacgggcgaaacccgacaggacttaaagatccccaccgtttccggcgggtcgctccctcttgcgctctcctgttccgaccctgccgtttaccggatacctgttccgcctttctcccttacgggaagtgtggcgctttctcatagctcacacactggtatctcggctcggtgtaggtcgttcgctccaagctgggctgtaagcaagaactccccgttcagcccgactgctgcgccttatccggtaactgttcacttgagtccaacccggaaaagcacggtaaaacgccactggcagcagccattggtaactgggagttcgcagaggatttgtttagctaaacacgcggttgctcttgaagtgtgcgccaaagtccggctacactggaaggacagatttggttgctgtgctctgcgaaagccagttaccacggttaagcagttccccaactgacttaaccttcgatcaaaccacctccccaggtggttttttcgtttacagggcaaaagattacgcgcagaaaaaaaggatctcaagaagatcctttgatcttttctactgaaccgctctagatttcagtgcaatttatctcttcaaatgtagcacctgaagtcagccccatacgatataagttgtaattctcatgttagtcatgccccgcgcccaccggaaggagctgactgggttgaaggctctcaagggcatcggtcgagatcccggtgcctaatgagtgagctaacttacattaattgcgttgcgctcactgcccgctttccagtcgggaaacctgtcgtgccagctgcattaatgaatcggccaacgcgcggggagaggcggtttgcgtattgggcgccagggtggtttttcttttcaccagtgagacgggcaacagctgattgcccttcaccgcctggccctgagagagttgcagcaagcggtccacgctggtttgccccagcaggcgaaaatcctgtttgatggtggttaacggcgggatataacatgagctgtcttcggtatcgtcgtatcccactaccgagatgtccgcaccaacgcgcagcccggactcggtaatggcgcgcattgcgcccagcgccatctgatcgttggcaaccagcatcgcagtgggaacgatgccctcattcagcatttgcatggtttgttgaaaaccggacatggcactccagtcgccttcccgttccgctatcggctgaatttgattgcgagtgagatatttatgccagccagccagacgcagacgcgccgagacagaacttaatgggcccgctaacagcgcgatttgctggtgacccaatgcgaccagatgctccacgcccagtcgcgtaccgtcttcatgggagaaaataatactgttgatgggtgtctggtcagagacatcaagaaataacgccggaacattagtgcaggcagcttccacagcaatggcatcctggtcatccagcggatagttaatgatcagcccactgacgcgttgcgcgagaagattgtgcaccgccgctttacaggcttcgacgccgcttcgttctaccatcgacaccaccacgctggcacccagttgatcggcgcgagatttaatcgccgcgacaatttgcgacggcgcgtgcagggccagactggaggtggcaacgccaatcagcaacgactgtttgcccgccagttgttgtgccacgcggttgggaatgtaattcagctccgccatcgccgcttccactttttcccgcgttttcgcagaaacgtggctggcctggttcaccacgcgggaaacggtctgataagagacaccggcatactctgcgacatcgtataacgttactggtttcac

SEQ ID NO: 125 - DNA, 8445 bp, Synthetic construct
  source 1..8445: mol_type = other DNA
attcaccaccctgaattgactctcttccgggcgctatcatgccataccgcgaaaggttttgcgccattcgatggtgtccgggatctcgacgctctcccttatgcgactcctgcattaggaaattaatacgactcactataggggaattgtgagcggataacaattcccctgtagaaataattttgtttaactttaataaggagatataccatgggtgaactgccgagtaggtagctgataacgtcagagtggcgtatccgatgaatcaccacaggtgaactgccgagtaggtagctgataacggatccgaattcgagctcggcgcgcctgcaggtcgacaagcttgcggccgcataatgcttaagtcgaacagaaagtaatcgtattgtacacggccgcataatcgaaattaatacgactcactataggggaattgtgagcggataacaattccccatcttagtatattagttaagtataagaaggagatatacatatgtttttgcaaagacctaaaccttacagcgatgaaagtttagaaagtttctttatccgagtggctaacaaaaatggctacggtgatgtccatcgcttcctagaagccactaaacgattccttcaagacattgaccataatggctatcaaacctttccgactgatataactcggataaacccatactcagctaaaaacagttccagcgcacgaactgcgtcattcctgaaacttgcacaattgacatttaatgaaccgccagagctacttgggttggcaattaacagaacaaacatgaaatactcgccgtcaactagcgcggttgttagaggtgcagaagtctttcctcgcagtttactacggacgcactccatcccctgctgtcctttgtgtctgcgagaaaatggctacgcctcctacctttggcactttcaggggtacgaatactgccacagccataacgtacctttaattaccacttgtagctgtggtaaggagtttgactaccgagtatctgggttaaagggcatttgctgcaaatgcaaggagcctatcaccttaaccagcagggagaacggtcatgaggcagcgtgtactgtttcaaactggcttgctggccatgaatctaaacctctgccaaatcttcctaaaagctaccgatggggtttagttcattggtggatgggtattaaagatagcgagttcgatcacttttcgttcgttcaatttttctcaaactggccaaggtcattccactcgataatcgaagatgaagtagagttcaaccttgagcatgctgttgtcagcacgtctgaattacgactaaaagatcttcttggtcgattgtttttcggttcaattcggttacctgagcggaatcttcaacacaatatcatccttggtgagcttctctgctatttagaaaatcgtttatggcaagacaagggattaatcgccaacctcaaaatgaacgcgttagaggcgactgtaatgttaaattgtagcctcgatcagattgcatcaatggttgaacaacgcatcttgaagccaaatcgaaaaagcaagcccaacagccctcttgatgttaccgattatctatttcatttcggcgatattttctgtctttggttagctgagttccaaagcgatgagtttaaccgttcgttttatgtgtcgaggtggtaaatgcaaactctgaaagaactaatcgcatccaatcctgacgacttaacaactgaacttaagagagcatttcgtccactcacaccgcatattgcaattgatggtaatgaacttgacgcactgacgatattagtcaatttaaccgataagactgatgatcagaaagacctgctcgatcgagccaaatgcaagcaaaaacttcgagatgaaaaatggtgggctagctgcataaattgcgttaattacagacaaagccataacccaaaattcccggatatacgttctgaaggcgtgattcgaacccaagccctgggtgaattaccgagtttcctactctcgtcctcaaaaatcccaccataccattggtcatatagccatgattcaaaatacgtcaacaaaagcgcattcctcaccaatgagttttgttgggatggtgagatctcatgtttgggtgagcttcttaaagatgcagatcacccactttggaatactttgaaaaagttaggttgttctcaaaaaacttgcaaagcaatggcaaaacaactagctgatattactctcacgactatcaatgtcacactcgcaccaaattacctgactcaaatatctctccccgatagtgatacatcctacatttcactctctcctgttgcatcgctatcgatgcaaagccactttcatcagaggctccaagatgaaaatcggcatagcgcgataacgcggtttagccgaactaccaacatgggggtcactgcgatgacatgtggcggcgcatttagaatgttaaagtctggcgctaagttttccagcccccctcatcaccgattaaacagtaaacgaagttggttgacgtcagagcatgttcagtcattaaaacagtaccagcgcctcaacaaaagcctcatacctgaaaactctcggattgcactccgtagaaaatacaaaatcgagcttcaaaatatggtcagatcttggtttgcaatgcaagaccatacccttgattcgaacatacttatccaacatttgaatcatgacctatcttacttaggagccacaaaacgttttgcatacgatccagcgatgaccaagctctttactgagcttttgaaacgagagttatcaaattcaatcaataatggtgagcaacacactaatggatcgtttttagtcctaccgaatatcagggtttgtggcgcaacagctttaagctccccggtaacggtggggattccatcacttacagctttctttggcttcgttcacgcatttgaacggaatataaatcgcaccacctcatcgtttcgtgttgaatcctttgcgatatgcgtccatcaactacatgtcgagaagcgaggtttgacagcagagtttgtggaaaaaggcgacgggactatatccgctcccgcgacccgggatgactggcagtgtgatgtcgtatttagccttattttgaacaccaactttgctcaacatattgaccaagatacgttagttacatcactaccaaagcgattggctcggggttcagcaaaaattgcgattgatgactttaaacatatcaactcattctcgacattagaaacagcgatcgaatctctgccaatagaagctggtaggtggttatcactttacgcacagtcaaacaataatctaagtgatctattagcagccatgacagaggaccatcagctcatggcaagctgcgtcggttaccacttgttagaagagcccaaagataaaccaaactccctcagaggttacaaacacgctatcgccgagtgcatcattggactcattaactcaatcacctttagctcagagactgatcccaacacaatcttttggtcgctaaagaactatcaaaactacctagtggtacagccaaggagtatcaacgatgaaactaccgacaaatctagcctatgagcgctctatcgacccatcagatgtctgtttttttgtcgtctggcccgatgatagaaaaacacctttaacctacaattctcgtactctgctcgggcaaatggaagcggcatcattagcctatgatgtctcaggtcaaccaataaaaagtgccaccgctgaggcgttagctcaagggaaccctcatcaagttgatttctgccacgttccatacggtgcgagtcatattgaatgcagtttctccgtctcgttttcttctgaactacgtcaaccatataagtgtaactcaagcaaagttaaacaaacgctagtgcaattagtcgagctctacgaaacgaaaatcggctggactgagctagcaacccgatatttgatgaacatttgcaacggtaaatggctgtggaaaaatacccgtaaagcctattgctggaacattgtacttacaccttggccttggaacggggaaaaggttggatttgaagatattcgtactaactacacctcacggcaagactttaaaaataataaaaattggtctgctatagttgaaatgatcaaaaccgcattttctagtactgatgggctggcgatatttgaagtcagggccaccttgcacttgccaacgaatgctatggtgcggccaagccaagttttcacagaaaaagaaagtggcagtaaaagtaaatctaaaactcaaaacagtcgagtttttcagagtacaactattgatggtgaacgatcgccaatactaggggcctttaaaacgggagcagctattgcaaccattgacgactggtatcctgaagccactgagccactaagggtcggacggtttggggttcatcgcgaagatgtcacttgctaccgtcatccgtctaccggaaaagattttttctcgatattacaacaagcagagcactatattgaagtgttgagcgccaacaaaactcccgctcaagaaactatcaacgacatgcactttttaatggctaacctgattaagggtgggatgttccagcataaaggagactgactgtgaaatggtattataagacaatcacctttctgccagagttgtgcaacaacgagtcactggctgcaaagtgtctccgcgttctgcatggatttaactatcagtatgagacacgaaatatcggcgtttcatttccgctttggtgtgatgcaacggttggaaaaaagatttcatttgtcagcaagaacaagatagaactcgacttactacttaaacaacactatttcgtccaaatggaacaacttcaatactttcatatatccaacactgttctcgtcccagaagattgtacatacgtttcctttagacgctgtcaatctatagataagctcacagcagcagggctggcaaggaaaatcagacgcctggagaaacgtgctctatctagaggcgagcaatttgacccatcatcttttgctcaaaaagagcatactgcaatagcgcactaccactcacttggggagtccagcaaacagacgaaccgcaactttcgactcaatatcaggatgctctcggagcaaccccgtgaggggaactcgatttttagtagctatggcttatcaaattcagaaaactcgtttcagcctgtacccttaatctgacctaggctgctgccaccgctgagcaataactagcataaccccttggggcctctaaacgggtcttgaggggttttttgctgaaacctcaggcatttgagaagcacacggtcacactgcttccggtagtcaataaaccggtaaaccagcaatagacataagcggctatttaacgaccctgccctgaaccgacgaccgggtcatcgtggccggatcttgcggcccctcggcttgaacgaattgttagacattatttgccgactaccttggtgatctcgcctttcacgtagtggacaaattcttccaactgatctgcgcgcgaggccaagcgatcttcttcttgtccaagataagcctgtctagcttcaagtatgacgggctgatactgggccggcaggcgctccattgcccagtcggcagcgacatccttcggcgcgattttgccggttactgcgctgtaccaaatgcgggacaacgtaagcactacatttcgctcatcgccagcccagtcgggcggcgagttccatagcgttaaggtttcatttagcgcctcaaatagatcctgttcaggaaccggatcaaagagttcctccgccgctggacctaccaaggcaacgctatgttctcttgcttttgtcagcaagatagccagatcaatgtcgatcgtggctggctcgaagatacctgcaagaatgtcattgcgctgccattctccaaattgcagttcgcgcttagctggataacgccacggaatgatgtcgtcgtgcacaacaatggtgacttctacagcgcggagaatctcgctctctccaggggaagccgaagtttccaaaaggtcgttgatcaaagctcgccgcgttgtttcatcaagccttacggtcaccgtaaccagcaaatcaatatcactgtgtggcttcaggccgccatccactgcggagccgtacaaatgtacggccagcaacgtcggttcgagatggcgctcgatgacgccaactacctctgatagttgagtcgatacttcggcgatcaccgcttccctcatactcttcctttttcaatattattgaagcatttatcagggttattgtctcatgagcggatacatatttgaatgtatttagaaaaataaacaaatagctagctcactcggtcgctacgctccgggcgtgagactgcggcgggcgctgcggacacatacaaagttacccacagattccgtggataagcaggggactaacatgtgaggcaaaacagcagggccgcgccggtggcgtttttccataggctccgccctcctgccagagttcacataaacagacgcttttccggtgcatctgtgggagccgtgaggctcaaccatgaatctgacagtacgggcgaaacccgacaggacttaaagatccccaccgtttccggcgggtcgctccctcttgcgctctcctgttccgaccctgccgtttaccggatacctgttccgcctttctcccttacgggaagtgtggcgctttctcatagctcacacactggtatctcggctcggtgtaggtcgttcgctccaagctgggctgtaagcaagaactccccgttcagcccgactgctgcgccttatccggtaactgttcacttgagtccaacccggaaaagcacggtaaaacgccactggcagcagccattggtaactgggagttcgcagaggatttgtttagctaaacacgcggttgctcttgaagtgtgcgccaaagtccggctacactggaaggacagatttggttgctgtgctctgcgaaagccagttaccacggttaagcagttccccaactgacttaaccttcgatcaaaccacctccccaggtggttttttcgtttacagggcaaaagattacgcgcagaaaaaaaggatctcaagaagatcctttgatcttttctactgaaccgctctagatttcagtgcaatttatctcttcaaatgtagcacctgaagtcagccccatacgatataagttgtaattctcatgttagtcatgccccgcgcccaccggaaggagctgactgggttgaaggctctcaagggcatcggtcgagatcccggtgcctaatgagtgagctaacttacattaattgcgttgcgctcactgcccgctttccagtcgggaaacctgtcgtgccagctgcattaatgaatcggccaacgcgcggggagaggcggtttgcgtattgggcgccagggtggtttttcttttcaccagtgagacgggcaacagctgattgcccttcaccgcctggccctgagagagttgcagcaagcggtccacgctggtttgccccagcaggcgaaaatcctgtttgatggtggttaacggcgggatataacatgagctgtcttcggtatcgtcgtatcccactaccgagatgtccgcaccaacgcgcagcccggactcggtaatggcgcgcattgcgcccagcgccatctgatcgttggcaaccagcatcgcagtgggaacgatgccctcattcagcatttgcatggtttgttgaaaaccggacatggcactccagtcgccttcccgttccgctatcggctgaatttgattgcgagtgagatatttatgccagccagccagacgcagacgcgccgagacagaacttaatgggcccgctaacagcgcgatttgctggtgacccaatgcgaccagatgctccacgcccagtcgcgtaccgtcttcatgggagaaaataatactgttgatgggtgtctggtcagagacatcaagaaataacgccggaacattagtgcaggcagcttccacagcaatggcatcctggtcatccagcggatagttaatgatcagcccactgacgcgttgcgcgagaagattgtgcaccgccgctttacaggcttcgacgccgcttcgttctaccatcgacaccaccacgctggcacccagttgatcggcgcgagatttaatcgccgcgacaatttgcgacggcgcgtgcagggccagactggaggtggcaacgccaatcagcaacgactgtttgcccgccagttgttgtgccacgcggttgggaatgtaattcagctccgccatcgccgcttccactttttcccgcgttttcgcagaaacgtggctggcctggttcaccacgcgggaaacggtctgataagagacaccggcatactctgcgacatcgtataacgttactggtttcac

SEQ ID NO: 126 - DNA, 8445 bp, Synthetic construct
  source 1..8445: mol_type = other DNA
attcaccaccctgaattgactctcttccgggcgctatcatgccataccgcgaaaggttttgcgccattcgatggtgtccgggatctcgacgctctcccttatgcgactcctgcattaggaaattaatacgactcactataggggaattgtgagcggataacaattcccctgtagaaataattttgtttaactttaataaggagatataccatgggtgaactgccgagtaggtagctgataactcgatccgtgggtgtttatgttctcagcaggagtgaactgccgagtaggtagctgataacggatccgaattcgagctcggcgcgcctgcaggtcgacaagcttgcggccgcataatgcttaagtcgaacagaaagtaatcgtattgtacacggccgcataatcgaaattaatacgactcactataggggaattgtgagcggataacaattccccatcttagtatattagttaagtataagaaggagatatacatatgtttttgcaaagacctaaaccttacagcgatgaaagtttagaaagtttctttatccgagtggctaacaaaaatggctacggtgatgtccatcgcttcctagaagccactaaacgattccttcaagacattgaccataatggctatcaaacctttccgactgatataactcggataaacccatactcagctaaaaacagttccagcgcacgaactgcgtcattcctgaaacttgcacaattgacatttaatgaaccgccagagctacttgggttggcaattaacagaacaaacatgaaatactcgccgtcaactagcgcggttgttagaggtgcagaagtctttcctcgcagtttactacggacgcactccatcccctgctgtcctttgtgtctgcgagaaaatggctacgcctcctacctttggcactttcaggggtacgaatactgccacagccataacgtacctttaattaccacttgtagctgtggtaaggagtttgactaccgagtatctgggttaaagggcatttgctgcaaatgcaaggagcctatcaccttaaccagcagggagaacggtcatgaggcagcgtgtactgtttcaaactggcttgctggccatgaatctaaacctctgccaaatcttcctaaaagctaccgatggggtttagttcattggtggatgggtattaaagatagcgagttcgatcacttttcgttcgttcaatttttctcaaactggccaaggtcattccactcgataatcgaagatgaagtagagttcaaccttgagcatgctgttgtcagcacgtctgaattacgactaaaagatcttcttggtcgattgtttttcggttcaattcggttacctgagcggaatcttcaacacaatatcatccttggtgagcttctctgctatttagaaaatcgtttatggcaagacaagggattaatcgccaacctcaaaatgaacgcgttagaggcgactgtaatgttaaattgtagcctcgatcagattgcatcaatggttgaacaacgcatcttgaagccaaatcgaaaaagcaagcccaacagccctcttgatgttaccgattatctatttcatttcggcgatattttctgtctttggttagctgagttccaaagcgatgagtttaaccgttcgttttatgtgtcgaggtggtaaatgcaaactctgaaagaactaatcgcatccaatcctgacgacttaacaactgaacttaagagagcatttcgtccactcacaccgcatattgcaattgatggtaatgaacttgacgcactgacgatattagtcaatttaaccgataagactgatgatcagaaagacctgctcgatcgagccaaatgcaagcaaaaacttcgagatgaaaaatggtgggctagctgcataaattgcgttaattacagacaaagccataacccaaaattcccggatatacgttctgaaggcgtgattcgaacccaagccctgggtgaattaccgagtttcctactctcgtcctcaaaaatcccaccataccattggtcatatagccatgattcaaaatacgtcaacaaaagcgcattcctcaccaatgagttttgttgggatggtgagatctcatgtttgggtgagcttcttaaagatgcagatcacccactttggaatactttgaaaaagttaggttgttctcaaaaaacttgcaaagcaatggcaaaacaactagctgatattactctcacgactatcaatgtcacactcgcaccaaattacctgactcaaatatctctccccgatagtgatacatcctacatttcactctctcctgttgcatcgctatcgatgcaaagccactttcatcagaggctccaagatgaaaatcggcatagcgcgataacgcggtttagccgaactaccaacatgggggtcactgcgatgacatgtggcggcgcatttagaatgttaaagtctggcgctaagttttccagcccccctcatcaccgattaaacagtaaacgaagttggttgacgtcagagcatgttcagtcattaaaacagtaccagcgcctcaacaaaagcctcatacctgaaaactctcggattgcactccgtagaaaatacaaaatcgagcttcaaaatatggtcagatcttggtttgcaatgcaagaccatacccttgattcgaacatacttatccaacatttgaatcatgacctatcttacttaggagccacaaaacgttttgcatacgatccagcgatgaccaagctctttactgagcttttgaaacgagagttatcaaattcaatcaataatggtgagcaacacactaatggatcgtttttagtcctaccgaatatcagggtttgtggcgcaacagctttaagctccccggtaacggtggggattccatcacttacagctttctttggcttcgttcacgcatttgaacggaatataaatcgcaccacctcatcgtttcgtgttgaatcctttgcgatatgcgtccatcaactacatgtcgagaagcgaggtttgacagcagagtttgtggaaaaaggcgacgggactatatccgctcccgcgacccgggatgactggcagtgtgatgtcgtatttagccttattttgaacaccaactttgctcaacatattgaccaagatacgttagttacatcactaccaaagcgattggctcggggttcagcaaaaattgcgattgatgactttaaacatatcaactcattctcgacattagaaacagcgatcgaatctctgccaatagaagctggtaggtggttatcactttacgcacagtcaaacaataatctaagtgatctattagcagccatgacagaggaccatcagctcatggcaagctgcgtcggttaccacttgttagaagagcccaaagataaaccaaactccctcagaggttacaaacacgctatcgccgagtgcatcattggactcattaactcaatcacctttagctcagagactgatcccaacacaatcttttggtcgctaaagaactatcaaaactacctagtggtacagccaaggagtatcaacgatgaaactaccgacaaatctagcctatgagcgctctatcgacccatcagatgtctgtttttttgtcgtctggcccgatgatagaaaaacacctttaacctacaattctcgtactctgctcgggcaaatggaagcggcatcattagcctatgatgtctcaggtcaaccaataaaaagtgccaccgctgaggcgttagctcaagggaaccctcatcaagttgatttctgccacgttccatacggtgcgagtcatattgaatgcagtttctccgtctcgttttcttctgaactacgtcaaccatataagtgtaactcaagcaaagttaaacaaacgctagtgcaattagtcgagctctacgaaacgaaaatcggctggactgagctagcaacccgatatttgatgaacatttgcaacggtaaatggctgtggaaaaatacccgtaaagcctattgctggaacattgtacttacaccttggccttggaacggggaaaaggttggatttgaagatattcgtactaactacacctcacggcaagactttaaaaataataaaaattggtctgctatagttgaaatgatcaaaaccgcattttctagtactgatgggctggcgatatttgaagtcagggccaccttgcacttgccaacgaatgctatggtgcggccaagccaagttttcacagaaaaagaaagtggcagtaaaagtaaatctaaaactcaaaacagtcgagtttttcagagtacaactattgatggtgaacgatcgccaatactaggggcctttaaaacgggagcagctattgcaaccattgacgactggtatcctgaagccactgagccactaagggtcggacggtttggggttcatcgcgaagatgtcacttgctaccgtcatccgtctaccggaaaagattttttctcgatattacaacaagcagagcactatattgaagtgttgagcgccaacaaaactcccgctcaagaaactatcaacgacatgcactttttaatggctaacctgattaagggtgggatgttccagcataaaggagactgactgtgaaatggtattataagacaatcacctttctgccagagttgtgcaacaacgagtcactggctgcaaagtgtctccgcgttctgcatggatttaactatcagtatgagacacgaaatatcggcgtttcatttccgctttggtgtgatgcaacggttggaaaaaagatttcatttgtcagcaagaacaagatagaactcgacttactacttaaacaacactatttcgtccaaatggaacaacttcaatactttcatatatccaacactgttctcgtcccagaagattgtacatacgtttcctttagacgctgtcaatctatagataagctcacagcagcagggctggcaaggaaaatcagacgcctggagaaacgtgctctatctagaggcgagcaatttgacccatcatcttttgctcaaaaagagcatactgcaatagcgcactaccactcacttggggagtccagcaaacagacgaaccgcaactttcgactcaatatcaggatgctctcggagcaaccccgtgaggggaactcgatttttagtagctatggcttatcaaattcagaaaactcgtttcagcctgtacccttaatctgacctaggctgctgccaccgctgagcaataactagcataaccccttggggcctctaaacgggtcttgaggggttttttgctgaaacctcaggcatttgagaagcacacggtcacactgcttccggtagtcaataaaccggtaaaccagcaatagacataagcggctatttaacgaccctgccctgaaccgacgaccgggtcatcgtggccggatcttgcggcccctcggcttgaacgaattgttagacattatttgccgactaccttggtgatctcgcctttcacgtagtggacaaattcttccaactgatctgcgcgcgaggccaagcgatcttcttcttgtccaagataagcctgtctagcttcaagtatgacgggctgatactgggccggcaggcgctccattgcccagtcggcagcgacatccttcggcgcgattttgccggttactgcgctgtaccaaatgcgggacaacgtaagcactacatttcgctcatcgccagcccagtcgggcggcgagttccatagcgttaaggtttcatttagcgcctcaaatagatcctgttcaggaaccggatcaaagagttcctccgccgctggacctaccaaggcaacgctatgttctcttgcttttgtcagcaagatagccagatcaatgtcgatcgtggctggctcgaagatacctgcaagaatgtcattgcgctgccattctccaaattgcagttcgcgcttagctggataacgccacggaatgatgtcgtcgtgcacaacaatggtgacttctacagcgcggagaatctcgctctctccaggggaagccgaagtttccaaaaggtcgttgatcaaagctcgccgcgttgtttcatcaagccttacggtcaccgtaaccagcaaatcaatatcactgtgtggcttcaggccgccatccactgcggagccgtacaaatgtacggccagcaacgtcggttcgagatggcgctcgatgacgccaactacctctgatagttgagtcgatacttcggcgatcaccgcttccctcatactcttcctttttcaatattattgaagcatttatcagggttattgtctcatgagcggatacatatttgaatgtatttagaaaaataaacaaatagctagctcactcggtcgctacgctccgggcgtgagactgcggcgggcgctgcggacacatacaaagttacccacagattccgtggataagcaggggactaacatgtgaggcaaaacagcagggccgcgccggtggcgtttttccataggctccgccctcctgccagagttcacataaacagacgcttttccggtgcatctgtgggagccgtgaggctcaaccatgaatctgacagtacgggcgaaacccgacaggacttaaagatccccaccgtttccggcgggtcgctccctcttgcgctctcctgttccgaccctgccgtttaccggatacctgttccgcctttctcccttacgggaagtgtggcgctttctcatagctcacacactggtatctcggctcggtgtaggtcgttcgctccaagctgggctgtaagcaagaactccccgttcagcccgactgctgcgccttatccggtaactgttcacttgagtccaacccggaaaagcacggtaaaacgccactggcagcagccattggtaactgggagttcgcagaggatttgtttagctaaacacgcggttgctcttgaagtgtgcgccaaagtccggctacactggaaggacagatttggttgctgtgctctgcgaaagccagttaccacggttaagcagttccccaactgacttaaccttcgatcaaaccacctccccaggtggttttttcgtttacagggcaaaagattacgcgcagaaaaaaaggatctcaagaagatcctttgatcttttctactgaaccgctctagatttcagtgcaatttatctcttcaaatgtagcacctgaagtcagccccatacgatataagttgtaattctcatgttagtcatgccccgcgcccaccggaaggagctgactgggttgaaggctctcaagggcatcggtcgagatcccggtgcctaatgagtgagctaacttacattaattgcgttgcgctcactgcccgctttccagtcgggaaacctgtcgtgccagctgcattaatgaatcggccaacgcgcggggagaggcggtttgcgtattgggcgccagggtggtttttcttttcaccagtgagacgggcaacagctgattgcccttcaccgcctggccctgagagagttgcagcaagcggtccacgctggtttgccccagcaggcgaaaatcctgtttgatggtggttaacggcgggatataacatgagctgtcttcggtatcgtcgtatcccactaccgagatgtccgcaccaacgcgcagcccggactcggtaatggcgcgcattgcgcccagcgccatctgatcgttggcaaccagcatcgcagtgggaacgatgccctcattcagcatttgcatggtttgttgaaaaccggacatggcactccagtcgccttcccgttccgctatcggctgaatttgattgcgagtgagatatttatgccagccagccagacgcagacgcgccgagacagaacttaatgggcccgctaacagcgcgatttgctggtgacccaatgcgaccagatgctccacgcccagtcgcgtaccgtcttcatgggagaaaataatactgttgatgggtgtctggtcagagacatcaagaaataacgccggaacattagtgcaggcagcttccacagcaatggcatcctggtcatccagcggatagttaatgatcagcccactgacgcgttgcgcgagaagattgtgcaccgccgctttacaggcttcgacgccgcttcgttctaccatcgacaccaccacgctggcacccagttgatcggcgcgagatttaatcgccgcgacaatttgcgacggcgcgtgcagggccagactggaggtggcaacgccaatcagcaacgactgtttgcccgccagttgttgtgccacgcggttgggaatgtaattcagctccgccatcgccgcttccactttttcccgcgttttcgcagaaacgtggctggcctggttcaccacgcgggaaacggtctgataagagacaccggcatactctgcgacatcgtataacgttactggtttcac

SEQ ID NO: 127 - DNA, 8445 bp, Synthetic construct
  source 1..8445: mol_type = other DNA
attcaccaccctgaattgactctcttccgggcgctatcatgccataccgcgaaaggttttgcgccattcgatggtgtccgggatctcgacgctctcccttatgcgactcctgcattaggaaattaatacgactcactataggggaattgtgagcggataacaattcccctgtagaaataattttgtttaactttaataaggagatataccatgggtgaactgccgagtaggtagctgataacgcattactaagctggcgcgtgaagctgtagaagtgaactgccgagtaggtagctgataacggatccgaattcgagctcggcgcgcctgcaggtcgacaagcttgcggccgcataatgcttaagtcgaacagaaagtaatcgtattgtacacggccgcataatcgaaattaatacgactcactataggggaattgtgagcggataacaattccccatcttagtatattagttaagtataagaaggagatatacatatgtttttgcaaagacctaaaccttacagcgatgaaagtttagaaagtttctttatccgagtggctaacaaaaatggctacggtgatgtccatcgcttcctagaagccactaaacgattccttcaagacattgaccataatggctatcaaacctttccgactgatataactcggataaacccatactcagctaaaaacagttccagcgcacgaactgcgtcattcctgaaacttgcacaattgacatttaatgaaccgccagagctacttgggttggcaattaacagaacaaacatgaaatactcgccgtcaactagcgcggttgttagaggtgcagaagtctttcctcgcagtttactacggacgcactccatcccctgctgtcctttgtgtctgcgagaaaatggctacgcctcctacctttggcactttcaggggtacgaatactgccacagccataacgtacctttaattaccacttgtagctgtggtaaggagtttgactaccgagtatctgggttaaagggcatttgctgcaaatgcaaggagcctatcaccttaaccagcagggagaacggtcatgaggcagcgtgtactgtttcaaactggcttgctggccatgaatctaaacctctgccaaatcttcctaaaagctaccgatggggtttagttcattggtggatgggtattaaagatagcgagttcgatcacttttcgttcgttcaatttttctcaaactggccaaggtcattccactcgataatcgaagatgaagtagagttcaaccttgagcatgctgttgtcagcacgtctgaattacgactaaaagatcttcttggtcgattgtttttcggttcaattcggttacctgagcggaatcttcaacacaatatcatccttggtgagcttctctgctatttagaaaatcgtttatggcaagacaagggattaatcgccaacctcaaaatgaacgcgttagaggcgactgtaatgttaaattgtagcctcgatcagattgcatcaatggttgaacaacgcatcttgaagccaaatcgaaaaagcaagcccaacagccctcttgatgttaccgattatctatttcatttcggcgatattttctgtctttggttagctgagttccaaagcgatgagtttaaccgttcgttttatgtgtcgaggtggtaaatgcaaactctgaaagaactaatcgcatccaatcctgacgacttaacaactgaacttaagagagcatttcgtccactcacaccgcatattgcaattgatggtaatgaacttgacgcactgacgatattagtcaatttaaccgataagactgatgatcagaaagacctgctcgatcgagccaaatgcaagcaaaaacttcgagatgaaaaatggtgggctagctgcataaattgcgttaattacagacaaagccataacccaaaattcccggatatacgttctgaaggcgtgattcgaacccaagccctgggtgaattaccgagtttcctactctcgtcctcaaaaatcccaccataccattggtcatatagccatgattcaaaatacgtcaacaaaagcgcattcctcaccaatgagttttgttgggatggtgagatctcatgtttgggtgagcttcttaaagatgcagatcacccactttggaatactttgaaaaagttaggttgttctcaaaaaacttgcaaagcaatggcaaaacaactagctgatattactctcacgactatcaatgtcacactcgcaccaaattacctgactcaaatatctctccccgatagtgatacatcctacatttcactctctcctgttgcatcgctatcgatgcaaagccactttcatcagaggctccaagatgaaaatcggcatagcgcgataacgcggtttagccgaactaccaacatgggggtcactgcgatgacatgtggcggcgcatttagaatgttaaagtctggcgctaagttttccagcccccctcatcaccgattaaacagtaaacgaagttggttgacgtcagagcatgttcagtcattaaaacagtaccagcgcctcaacaaaagcctcatacctgaaaactctcggattgcactccgtagaaaatacaaaatcgagcttcaaaatatggtcagatcttggtttgcaatgcaagaccatacccttgattcgaacatacttatccaacatttgaatcatgacctatcttacttaggagccacaaaacgttttgcatacgatccagcgatgaccaagctctttactgagcttttgaaacgagagttatcaaattcaatcaataatggtgagcaacacactaatggatcgtttttagtcctaccgaatatcagggtttgtggcgcaacagctttaagctccccggtaacggtggggattccatcacttacagctttctttggcttcgttcacgcatttgaacggaatataaatcgcaccacctcatcgtttcgtgttgaatcctttgcgatatgcgtccatcaactacatgtcgagaagcgaggtttgacagcagagtttgtggaaaaaggcgacgggactatatccgctcccgcgacccgggatgactggcagtgtgatgtcgtatttagccttattttgaacaccaactttgctcaacatattgaccaagatacgttagttacatcactaccaaagcgattggctcggggttcagcaaaaattgcgattgatgactttaaacatatcaactcattctcgacattagaaacagcgatcgaatctctgccaatagaagctggtaggtggttatcactttacgcacagtcaaacaataatctaagtgatctattagcagccatgacagaggaccatcagctcatggcaagctgcgtcggttaccacttgttagaagagcccaaagataaaccaaactccctcagaggttacaaacacgctatcgccgagtgcatcattggactcattaactcaatcacctttagctcagagactgatcccaacacaatcttttggtcgctaaagaactatcaaaactacctagtggtacagccaaggagtatcaacgatgaaactaccgacaaatctagcctatgagcgctctatcgacccatcagatgtctgtttttttgtcgtctggcccgatgatagaaaaacacctttaacctacaattctcgtactctgctcgggcaaatggaagcggcatcattagcctatgatgtctcaggtcaaccaataaaaagtgccaccgctgaggcgttagctcaagggaaccctcatcaagttgatttctgccacgttccatacggtgcgagtcatattgaatgcagtttctccgtctcgttttcttctgaactacgtcaaccatataagtgtaactcaagcaaagttaaacaaacgctagtgcaattagtcgagctctacgaaacgaaaatcggctggactgagctagcaacccgatatttgatgaacatttgcaacggtaaatggctgtggaaaaatacccgtaaagcctattgctggaacattgtacttacaccttggccttggaacggggaaaaggttggatttgaagatattcgtactaactacacctcacggcaagactttaaaaataataaaaattggtctgctatagttgaaatgatcaaaaccgcattttctagtactgatgggctggcgatatttgaagtcagggccaccttgcacttgccaacgaatgctatggtgcggccaagccaagttttcacagaaaaagaaagtggcagtaaaagtaaatctaaaactcaaaacagtcgagtttttcagagtacaactattgatggtgaacgatcgccaatactaggggcctttaaaacgggagcagctattgcaaccattgacgactggtatcctgaagccactgagccactaagggtcggacggtttggggttcatcgcgaagatgtcacttgctaccgtcatccgtctaccggaaaagattttttctcgatattacaacaagcagagcactatattgaagtgttgagcgccaacaaaactcccgctcaagaaactatcaacgacatgcactttttaatggctaacctgattaagggtgggatgttccagcataaaggagactgactgtgaaatggtattataagacaatcacctttctgccagagttgtgcaacaacgagtcactggctgcaaagtgtctccgcgttctgcatggatttaactatcagtatgagacacgaaatatcggcgtttcatttccgctttggtgtgatgcaacggttggaaaaaagatttcatttgtcagcaagaacaagatagaactcgacttactacttaaacaacactatttcgtccaaatggaacaacttcaatactttcatatatccaacactgttctcgtcccagaagattgtacatacgtttcctttagacgctgtcaatctatagataagctcacagcagcagggctggcaaggaaaatcagacgcctggagaaacgtgctctatctagaggcgagcaatttgacccatcatcttttgctcaaaaagagcatactgcaatagcgcactaccactcacttggggagtccagcaaacagacgaaccgcaactttcgactcaatatcaggatgctctcggagcaaccccgtgaggggaactcgatttttagtagctatggcttatcaaattcagaaaactcgtttcagcctgtacccttaatctgacctaggctgctgccaccgctgagcaataactagcataaccccttggggcctctaaacgggtcttgaggggttttttgctgaaacctcaggcatttgagaagcacacggtcacactgcttccggtagtcaataaaccggtaaaccagcaatagacataagcggctatttaacgaccctgccctgaaccgacgaccgggtcatcgtggccggatcttgcggcccctcggcttgaacgaattgttagacattatttgccgactaccttggtgatctcgcctttcacgtagtggacaaattcttccaactgatctgcgcgcgaggccaagcgatcttcttcttgtccaagataagcctgtctagcttcaagtatgacgggctgatactgggccggcaggcgctccattgcccagtcggcagcgacatccttcggcgcgattttgccggttactgcgctgtaccaaatgcgggacaacgtaagcactacatttcgctcatcgccagcccagtcgggcggcgagttccatagcgttaaggtttcatttagcgcctcaaatagatcctgttcaggaaccggatcaaagagttcctccgccgctggacctaccaaggcaacgctatgttctcttgcttttgtcagcaagatagccagatcaatgtcgatcgtggctggctcgaagatacctgcaagaatgtcattgcgctgccattctccaaattgcagttcgcgcttagctggataacgccacggaatgatgtcgtcgtgcacaacaatggtgacttctacagcgcggagaatctcgctctctccaggggaagccgaagtttccaaaaggtcgttgatcaaagctcgccgcgttgtttcatcaagccttacggtcaccgtaaccagcaaatcaatatcactgtgtggcttcaggccgccatccactgcggagccgtacaaatgtacggccagcaacgtcggttcgagatggcgctcgatgacgccaactacctctgatagttgagtcgatacttcggcgatcaccgcttccctcatactcttcctttttcaatattattgaagcatttatcagggttattgtctcatgagcggatacatatttgaatgtatttagaaaaataaacaaatagctagctcactcggtcgctacgctccgggcgtgagactgcggcgggcgctgcggacacatacaaagttacccacagattccgtggataagcaggggactaacatgtgaggcaaaacagcagggccgcgccggtggcgtttttccataggctccgccctcctgccagagttcacataaacagacgcttttccggtgcatctgtgggagccgtgaggctcaaccatgaatctgacagtacgggcgaaacccgacaggacttaaagatccccaccgtttccggcgggtcgctccctcttgcgctctcctgttccgaccctgccgtttaccggatacctgttccgcctttctcccttacgggaagtgtggcgctttctcatagctcacacactggtatctcggctcggtgtaggtcgttcgctccaagctgggctgtaagcaagaactccccgttcagcccgactgctgcgccttatccggtaactgttcacttgagtccaacccggaaaagcacggtaaaacgccactggcagcagccattggtaactgggagttcgcagaggatttgtttagctaaacacgcggttgctcttgaagtgtgcgccaaagtccggctacactggaaggacagatttggttgctgtgctctgcgaaagccagttaccacggttaagcagttccccaactgacttaaccttcgatcaaaccacctccccaggtggttttttcgtttacagggcaaaagattacgcgcagaaaaaaaggatctcaagaagatcctttgatcttttctactgaaccgctctagatttcagtgcaatttatctcttcaaatgtagcacctgaagtcagccccatacgatataagttgtaattctcatgttagtcatgccccgcgcccaccggaaggagctgactgggttgaaggctctcaagggcatcggtcgagatcccggtgcctaatgagtgagctaacttacattaattgcgttgcgctcactgcccgctttccagtcgggaaacctgtcgtgccagctgcattaatgaatcggccaacgcgcggggagaggcggtttgcgtattgggcgccagggtggtttttcttttcaccagtgagacgggcaacagctgattgcccttcaccgcctggccctgagagagttgcagcaagcggtccacgctggtttgccccagcaggcgaaaatcctgtttgatggtggttaacggcgggatataacatgagctgtcttcggtatcgtcgtatcccactaccgagatgtccgcaccaacgcgcagcccggactcggtaatggcgcgcattgcgcccagcgccatctgatcgttggcaaccagcatcgcagtgggaacgatgccctcattcagcatttgcatggtttgttgaaaaccggacatggcactccagtcgccttcccgttccgctatcggctgaatttgattgcgagtgagatatttatgccagccagccagacgcagacgcgccgagacagaacttaatgggcccgctaacagcgcgatttgctggtgacccaatgcgaccagatgctccacgcccagtcgcgtaccgtcttcatgggagaaaataatactgttgatgggtgtctggtcagagacatcaagaaataacgccggaacattagtgcaggcagcttccacagcaatggcatcctggtcatccagcggatagttaatgatcagcccactgacgcgttgcgcgagaagattgtgcaccgccgctttacaggcttcgacgccgcttcgttctaccatcgacaccaccacgctggcacccagttgatcggcgcgagatttaatcgccgcgacaatttgcgacggcgcgtgcagggccagactggaggtggcaacgccaatcagcaacgactgtttgcccgccagttgttgtgccacgcggttgggaatgtaattcagctccgccatcgccgcttccactttttcccgcgttttcgcagaaacgtggctggcctggttcaccacgcgggaaacggtctgataagagacaccggcatactctgcgacatcgtataacgttactggtttcac

SEQ ID NO: 128 - DNA, 8445 bp, Synthetic construct
  source 1..8445: mol_type = other DNA
attcaccaccctgaattgactctcttccgggcgctatcatgccataccgcgaaaggttttgcgccattcgatggtgtccgggatctcgacgctctcccttatgcgactcctgcattaggaaattaatacgactcactataggggaattgtgagcggataacaattcccctgtagaaataattttgtttaactttaataaggagatataccatgggtgaactgccgagtaggtagctgataacgagaatattgtggcaaaagcgcataaggtgctgtgaactgccgagtaggtagctgataacggatccgaattcgagctcggcgcgcctgcaggtcgacaagcttgcggccgcataatgcttaagtcgaacagaaagtaatcgtattgtacacggccgcataatcgaaattaatacgactcactataggggaattgtgagcggataacaattccccatcttagtatattagttaagtataagaaggagatatacatatgtttttgcaaagacctaaaccttacagcgatgaaagtttagaaagtttctttatccgagtggctaacaaaaatggctacggtgatgtccatcgcttcctagaagccactaaacgattccttcaagacattgaccataatggctatcaaacctttccgactgatataactcggataaacccatactcagctaaaaacagttccagcgcacgaactgcgtcattcctgaaacttgcacaattgacatttaatgaaccgccagagctacttgggttggcaattaacagaacaaacatgaaatactcgccgtcaactagcgcggttgttagaggtgcagaagtctttcctcgcagtttactacggacgcactccatcccctgctgtcctttgtgtctgcgagaaaatggctacgcctcctacctttggcactttcaggggtacgaatactgccacagccataacgtacctttaattaccacttgtagctgtggtaaggagtttgactaccgagtatctgggttaaagggcatttgctgcaaatgcaaggagcctatcaccttaaccagcagggagaacggtcatgaggcagcgtgtactgtttcaaactggcttgctggccatgaatctaaacctctgccaaatcttcctaaaagctaccgatggggtttagttcattggtggatgggtattaaagatagcgagttcgatcacttttcgttcgttcaatttttctcaaactggccaaggtcattccactcgataatcgaagatgaagtagagttcaaccttgagcatgctgttgtcagcacgtctgaattacgactaaaagatcttcttggtcgattgtttttcggttcaattcggttacctgagcggaatcttcaacacaatatcatccttggtgagcttctctgctatttagaaaatcgtttatggcaagacaagggattaatcgccaacctcaaaatgaacgcgttagaggcgactgtaatgttaaattgtagcctcgatcagattgcatcaatggttgaacaacgcatcttgaagccaaatcgaaaaagcaagcccaacagccctcttgatgttaccgattatctatttcatttcggcgatattttctgtctttggttagctgagttccaaagcgatgagtttaaccgttcgttttatgtgtcgaggtggtaaatgcaaactctgaaagaactaatcgcatccaatcctgacgacttaacaactgaacttaagagagcatttcgtccactcacaccgcatattgcaattgatggtaatgaacttgacgcactgacgatattagtcaatttaaccgataagactgatgatcagaaagacctgctcgatcgagccaaatgcaagcaaaaacttcgagatgaaaaatggtgggctagctgcataaattgcgttaattacagacaaagccataacccaaaattcccggatatacgttctgaaggcgtgattcgaacccaagccctgggtgaattaccgagtttcctactctcgtcctcaaaaatcccaccataccattggtcatatagccatgattcaaaatacgtcaacaaaagcgcattcctcaccaatgagttttgttgggatggtgagatctcatgtttgggtgagcttcttaaagatgcagatcacccactttggaatactttgaaaaagttaggttgttctcaaaaaacttgcaaagcaatggcaaaacaactagctgatattactctcacgactatcaatgtcacactcgcaccaaattacctgactcaaatatctctccccgatagtgatacatcctacatttcactctctcctgttgcatcgctatcgatgcaaagccactttcatcagaggctccaagatgaaaatcggcatagcgcgataacgcggtttagccgaactaccaacatgggggtcactgcgatgacatgtggcggcgcatttagaatgttaaagtctggcgctaagttttccagcccccctcatcaccgattaaacagtaaacgaagttggttgacgtcagagcatgttcagtcattaaaacagtaccagcgcctcaacaaaagcctcatacctgaaaactctcggattgcactccgtagaaaatacaaaatcgagcttcaaaatatggtcagatcttggtttgcaatgcaagaccatacccttgattcgaacatacttatccaacatttgaatcatgacctatcttacttaggagccacaaaacgttttgcatacgatccagcgatgaccaagctctttactgagcttttgaaacgagagttatcaaattcaatcaataatggtgagcaacacactaatggatcgtttttagtcctaccgaatatcagggtttgtggcgcaacagctttaagctccccggtaacggtggggattccatcacttacagctttctttggcttcgttcacgcatttgaacggaatataaatcgcaccacctcatcgtttcgtgttgaatcctttgcgatatgcgtccatcaactacatgtcgagaagcgaggtttgacagcagagtttgtggaaaaaggcgacgggactatatccgctcccgcgacccgggatgactggcagtgtgatgtcgtatttagccttattttgaacaccaactttgctcaacatattgaccaagatacgttagttacatcactaccaaagcgattggctcggggttcagcaaaaattgcgattgatgactttaaacatatcaactcattctcgacattagaaacagcgatcgaatctctgccaatagaagctggtaggtggttatcactttacgcacagtcaaacaataatctaagtgatctattagcagccatgacagaggaccatcagctcatggcaagctgcgtcggttaccacttgttagaagagcccaaagataaaccaaactccctcagaggttacaaacacgctatcgccgagtgcatcattggactcattaactcaatcacctttagctcagagactgatcccaacacaatcttttggtcgctaaagaactatcaaaactacctagtggtacagccaaggagtatcaacgatgaaactaccgacaaatctagcctatgagcgctctatcgacccatcagatgtctgtttttttgtcgtctggcccgatgatagaaaaacacctttaacctacaattctcgtactctgctcgggcaaatggaagcggcatcattagcctatgatgtctcaggtcaaccaataaaaagtgccaccgctgaggcgttagctcaagggaaccctcatcaagttgatttctgccacgttccatacggtgcgagtcatattgaatgcagtttctccgtctcgttttcttctgaactacgtcaaccatataagtgtaactcaagcaaagttaaacaaacgctagtgcaattagtcgagctctacgaaacgaaaatcggctggactgagctagcaacccgatatttgatgaacatttgcaacggtaaatggctgtggaaaaatacccgtaaagcctattgctggaacattgtacttacaccttggccttggaacggggaaaaggttggatttgaagatattcgtactaactacacctcacggcaagactttaaaaataataaaaattggtctgctatagttgaaatgatcaaaaccgcattttctagtactgatgggctggcgatatttgaagtcagggccaccttgcacttgccaacgaatgctatggtgcggccaagccaagttttcacagaaaaagaaagtggcagtaaaagtaaatctaaaactcaaaacagtcgagtttttcagagtacaactattgatggtgaacgatcgccaatactaggggcctttaaaacgggagcagctattgcaaccattgacgactggtatcctgaagccactgagccactaagggtcggacggtttggggttcatcgcgaagatgtcacttgctaccgtcatccgtctaccggaaaagattttttctcgatattacaacaagcagagcactatattgaagtgttgagcgccaacaaaactcccgctcaagaaactatcaacgacatgcactttttaatggctaacctgattaagggtgggatgttccagcataaaggagactgactgtgaaatggtattataagacaatcacctttctgccagagttgtgcaacaacgagtcactggctgcaaagtgtctccgcgttctgcatggatttaactatcagtatgagacacgaaatatcggcgtttcatttccgctttggtgtgatgcaacggttggaaaaaagatttcatttgtcagcaagaacaagatagaactcgacttactacttaaacaacactatttcgtccaaatggaacaacttcaatactttcatatatccaacactgttctcgtcccagaagattgtacatacgtttcctttagacgctgtcaatctatagataagctcacagcagcagggctggcaaggaaaatcagacgcctggagaaacgtgctctatctagaggcgagcaatttgacccatcatcttttgctcaaaaagagcatactgcaatagcgcactaccactcacttggggagtccagcaaacagacgaaccgcaactttcgactcaatatcaggatgctctcggagcaaccccgtgaggggaactcgatttttagtagctatggcttatcaaattcagaaaactcgtttcagcctgtacccttaatctgacctaggctgctgccaccgctgagcaataactagcataaccccttggggcctctaaacgggtcttgaggggttttttgctgaaacctcaggcatttgagaagcacacggtcacactgcttccggtagtcaataaaccggtaaaccagcaatagacataagcggctatttaacgaccctgccctgaaccgacgaccgggtcatcgtggccggatcttgcggcccctcggcttgaacgaattgttagacattatttgccgactaccttggtgatctcgcctttcacgtagtggacaaattcttccaactgatctgcgcgcgaggccaagcgatcttcttcttgtccaagataagcctgtctagcttcaagtatgacgggctgatactgggccggcaggcgctccattgcccagtcggcagcgacatccttcggcgcgattttgccggttactgcgctgtaccaaatgcgggacaacgtaagcactacatttcgctcatcgccagcccagtcgggcggcgagttccatagcgttaaggtttcatttagcgcctcaaatagatcctgttcaggaaccggatcaaagagttcctccgccgctggacctaccaaggcaacgctatgttctcttgcttttgtcagcaagatagccagatcaatgtcgatcgtggctggctcgaagatacctgcaagaatgtcattgcgctgccattctccaaattgcagttcgcgcttagctggataacgccacggaatgatgtcgtcgtgcacaacaatggtgacttctacagcgcggagaatctcgctctctccaggggaagccgaagtttccaaaaggtcgttgatcaaagctcgccgcgttgtttcatcaagccttacggtcaccgtaaccagcaaatcaatatcactgtgtggcttcaggccgccatccactgcggagccgtacaaatgtacggccagcaacgtcggttcgagatggcgctcgatgacgccaactacctctgatagttgagtcgatacttcggcgatcaccgcttccctcatactcttcctttttcaatattattgaagcatttatcagggttattgtctcatgagcggatacatatttgaatgtatttagaaaaataaacaaatagctagctcactcggtcgctacgctccgggcgtgagactgcggcgggcgctgcggacacatacaaagttacccacagattccgtggataagcaggggactaacatgtgaggcaaaacagcagggccgcgccggtggcgtttttccataggctccgccctcctgccagagttcacataaacagacgcttttccggtgcatctgtgggagccgtgaggctcaaccatgaatctgacagtacgggcgaaacccgacaggacttaaagatccccaccgtttccggcgggtcgctccctcttgcgctctcctgttccgaccctgccgtttaccggatacctgttccgcctttctcccttacgggaagtgtggcgctttctcatagctcacacactggtatctcggctcggtgtaggtcgttcgctccaagctgggctgtaagcaagaactccccgttcagcccgactgctgcgccttatccggtaactgttcacttgagtccaacccggaaaagcacggtaaaacgccactggcagcagccattggtaactgggagttcgcagaggatttgtttagctaaacacgcggttgctcttgaagtgtgcgccaaagtccggctacactggaaggacagatttggttgctgtgctctgcgaaagccagttaccacggttaagcagttccccaactgacttaaccttcgatcaaaccacctccccaggtggttttttcgtttacagggcaaaagattacgcgcagaaaaaaaggatctcaagaagatcctttgatcttttctactgaaccgctctagatttcagtgcaatttatctcttcaaatgtagcacctgaagtcagccccatacgatataagttgtaattctcatgttagtcatgccccgcgcccaccggaaggagctgactgggttgaaggctctcaagggcatcggtcgagatcccggtgcctaatgagtgagctaacttacattaattgcgttgcgctcactgcccgctttccagtcgggaaacctgtcgtgccagctgcattaatgaatcggccaacgcgcggggagaggcggtttgcgtattgggcgccagggtggtttttcttttcaccagtgagacgggcaacagctgattgcccttcaccgcctggccctgagagagttgcagcaagcggtccacgctggtttgccccagcaggcgaaaatcctgtttgatggtggttaacggcgggatataacatgagctgtcttcggtatcgtcgtatcccactaccgagatgtccgcaccaacgcgcagcccggactcggtaatggcgcgcattgcgcccagcgccatctgatcgttggcaaccagcatcgcagtgggaacgatgccctcattcagcatttgcatggtttgttgaaaaccggacatggcactccagtcgccttcccgttccgctatcggctgaatttgattgcgagtgagatatttatgccagccagccagacgcagacgcgccgagacagaacttaatgggcccgctaacagcgcgatttgctggtgacccaatgcgaccagatgctccacgcccagtcgcgtaccgtcttcatgggagaaaataatactgttgatgggtgtctggtcagagacatcaagaaataacgccggaacattagtgcaggcagcttccacagcaatggcatcctggtcatccagcggatagttaatgatcagcccactgacgcgttgcgcgagaagattgtgcaccgccgctttacaggcttcgacgccgcttcgttctaccatcgacaccaccacgctggcacccagttgatcggcgcgagatttaatcgccgcgacaatttgcgacggcgcgtgcagggccagactggaggtggcaacgccaatcagcaacgactgtttgcccgccagttgttgtgccacgcggttgggaatgtaattcagctccgccatcgccgcttccactttttcccgcgttttcgcagaaacgtggctggcctggttcaccacgcgggaaacggtctgataagagacaccggcatactctgcgacatcgtataacgttactggtttcac

SEQ ID NO: 129 - DNA, 8445 bp, Synthetic construct
  source 1..8445: mol_type = other DNA
attcaccaccctgaattgactctcttccgggcgctatcatgccataccgcgaaaggttttgcgccattcgatggtgtccgggatctcgacgctctcccttatgcgactcctgcattaggaaattaatacgactcactataggggaattgtgagcggataacaattcccctgtagaaataattttgtttaactttaataaggagatataccatgggtgaactgccgagtaggtagctgataacgcagaagtgcacggcgtgtgcggcggcgagcagtgaactgccgagtaggtagctgataacggatccgaattcgagctcggcgcgcctgcaggtcgacaagcttgcggccgcataatgcttaagtcgaacagaaagtaatcgtattgtacacggccgcataatcgaaattaatacgactcactataggggaattgtgagcggataacaattccccatcttagtatattagttaagtataagaaggagatatacatatgtttttgcaaagacctaaaccttacagcgatgaaagtttagaaagtttctttatccgagtggctaacaaaaatggctacggtgatgtccatcgcttcctagaagccactaaacgattccttcaagacattgaccataatggctatcaaacctttccgactgatataactcggataaacccatactcagctaaaaacagttccagcgcacgaactgcgtcattcctgaaacttgcacaattgacatttaatgaaccgccagagctacttgggttggcaattaacagaacaaacatgaaatactcgccgtcaactagcgcggttgttagaggtgcagaagtctttcctcgcagtttactacggacgcactccatcccctgctgtcctttgtgtctgcgagaaaatggctacgcctcctacctttggcactttcaggggtacgaatactgccacagccataacgtacctttaattaccacttgtagctgtggtaaggagtttgactaccgagtatctgggttaaagggcatttgctgcaaatgcaaggagcctatcaccttaaccagcagggagaacggtcatgaggcagcgtgtactgtttcaaactggcttgctggccatgaatctaaacctctgccaaatcttcctaaaagctaccgatggggtttagttcattggtggatgggtattaaagatagcgagttcgatcacttttcgttcgttcaatttttctcaaactggccaaggtcattccactcgataatcgaagatgaagtagagttcaaccttgagcatgctgttgtcagcacgtctgaattacgactaaaagatcttcttggtcgattgtttttcggttcaattcggttacctgagcggaatcttcaacacaatatcatccttggtgagcttctctgctatttagaaaatcgtttatggcaagacaagggattaatcgccaacctcaaaatgaacgcgttagaggcgactgtaatgttaaattgtagcctcgatcagattgcatcaatggttgaacaacgcatcttgaagccaaatcgaaaaagcaagcccaacagccctcttgatgttaccgattatctatttcatttcggcgatattttctgtctttggttagctgagttccaaagcgatgagtttaaccgttcgttttatgtgtcgaggtggtaaatgcaaactctgaaagaactaatcgcatccaatcctgacgacttaacaactgaacttaagagagcatttcgtccactcacaccgcatattgcaattgatggtaatgaacttgacgcactgacgatattagtcaatttaaccgataagactgatgatcagaaagacctgctcgatcgagccaaatgcaagcaaaaacttcgagatgaaaaatggtgggctagctgcataaattgcgttaattacagacaaagccataacccaaaattcccggatatacgttctgaaggcgtgattcgaacccaagccctgggtgaattaccgagtttcctactctcgtcctcaaaaatcccaccataccattggtcatatagccatgattcaaaatacgtcaacaaaagcgcattcctcaccaatgagttttgttgggatggtgagatctcatgtttgggtgagcttcttaaagatgcagatcacccactttggaatactttgaaaaagttaggttgttctcaaaaaacttgcaaagcaatggcaaaacaactagctgatattactctcacgactatcaatgtcacactcgcaccaaattacctgactcaaatatctctccccgatagtgatacatcctacatttcactctctcctgttgcatcgctatcgatgcaaagccactttcatcagaggctccaagatgaaaatcggcatagcgcgataacgcggtttagccgaactaccaacatgggggtcactgcgatgacatgtggcggcgcatttagaatgttaaagtctggcgctaagttttccagcccccctcatcaccgattaaacagtaaacgaagttggttgacgtcagagcatgttcagtcattaaaacagtaccagcgcctcaacaaaagcctcatacctgaaaactctcggattgcactccgtagaaaatacaaaatcgagcttcaaaatatggtcagatcttggtttgcaatgcaagaccatacccttgattcgaacatacttatccaacatttgaatcatgacctatcttacttaggagccacaaaacgttttgcatacgatccagcgatgaccaagctctttactgagcttttgaaacgagagttatcaaattcaatcaataatggtgagcaacacactaatggatcgtttttagtcctaccgaatatcagggtttgtggcgcaacagctttaagctccccggtaacggtggggattccatcacttacagctttctttggcttcgttcacgcatttgaacggaatataaatcgcaccacctcatcgtttcgtgttgaatcctttgcgatatgcgtccatcaactacatgtcgagaagcgaggtttgacagcagagtttgtggaaaaaggcgacgggactatatccgctcccgcgacccgggatgactggcagtgtgatgtcgtatttagccttattttgaacaccaactttgctcaacatattgaccaagatacgttagttacatcactaccaaagcgattggctcggggttcagcaaaaattgcgattgatgactttaaacatatcaactcattctcgacattagaaacagcgatcgaatctctgccaatagaagctggtaggtggttatcactttacgcacagtcaaacaataatctaagtgatctattagcagccatgacagaggaccatcagctcatggcaagctgcgtcggttaccacttgttagaagagcccaaagataaaccaaactccctcagaggttacaaacacgctatcgccgagtgcatcattggactcattaactcaatcacctttagctcagagactgatcccaacacaatcttttggtcgctaaagaactatcaaaactacctagtggtacagccaaggagtatcaacgatgaaactaccgacaaatctagcctatgagcgctctatcgacccatcagatgtctgtttttttgtcgtctggcccgatgatagaaaaacacctttaacctacaattctcgtactctgctcgggcaaatggaagcggcatcattagcctatgatgtctcaggtcaaccaataaaaagtgccaccgctgaggcgttagctcaagggaaccctcatcaagttgatttctgccacgttccatacggtgcgagtcatattgaatgcagtttctccgtctcgttttcttctgaactacgtcaaccatataagtgtaactcaagcaaagttaaacaaacgctagtgcaattagtcgagctctacgaaacgaaaatcggctggactgagctagcaacccgatatttgatgaacatttgcaacggtaaatggctgtggaaaaatacccgtaaagcctattgctggaacattgtacttacaccttggccttggaacggggaaaaggttggatttgaagatattcgtactaactacacctcacggcaagactttaaaaataataaaaattggtctgctatagttgaaatgatcaaaaccgcattttctagtactgatgggctggcgatatttgaagtcagggccaccttgcacttgccaacgaatgctatggtgcggccaagccaagttttcacagaaaaagaaagtggcagtaaaagtaaatctaaaactcaaaacagtcgagtttttcagagtacaactattgatggtgaacgatcgccaatactaggggcctttaaaacgggagcagctattgcaaccattgacgactggtatcctgaagccactgagccactaagggtcggacggtttggggttcatcgcgaagatgtcacttgctaccgtcatccgtctaccggaaaagattttttctcgatattacaacaagcagagcactatattgaagtgttgagcgccaacaaaactcccgctcaagaaactatcaacgacatgcactttttaatggctaacctgattaagggtgggatgttccagcataaaggagactgactgtgaaatggtattataagacaatcacctttctgccagagttgtgcaacaacgagtcactggctgcaaagtgtctccgcgttctgcatggatttaactatcagtatgagacacgaaatatcggcgtttcatttccgctttggtgtgatgcaacggttggaaaaaagatttcatttgtcagcaagaacaagatagaactcgacttactacttaaacaacactatttcgtccaaatggaacaacttcaatactttcatatatccaacactgttctcgtcccagaagattgtacatacgtttcctttagacgctgtcaatctatagataagctcacagcagcagggctggcaaggaaaatcagacgcctggagaaacgtgctctatctagaggcgagcaatttgacccatcatcttttgctcaaaaagagcatactgcaatagcgcactaccactcacttggggagtccagcaaacagacgaaccgcaactttcgactcaatatcaggatgctctcggagcaaccccgtgaggggaactcgatttttagtagctatggcttatcaaattcagaaaactcgtttcagcctgtacccttaatctgacctaggctgctgccaccgctgagcaataactagcataaccccttggggcctctaaacgggtcttgaggggttttttgctgaaacctcaggcatttgagaagcacacggtcacactgcttccggtagtcaataaaccggtaaaccagcaatagacataagcggctatttaacgaccctgccctgaaccgacgaccgggtcatcgtggccggatcttgcggcccctcggcttgaacgaattgttagacattatttgccgactaccttggtgatctcgcctttcacgtagtggacaaattcttccaactgatctgcgcgcgaggccaagcgatcttcttcttgtccaagataagcctgtctagcttcaagtatgacgggctgatactgggccggcaggcgctccattgcccagtcggcagcgacatccttcggcgcgattttgccggttactgcgctgtaccaaatgcgggacaacgtaagcactacatttcgctcatcgccagcccagtcgggcggcgagttccatagcgttaaggtttcatttagcgcctcaaatagatcctgttcaggaaccggatcaaagagttcctccgccgctggacctaccaaggcaacgctatgttctcttgcttttgtcagcaagatagccagatcaatgtcgatcgtggctggctcgaagatacctgcaagaatgtcattgcgctgccattctccaaattgcagttcgcgcttagctggataacgccacggaatgatgtcgtcgtgcacaacaatggtgacttctacagcgcggagaatctcgctctctccaggggaagccgaagtttccaaaaggtcgttgatcaaagctcgccgcgttgtttcatcaagccttacggtcaccgtaaccagcaaatcaatatcactgtgtggcttcaggccgccatccactgcggagccgtacaaatgtacggccagcaacgtcggttcgagatggcgctcgatgacgccaactacctctgatagttgagtcgatacttcggcgatcaccgcttccctcatactcttcctttttcaatattattgaagcatttatcagggttattgtctcatgagcggatacatatttgaatgtatttagaaaaataaacaaatagctagctcactcggtcgctacgctccgggcgtgagactgcggcgggcgctgcggacacatacaaagttacccacagattccgtggataagcaggggactaacatgtgaggcaaaacagcagggccgcgccggtggcgtttttccataggctccgccctcctgccagagttcacataaacagacgcttttccggtgcatctgtgggagccgtgaggctcaaccatgaatctgacagtacgggcgaaacccgacaggacttaaagatccccaccgtttccggcgggtcgctccctcttgcgctctcctgttccgaccctgccgtttaccggatacctgttccgcctttctcccttacgggaagtgtggcgctttctcatagctcacacactggtatctcggctcggtgtaggtcgttcgctccaagctgggctgtaagcaagaactccccgttcagcccgactgctgcgccttatccggtaactgttcacttgagtccaacccggaaaagcacggtaaaacgccactggcagcagccattggtaactgggagttcgcagaggatttgtttagctaaacacgcggttgctcttgaagtgtgcgccaaagtccggctacactggaaggacagatttggttgctgtgctctgcgaaagccagttaccacggttaagcagttccccaactgacttaaccttcgatcaaaccacctccccaggtggttttttcgtttacagggcaaaagattacgcgcagaaaaaaaggatctcaagaagatcctttgatcttttctactgaaccgctctagatttcagtgcaatttatctcttcaaatgtagcacctgaagtcagccccatacgatataagttgtaattctcatgttagtcatgccccgcgcccaccggaaggagctgactgggttgaaggctctcaagggcatcggtcgagatcccggtgcctaatgagtgagctaacttacattaattgcgttgcgctcactgcccgctttccagtcgggaaacctgtcgtgccagctgcattaatgaatcggccaacgcgcggggagaggcggtttgcgtattgggcgccagggtggtttttcttttcaccagtgagacgggcaacagctgattgcccttcaccgcctggccctgagagagttgcagcaagcggtccacgctggtttgccccagcaggcgaaaatcctgtttgatggtggttaacggcgggatataacatgagctgtcttcggtatcgtcgtatcccactaccgagatgtccgcaccaacgcgcagcccggactcggtaatggcgcgcattgcgcccagcgccatctgatcgttggcaaccagcatcgcagtgggaacgatgccctcattcagcatttgcatggtttgttgaaaaccggacatggcactccagtcgccttcccgttccgctatcggctgaatttgattgcgagtgagatatttatgccagccagccagacgcagacgcgccgagacagaacttaatgggcccgctaacagcgcgatttgctggtgacccaatgcgaccagatgctccacgcccagtcgcgtaccgtcttcatgggagaaaataatactgttgatgggtgtctggtcagagacatcaagaaataacgccggaacattagtgcaggcagcttccacagcaatggcatcctggtcatccagcggatagttaatgatcagcccactgacgcgttgcgcgagaagattgtgcaccgccgctttacaggcttcgacgccgcttcgttctaccatcgacaccaccacgctggcacccagttgatcggcgcgagatttaatcgccgcgacaatttgcgacggcgcgtgcagggccagactggaggtggcaacgccaatcagcaacgactgtttgcccgccagttgttgtgccacgcggttgggaatgtaattcagctccgccatcgccgcttccactttttcccgcgttttcgcagaaacgtggctggcctggttcaccacgcgggaaacggtctgataagagacaccggcatactctgcgacatcgtataacgttactggtttcac

SEQ ID NO: 130 - DNA, 8445 bp, Synthetic construct
  source 1..8445: mol_type = other DNA
attcaccaccctgaattgactctcttccgggcgctatcatgccataccgcgaaaggttttgcgccattcgatggtgtccgggatctcgacgctctcccttatgcgactcctgcattaggaaattaatacgactcactataggggaattgtgagcggataacaattcccctgtagaaataattttgtttaactttaataaggagatataccatgggtgaactgccgagtaggtagctgataacttacttacggcgttgcgcattctcattgcaccgtgaactgccgagtaggtagctgataacggatccgaattcgagctcggcgcgcctgcaggtcgacaagcttgcggccgcataatgcttaagtcgaacagaaagtaatcgtattgtacacggccgcataatcgaaattaatacgactcactataggggaattgtgagcggataacaattccccatcttagtatattagttaagtataagaaggagatatacatatgtttttgcaaagacctaaaccttacagcgatgaaagtttagaaagtttctttatccgagtggctaacaaaaatggctacggtgatgtccatcgcttcctagaagccactaaacgattccttcaagacattgaccataatggctatcaaacctttccgactgatataactcggataaacccatactcagctaaaaacagttccagcgcacgaactgcgtcattcctgaaacttgcacaattgacatttaatgaaccgccagagctacttgggttggcaattaacagaacaaacatgaaatactcgccgtcaactagcgcggttgttagaggtgcagaagtctttcctcgcagtttactacggacgcactccatcccctgctgtcctttgtgtctgcgagaaaatggctacgcctcctacctttggcactttcaggggtacgaatactgccacagccataacgtacctttaattaccacttgtagctgtggtaaggagtttgactaccgagtatctgggttaaagggcatttgctgcaaatgcaaggagcctatcaccttaaccagcagggagaacggtcatgaggcagcgtgtactgtttcaaactggcttgctggccatgaatctaaacctctgccaaatcttcctaaaagctaccgatggggtttagttcattggtggatgggtattaaagatagcgagttcgatcacttttcgttcgttcaatttttctcaaactggccaaggtcattccactcgataatcgaagatgaagtagagttcaaccttgagcatgctgttgtcagcacgtctgaattacgactaaaagatcttcttggtcgattgtttttcggttcaattcggttacctgagcggaatcttcaacacaatatcatccttggtgagcttctctgctatttagaaaatcgtttatggcaagacaagggattaatcgccaacctcaaaatgaacgcgttagaggcgactgtaatgttaaattgtagcctcgatcagattgcatcaatggttgaacaacgcatcttgaagccaaatcgaaaaagcaagcccaacagccctcttgatgttaccgattatctatttcatttcggcgatattttctgtctttggttagctgagttccaaagcgatgagtttaaccgttcgttttatgtgtcgaggtggtaaatgcaaactctgaaagaactaatcgcatccaatcctgacgacttaacaactgaacttaagagagcatttcgtccactcacaccgcatattgcaattgatggtaatgaacttgacgcactgacgatattagtcaatttaaccgataagactgatgatcagaaagacctgctcgatcgagccaaatgcaagcaaaaacttcgagatgaaaaatggtgggctagctgcataaattgcgttaattacagacaaagccataacccaaaattcccggatatacgttctgaaggcgtgattcgaacccaagccctgggtgaattaccgagtttcctactctcgtcctcaaaaatcccaccataccattggtcatatagccatgattcaaaatacgtcaacaaaagcgcattcctcaccaatgagttttgttgggatggtgagatctcatgtttgggtgagcttcttaaagatgcagatcacccactttggaatactttgaaaaagttaggttgttctcaaaaaacttgcaaagcaatggcaaaacaactagctgatattactctcacgactatcaatgtcacactcgcaccaaattacctgactcaaatatctctccccgatagtgatacatcctacatttcactctctcctgttgcatcgctatcgatgcaaagccactttcatcagaggctccaagatgaaaatcggcatagcgcgataacgcggtttagccgaactaccaacatgggggtcactgcgatgacatgtggcggcgcatttagaatgttaaagtctggcgctaagttttccagcccccctcatcaccgattaaacagtaaacgaagttggttgacgtcagagcatgttcagtcattaaaacagtaccagcgcctcaacaaaagcctcatacctgaaaactctcggattgcactccgtagaaaatacaaaatcgagcttcaaaatatggtcagatcttggtttgcaatgcaagaccatacccttgattcgaacatacttatccaacatttgaatcatgacctatcttacttaggagccacaaaacgttttgcatacgatccagcgatgaccaagctctttactgagcttttgaaacgagagttatcaaattcaatcaataatggtgagcaacacactaatggatcgtttttagtcctaccgaatatcagggtttgtggcgcaacagctttaagctccccggtaacggtggggattccatcacttacagctttctttggcttcgttcacgcatttgaacggaatataaatcgcaccacctcatcgtttcgtgttgaatcctttgcgatatgcgtccatcaactacatgtcgagaagcgaggtttgacagcagagtttgtggaaaaaggcgacgggactatatccgctcccgcgacccgggatgactggcagtgtgatgtcgtatttagccttattttgaacaccaactttgctcaacatattgaccaagatacgttagttacatcactaccaaagcgattggctcggggttcagcaaaaattgcgattgatgactttaaacatatcaactcattctcgacattagaaacagcgatcgaatctctgccaatagaagctggtaggtggttatcactttacgcacagtcaaacaataatctaagtgatctattagcagccatgacagaggaccatcagctcatggcaagctgcgtcggttaccacttgttagaagagcccaaagataaaccaaactccctcagaggttacaaacacgctatcgccgagtgcatcattggactcattaactcaatcacctttagctcagagactgatcccaacacaatcttttggtcgctaaagaactatcaaaactacctagtggtacagccaaggagtatcaacgatgaaactaccgacaaatctagcctatgagcgctctatcgacccatcagatgtctgtttttttgtcgtctggcccgatgatagaaaaacacctttaacctacaattctcgtactctgctcgggcaaatggaagcggcatcattagcctatgatgtctcaggtcaaccaataaaaagtgccaccgctgaggcgttagctcaagggaaccctcatcaagttgatttctgccacgttccatacggtgcgagtcatattgaatgcagtttctccgtctcgttttcttctgaactacgtcaaccatataagtgtaactcaagcaaagttaaacaaacgctagtgcaattagtcgagctctacgaaacgaaaatcggctggactgagctagcaacccgatatttgatgaacatttgcaacggtaaatggctgtggaaaaatacccgtaaagcctattgctggaacattgtacttacaccttggccttggaacggggaaaaggttggatttgaagatattcgtactaactacacctcacggcaagactttaaaaataataaaaattggtctgctatagttgaaatgatcaaaaccgcattttctagtactgatgggctggcgatatttgaagtcagggccaccttgcacttgccaacgaatgctatggtgcggccaagccaagttttcacagaaaaagaaagtggcagtaaaagtaaatctaaaactcaaaacagtcgagtttttcagagtacaactattgatggtgaacgatcgccaatactaggggcctttaaaacgggagcagctattgcaaccattgacgactggtatcctgaagccactgagccactaagggtcggacggtttggggttcatcgcgaagatgtcacttgctaccgtcatccgtctaccggaaaagattttttctcgatattacaacaagcagagcactatattgaagtgttgagcgccaacaaaactcccgctcaagaaactatcaacgacatgcactttttaatggctaacctgattaagggtgggatgttccagcataaaggagactgactgtgaaatggtattataagacaatcacctttctgccagagttgtgcaacaacgagtcactggctgcaaagtgtctccgcgttctgcatggatttaactatcagtatgagacacgaaatatcggcgtttcatttccgctttggtgtgatgcaacggttggaaaaaagatttcatttgtcagcaagaacaagatagaactcgacttactacttaaacaacactatttcgtccaaatggaacaacttcaatactttcatatatccaacactgttctcgtcccagaagattgtacatacgtttcctttagacgctgtcaatctatagataagctcacagcagcagggctggcaaggaaaatcagacgcctggagaaacgtgctctatctagaggcgagcaatttgacccatcatcttttgctcaaaaagagcatactgcaatagcgcactaccactcacttggggagtccagcaaacagacgaaccgcaactttcgactcaatatcaggatgctctcggagcaaccccgtgaggggaactcgatttttagtagctatggcttatcaaattcagaaaactcgtttcagcctgtacccttaatctgacctaggctgctgccaccgctgagcaataactagcataaccccttggggcctctaaacgggtcttgaggggttttttgctgaaacctcaggcatttgagaagcacacggtcacactgcttccggtagtcaataaaccggtaaaccagcaatagacataagcggctatttaacgaccctgccctgaaccgacgaccgggtcatcgtggccggatcttgcggcccctcggcttgaacgaattgttagacattatttgccgactaccttggtgatctcgcctttcacgtagtggacaaattcttccaactgatctgcgcgcgaggccaagcgatcttcttcttgtccaagataagcctgtctagcttcaagtatgacgggctgatactgggccggcaggcgctccattgcccagtcggcagcgacatccttcggcgcgattttgccggttactgcgctgtaccaaatgcgggacaacgtaagcactacatttcgctcatcgccagcccagtcgggcggcgagttccatagcgttaaggtttcatttagcgcctcaaatagatcctgttcaggaaccggatcaaagagttcctccgccgctggacctaccaaggcaacgctatgttctcttgcttttgtcagcaagatagccagatcaatgtcgatcgtggctggctcgaagatacctgcaagaatgtcattgcgctgccattctccaaattgcagttcgcgcttagctggataacgccacggaatgatgtcgtcgtgcacaacaatggtgacttctacagcgcggagaatctcgctctctccaggggaagccgaagtttccaaaaggtcgttgatcaaagctcgccgcgttgtttcatcaagccttacggtcaccgtaaccagcaaatcaatatcactgtgtggcttcaggccgccatccactgcggagccgtacaaatgtacggccagcaacgtcggttcgagatggcgctcgatgacgccaactacctctgatagttgagtcgatacttcggcgatcaccgcttccctcatactcttcctttttcaatattattgaagcatttatcagggttattgtctcatgagcggatacatatttgaatgtatttagaaaaataaacaaatagctagctcactcggtcgctacgctccgggcgtgagactgcggcgggcgctgcggacacatacaaagttacccacagattccgtggataagcaggggactaacatgtgaggcaaaacagcagggccgcgccggtggcgtttttccataggctccgccctcctgccagagttcacataaacagacgcttttccggtgcatctgtgggagccgtgaggctcaaccatgaatctgacagtacgggcgaaacccgacaggacttaaagatccccaccgtttccggcgggtcgctccctcttgcgctctcctgttccgaccctgccgtttaccggatacctgttccgcctttctcccttacgggaagtgtggcgctttctcatagctcacacactggtatctcggctcggtgtaggtcgttcgctccaagctgggctgtaagcaagaactccccgttcagcccgactgctgcgccttatccggtaactgttcacttgagtccaacccggaaaagcacggtaaaacgccactggcagcagccattggtaactgggagttcgcagaggatttgtttagctaaacacgcggttgctcttgaagtgtgcgccaaagtccggctacactggaaggacagatttggttgctgtgctctgcgaaagccagttaccacggttaagcagttccccaactgacttaaccttcgatcaaaccacctccccaggtggttttttcgtttacagggcaaaagattacgcgcagaaaaaaaggatctcaagaagatcctttgatcttttctactgaaccgctctagatttcagtgcaatttatctcttcaaatgtagcacctgaagtcagccccatacgatataagttgtaattctcatgttagtcatgccccgcgcccaccggaaggagctgactgggttgaaggctctcaagggcatcggtcgagatcccggtgcctaatgagtgagctaacttacattaattgcgttgcgctcactgcccgctttccagtcgggaaacctgtcgtgccagctgcattaatgaatcggccaacgcgcggggagaggcggtttgcgtattgggcgccagggtggtttttcttttcaccagtgagacgggcaacagctgattgcccttcaccgcctggccctgagagagttgcagcaagcggtccacgctggtttgccccagcaggcgaaaatcctgtttgatggtggttaacggcgggatataacatgagctgtcttcggtatcgtcgtatcccactaccgagatgtccgcaccaacgcgcagcccggactcggtaatggcgcgcattgcgcccagcgccatctgatcgttggcaaccagcatcgcagtgggaacgatgccctcattcagcatttgcatggtttgttgaaaaccggacatggcactccagtcgccttcccgttccgctatcggctgaatttgattgcgagtgagatatttatgccagccagccagacgcagacgcgccgagacagaacttaatgggcccgctaacagcgcgatttgctggtgacccaatgcgaccagatgctccacgcccagtcgcgtaccgtcttcatgggagaaaataatactgttgatgggtgtctggtcagagacatcaagaaataacgccggaacattagtgcaggcagcttccacagcaatggcatcctggtcatccagcggatagttaatgatcagcccactgacgcgttgcgcgagaagattgtgcaccgccgctttacaggcttcgacgccgcttcgttctaccatcgacaccaccacgctggcacccagttgatcggcgcgagatttaatcgccgcgacaatttgcgacggcgcgtgcagggccagactggaggtggcaacgccaatcagcaacgactgtttgcccgccagttgttgtgccacgcggttgggaatgtaattcagctccgccatcgccgcttccactttttcccgcgttttcgcagaaacgtggctggcctggttcaccacgcgggaaacggtctgataagagacaccggcatactctgcgacatcgtataacgttactggtttcac

SEQ ID NO: 131 - DNA, 8445 bp, Synthetic construct
  source 1..8445: mol_type = other DNA
attcaccaccctgaattgactctcttccgggcgctatcatgccataccgcgaaaggttttgcgccattcgatggtgtccgggatctcgacgctctcccttatgcgactcctgcattaggaaattaatacgactcactataggggaattgtgagcggataacaattcccctgtagaaataattttgtttaactttaataaggagatataccatgggtgaactgccgagtaggtagctgataacggggcgtaaaaagaaggggcgctgattaacgcgtgaactgccgagtaggtagctgataacggatccgaattcgagctcggcgcgcctgcaggtcgacaagcttgcggccgcataatgcttaagtcgaacagaaagtaatcgtattgtacacggccgcataatcgaaattaatacgactcactataggggaattgtgagcggataacaattccccatcttagtatattagttaagtataagaaggagatatacatatgtttttgcaaagacctaaaccttacagcgatgaaagtttagaaagtttctttatccgagtggctaacaaaaatggctacggtgatgtccatcgcttcctagaagccactaaacgattccttcaagacattgaccataatggctatcaaacctttccgactgatataactcggataaacccatactcagctaaaaacagttccagcgcacgaactgcgtcattcctgaaacttgcacaattgacatttaatgaaccgccagagctacttgggttggcaattaacagaacaaacatgaaatactcgccgtcaactagcgcggttgttagaggtgcagaagtctttcctcgcagtttactacggacgcactccatcccctgctgtcctttgtgtctgcgagaaaatggctacgcctcctacctttggcactttcaggggtacgaatactgccacagccataacgtacctttaattaccacttgtagctgtggtaaggagtttgactaccgagtatctgggttaaagggcatttgctgcaaatgcaaggagcctatcaccttaaccagcagggagaacggtcatgaggcagcgtgtactgtttcaaactggcttgctggccatgaatctaaacctctgccaaatcttcctaaaagctaccgatggggtttagttcattggtggatgggtattaaagatagcgagttcgatcacttttcgttcgttcaatttttctcaaactggccaaggtcattccactcgataatcgaagatgaagtagagttcaaccttgagcatgctgttgtcagcacgtctgaattacgactaaaagatcttcttggtcgattgtttttcggttcaattcggttacctgagcggaatcttcaacacaatatcatccttggtgagcttctctgctatttagaaaatcgtttatggcaagacaagggattaatcgccaacctcaaaatgaacgcgttagaggcgactgtaatgttaaattgtagcctcgatcagattgcatcaatggttgaacaacgcatcttgaagccaaatcgaaaaagcaagcccaacagccctcttgatgttaccgattatctatttcatttcggcgatattttctgtctttggttagctgagttccaaagcgatgagtttaaccgttcgttttatgtgtcgaggtggtaaatgcaaactctgaaagaactaatcgcatccaatcctgacgacttaacaactgaacttaagagagcatttcgtccactcacaccgcatattgcaattgatggtaatgaacttgacgcactgacgatattagtcaatttaaccgataagactgatgatcagaaagacctgctcgatcgagccaaatgcaagcaaaaacttcgagatgaaaaatggtgggctagctgcataaattgcgttaattacagacaaagccataacccaaaattcccggatatacgttctgaaggcgtgattcgaacccaagccctgggtgaattaccgagtttcctactctcgtcctcaaaaatcccaccataccattggtcatatagccatgattcaaaatacgtcaacaaaagcgcattcctcaccaatgagttttgttgggatggtgagatctcatgtttgggtgagcttcttaaagatgcagatcacccactttggaatactttgaaaaagttaggttgttctcaaaaaacttgcaaagcaatggcaaaacaactagctgatattactctcacgactatcaatgtcacactcgcaccaaattacctgactcaaatatctctccccgatagtgatacatcctacatttcactctctcctgttgcatcgctatcgatgcaaagccactttcatcagaggctccaagatgaaaatcggcatagcgcgataacgcggtttagccgaactaccaacatgggggtcactgcgatgacatgtggcggcgcatttagaatgttaaagtctggcgctaagttttccagcccccctcatcaccgattaaacagtaaacgaagttggttgacgtcagagcatgttcagtcattaaaacagtaccagcgcctcaacaaaagcctcatacctgaaaactctcggattgcactccgtagaaaatacaaaatcgagcttcaaaatatggtcagatcttggtttgcaatgcaagaccatacccttgattcgaacatacttatccaacatttgaatcatgacctatcttacttaggagccacaaaacgttttgcatacgatccagcgatgaccaagctctttactgagcttttgaaacgagagttatcaaattcaatcaataatggtgagcaacacactaatggatcgtttttagtcctaccgaatatcagggtttgtggcgcaacagctttaagctccccggtaacggtggggattccatcacttacagctttctttggcttcgttcacgcatttgaacggaatataaatcgcaccacctcatcgtttcgtgttgaatcctttgcgatatgcgtccatcaactacatgtcgagaagcgaggtttgacagcagagtttgtggaaaaaggcgacgggactatatccgctcccgcgacccgggatgactggcagtgtgatgtcgtatttagccttattttgaacaccaactttgctcaacatattgaccaagatacgttagttacatcactaccaaagcgattggctcggggttcagcaaaaattgcgattgatgactttaaacatatcaactcattctcgacattagaaacagcgatcgaatctctgccaatagaagctggtaggtggttatcactttacgcacagtcaaacaataatctaagtgatctattagcagccatgacagaggaccatcagctcatggcaagctgcgtcggttaccacttgttagaagagcccaaagataaaccaaactccctcagaggttacaaacacgctatcgccgagtgcatcattggactcattaactcaatcacctttagctcagagactgatcccaacacaatcttttggtcgctaaagaactatcaaaactacctagtggtacagccaaggagtatcaacgatgaaactaccgacaaatctagcctatgagcgctctatcgacccatcagatgtctgtttttttgtcgtctggcccgatgatagaaaaacacctttaacctacaattctcgtactctgctcgggcaaatggaagcggcatcattagcctatgatgtctcaggtcaaccaataaaaagtgccaccgctgaggcgttagctcaagggaaccctcatcaagttgatttctgccacgttccatacggtgcgagtcatattgaatgcagtttctccgtctcgttttcttctgaactacgtcaaccatataagtgtaactcaagcaaagttaaacaaacgctagtgcaattagtcgagctctacgaaacgaaaatcggctggactgagctagcaacccgatatttgatgaacatttgcaacggtaaatggctgtggaaaaatacccgtaaagcctattgctggaacattgtacttacaccttggccttggaacggggaaaaggttggatttgaagatattcgtactaactacacctcacggcaagactttaaaaataataaaaattggtctgctatagttgaaatgatcaaaaccgcattttctagtactgatgggctggcgatatttgaagtcagggccaccttgcacttgccaacgaatgctatggtgcggccaagccaagttttcacagaaaaagaaagtggcagtaaaagtaaatctaaaactcaaaacagtcgagtttttcagagtacaactattgatggtgaacgatcgccaatactaggggcctttaaaacgggagcagctattgcaaccattgacgactggtatcctgaagccactgagccactaagggtcggacggtttggggttcatcgcgaagatgtcacttgctaccgtcatccgtctaccggaaaagattttttctcgatattacaacaagcagagcactatattgaagtgttgagcgccaacaaaactcccgctcaagaaactatcaacgacatgcactttttaatggctaacctgattaagggtgggatgttccagcataaaggagactgactgtgaaatggtattataagacaatcacctttctgccagagttgtgcaacaacgagtcactggctgcaaagtgtctccgcgttctgcatggatttaactatcagtatgagacacgaaatatcggcgtttcatttccgctttggtgtgatgcaacggttggaaaaaagatttcatttgtcagcaagaacaagatagaactcgacttactacttaaacaacactatttcgtccaaatggaacaacttcaatactttcatatatccaacactgttctcgtcccagaagattgtacatacgtttcctttagacgctgtcaatctatagataagctcacagcagcagggctggcaaggaaaatcagacgcctggagaaacgtgctctatctagaggcgagcaatttgacccatcatcttttgctcaaaaagagcatactgcaatagcgcactaccactcacttggggagtccagcaaacagacgaaccgcaactttcgactcaatatcaggatgctctcggagcaaccccgtgaggggaactcgatttttagtagctatggcttatcaaattcagaaaactcgtttcagcctgtacccttaatctgacctaggctgctgccaccgctgagcaataactagcataaccccttggggcctctaaacgggtcttgaggggttttttgctgaaacctcaggcatttgagaagcacacggtcacactgcttccggtagtcaataaaccggtaaaccagcaatagacataagcggctatttaacgaccctgccctgaaccgacgaccgggtcatcgtggccggatcttgcggcccctcggcttgaacgaattgttagacattatttgccgactaccttggtgatctcgcctttcacgtagtggacaaattcttccaactgatctgcgcgcgaggccaagcgatcttcttcttgtccaagataagcctgtctagcttcaagtatgacgggctgatactgggccggcaggcgctccattgcccagtcggcagcgacatccttcggcgcgattttgccggttactgcgctgtaccaaatgcgggacaacgtaagcactacatttcgctcatcgccagcccagtcgggcggcgagttccatagcgttaaggtttcatttagcgcctcaaatagatcctgttcaggaaccggatcaaagagttcctccgccgctggacctaccaaggcaacgctatgttctcttgcttttgtcagcaagatagccagatcaatgtcgatcgtggctggctcgaagatacctgcaagaatgtcattgcgctgccattctccaaattgcagttcgcgcttagctggataacgccacggaatgatgtcgtcgtgcacaacaatggtgacttctacagcgcggagaatctcgctctctccaggggaagccgaagtttccaaaaggtcgttgatcaaagctcgccgcgttgtttcatcaagccttacggtcaccgtaaccagcaaatcaatatcactgtgtggcttcaggccgccatccactgcggagccgtacaaatgtacggccagcaacgtcggttcgagatggcgctcgatgacgccaactacctctgatagttgagtcgatacttcggcgatcaccgcttccctcatactcttcctttttcaatattattgaagcatttatcagggttattgtctcatgagcggatacatatttgaatgtatttagaaaaataaacaaatagctagctcactcggtcgctacgctccgggcgtgagactgcggcgggcgctgcggacacatacaaagttacccacagattccgtggataagcaggggactaacatgtgaggcaaaacagcagggccgcgccggtggcgtttttccataggctccgccctcctgccagagttcacataaacagacgcttttccggtgcatctgtgggagccgtgaggctcaaccatgaatctgacagtacgggcgaaacccgacaggacttaaagatccccaccgtttccggcgggtcgctccctcttgcgctctcctgttccgaccctgccgtttaccggatacctgttccgcctttctcccttacgggaagtgtggcgctttctcatagctcacacactggtatctcggctcggtgtaggtcgttcgctccaagctgggctgtaagcaagaactccccgttcagcccgactgctgcgccttatccggtaactgttcacttgagtccaacccggaaaagcacggtaaaacgccactggcagcagccattggtaactgggagttcgcagaggatttgtttagctaaacacgcggttgctcttgaagtgtgcgccaaagtccggctacactggaaggacagatttggttgctgtgctctgcgaaagccagttaccacggttaagcagttccccaactgacttaaccttcgatcaaaccacctccccaggtggttttttcgtttacagggcaaaagattacgcgcagaaaaaaaggatctcaagaagatcctttgatcttttctactgaaccgctctagatttcagtgcaatttatctcttcaaatgtagcacctgaagtcagccccatacgatataagttgtaattctcatgttagtcatgccccgcgcccaccggaaggagctgactgggttgaaggctctcaagggcatcggtcgagatcccggtgcctaatgagtgagctaacttacattaattgcgttgcgctcactgcccgctttccagtcgggaaacctgtcgtgccagctgcattaatgaatcggccaacgcgcggggagaggcggtttgcgtattgggcgccagggtggtttttcttttcaccagtgagacgggcaacagctgattgcccttcaccgcctggccctgagagagttgcagcaagcggtccacgctggtttgccccagcaggcgaaaatcctgtttgatggtggttaacggcgggatataacatgagctgtcttcggtatcgtcgtatcccactaccgagatgtccgcaccaacgcgcagcccggactcggtaatggcgcgcattgcgcccagcgccatctgatcgttggcaaccagcatcgcagtgggaacgatgccctcattcagcatttgcatggtttgttgaaaaccggacatggcactccagtcgccttcccgttccgctatcggctgaatttgattgcgagtgagatatttatgccagccagccagacgcagacgcgccgagacagaacttaatgggcccgctaacagcgcgatttgctggtgacccaatgcgaccagatgctccacgcccagtcgcgtaccgtcttcatgggagaaaataatactgttgatgggtgtctggtcagagacatcaagaaataacgccggaacattagtgcaggcagcttccacagcaatggcatcctggtcatccagcggatagttaatgatcagcccactgacgcgttgcgcgagaagattgtgcaccgccgctttacaggcttcgacgccgcttcgttctaccatcgacaccaccacgctggcacccagttgatcggcgcgagatttaatcgccgcgacaatttgcgacggcgcgtgcagggccagactggaggtggcaacgccaatcagcaacgactgtttgcccgccagttgttgtgccacgcggttgggaatgtaattcagctccgccatcgccgcttccactttttcccgcgttttcgcagaaacgtggctggcctggttcaccacgcgggaaacggtctgataagagacaccggcatactctgcgacatcgtataacgttactggtttcac

SEQ ID NO: 132 - DNA, 8445 bp, Synthetic construct
  source 1..8445: mol_type = other DNA
attcaccaccctgaattgactctcttccgggcgctatcatgccataccgcgaaaggttttgcgccattcgatggtgtccgggatctcgacgctctcccttatgcgactcctgcattaggaaattaatacgactcactataggggaattgtgagcggataacaattcccctgtagaaataattttgtttaactttaataaggagatataccatgggtgaactgccgagtaggtagctgataactcttgctgagattgataaggtaattaaccttagtgaactgccgagtaggtagctgataacggatccgaattcgagctcggcgcgcctgcaggtcgacaagcttgcggccgcataatgcttaagtcgaacagaaagtaatcgtattgtacacggccgcataatcgaaattaatacgactcactataggggaattgtgagcggataacaattccccatcttagtatattagttaagtataagaaggagatatacatatgtttttgcaaagacctaaaccttacagcgatgaaagtttagaaagtttctttatccgagtggctaacaaaaatggctacggtgatgtccatcgcttcctagaagccactaaacgattccttcaagacattgaccataatggctatcaaacctttccgactgatataactcggataaacccatactcagctaaaaacagttccagcgcacgaactgcgtcattcctgaaacttgcacaattgacatttaatgaaccgccagagctacttgggttggcaattaacagaacaaacatgaaatactcgccgtcaactagcgcggttgttagaggtgcagaagtctttcctcgcagtttactacggacgcactccatcccctgctgtcctttgtgtctgcgagaaaatggctacgcctcctacctttggcactttcaggggtacgaatactgccacagccataacgtacctttaattaccacttgtagctgtggtaaggagtttgactaccgagtatctgggttaaagggcatttgctgcaaatgcaaggagcctatcaccttaaccagcagggagaacggtcatgaggcagcgtgtactgtttcaaactggcttgctggccatgaatctaaacctctgccaaatcttcctaaaagctaccgatggggtttagttcattggtggatgggtattaaagatagcgagttcgatcacttttcgttcgttcaatttttctcaaactggccaaggtcattccactcgataatcgaagatgaagtagagttcaaccttgagcatgctgttgtcagcacgtctgaattacgactaaaagatcttcttggtcgattgtttttcggttcaattcggttacctgagcggaatcttcaacacaatatcatccttggtgagcttctctgctatttagaaaatcgtttatggcaagacaagggattaatcgccaacctcaaaatgaacgcgttagaggcgactgtaatgttaaattgtagcctcgatcagattgcatcaatggttgaacaacgcatcttgaagccaaatcgaaaaagcaagcccaacagccctcttgatgttaccgattatctatttcatttcggcgatattttctgtctttggttagctgagttccaaagcgatgagtttaaccgttcgttttatgtgtcgaggtggtaaatgcaaactctgaaagaactaatcgcatccaatcctgacgacttaacaactgaacttaagagagcatttcgtccactcacaccgcatattgcaattgatggtaatgaacttgacgcactgacgatattagtcaatttaaccgataagactgatgatcagaaagacctgctcgatcgagccaaatgcaagcaaaaacttcgagatgaaaaatggtgggctagctgcataaattgcgttaattacagacaaagccataacccaaaattcccggatatacgttctgaaggcgtgattcgaacccaagccctgggtgaattaccgagtttcctactctcgtcctcaaaaatcccaccataccattggtcatatagccatgattcaaaatacgtcaacaaaagcgcattcctcaccaatgagttttgttgggatggtgagatctcatgtttgggtgagcttcttaaagatgcagatcacccactttggaatactttgaaaaagttaggttgttctcaaaaaacttgcaaagcaatggcaaaacaactagctgatattactctcacgactatcaatgtcacactcgcaccaaattacctgactcaaatatctctccccgatagtgatacatcctacatttcactctctcctgttgcatcgctatcgatgcaaagccactttcatcagaggctccaagatgaaaatcggcatagcgcgataacgcggtttagccgaactaccaacatgggggtcactgcgatgacatgtggcggcgcatttagaatgttaaagtctggcgctaagttttccagcccccctcatcaccgattaaacagtaaacgaagttggttgacgtcagagcatgttcagtcattaaaacagtaccagcgcctcaacaaaagcctcatacctgaaaactctcggattgcactccgtagaaaatacaaaatcgagcttcaaaatatggtcagatcttggtttgcaatgcaagaccatacccttgattcgaacatacttatccaacatttgaatcatgacctatcttacttaggagccacaaaacgttttgcatacgatccagcgatgaccaagctctttactgagcttttgaaacgagagttatcaaattcaatcaataatggtgagcaacacactaatggatcgtttttagtcctaccgaatatcagggtttgtggcgcaacagctttaagctccccggtaacggtggggattccatcacttacagctttctttggcttcgttcacgcatttgaacggaatataaatcgcaccacctcatcgtttcgtgttgaatcctttgcgatatgcgtccatcaactacatgtcgagaagcgaggtttgacagcagagtttgtggaaaaaggcgacgggactatatccgctcccgcgacccgggatgactggcagtgtgatgtcgtatttagccttattttgaacaccaactttgctcaacatattgaccaagatacgttagttacatcactaccaaagcgattggctcggggttcagcaaaaattgcgattgatgactttaaacatatcaactcattctcgacattagaaacagcgatcgaatctctgccaatagaagctggtaggtggttatcactttacgcacagtcaaacaataatctaagtgatctattagcagccatgacagaggaccatcagctcatggcaagctgcgtcggttaccacttgttagaagagcccaaagataaaccaaactccctcagaggttacaaacacgctatcgccgagtgcatcattggactcattaactcaatcacctttagctcagagactgatcccaacacaatcttttggtcgctaaagaactatcaaaactacctagtggtacagccaaggagtatcaacgatgaaactaccgacaaatctagcctatgagcgctctatcgacccatcagatgtctgtttttttgtcgtctggcccgatgatagaaaaacacctttaacctacaattctcgtactctgctcgggcaaatggaagcggcatcattagcctatgatgtctcaggtcaaccaataaaaagtgccaccgctgaggcgttagctcaagggaaccctcatcaagttgatttctgccacgttccatacggtgcgagtcatattgaatgcagtttctccgtctcgttttcttctgaactacgtcaaccatataagtgtaactcaagcaaagttaaacaaacgctagtgcaattagtcgagctctacgaaacgaaaatcggctggactgagctagcaacccgatatttgatgaacatttgcaacggtaaatggctgtggaaaaatacccgtaaagcctattgctggaacattgtacttacaccttggccttggaacggggaaaaggttggatttgaagatattcgtactaactacacctcacggcaagactttaaaaataataaaaattggtctgctatagttgaaatgatcaaaaccgcattttctagtactgatgggctggcgatatttgaagtcagggccaccttgcacttgccaacgaatgctatggtgcggccaagccaagttttcacagaaaaagaaagtggcagtaaaagtaaatctaaaactcaaaacagtcgagtttttcagagtacaactattgatggtgaacgatcgccaatactaggggcctttaaaacgggagcagctattgcaaccattgacgactggtatcctgaagccactgagccactaagggtcggacggtttggggttcatcgcgaagatgtcacttgctaccgtcatccgtctaccggaaaagattttttctcgatattacaacaagcagagcactatattgaagtgttgagcgccaacaaaactcccgctcaagaaactatcaacgacatgcactttttaatggctaacctgattaagggtgggatgttccagcataaaggagactgactgtgaaatggtattataagacaatcacctttctgccagagttgtgcaacaacgagtcactggctgcaaagtgtctccgcgttctgcatggatttaactatcagtatgagacacgaaatatcggcgtttcatttccgctttggtgtgatgcaacggttggaaaaaagatttcatttgtcagcaagaacaagatagaactcgacttactacttaaacaacactatttcgtccaaatggaacaacttcaatactttcatatatccaacactgttctcgtcccagaagattgtacatacgtttcctttagacgctgtcaatctatagataagctcacagcagcagggctggcaaggaaaatcagacgcctggagaaacgtgctctatctagaggcgagcaatttgacccatcatcttttgctcaaaaagagcatactgcaatagcgcactaccactcacttggggagtccagcaaacagacgaaccgcaactttcgactcaatatcaggatgctctcggagcaaccccgtgaggggaactcgatttttagtagctatggcttatcaaattcagaaaactcgtttcagcctgtacccttaatctgacctaggctgctgccaccgctgagcaataactagcataaccccttggggcctctaaacgggtcttgaggggttttttgctgaaacctcaggcatttgagaagcacacggtcacactgcttccggtagtcaataaaccggtaaaccagcaatagacataagcggctatttaacgaccctgccctgaaccgacgaccgggtcatcgtggccggatcttgcggcccctcggcttgaacgaattgttagacattatttgccgactaccttggtgatctcgcctttcacgtagtggacaaattcttccaactgatctgcgcgcgaggccaagcgatcttcttcttgtccaagataagcctgtctagcttcaagtatgacgggctgatactgggccggcaggcgctccattgcccagtcggcagcgacatccttcggcgcgattttgccggttactgcgctgtaccaaatgcgggacaacgtaagcactacatttcgctcatcgccagcccagtcgggcggcgagttccatagcgttaaggtttcatttagcgcctcaaatagatcctgttcaggaaccggatcaaagagttcctccgccgctggacctaccaaggcaacgctatgttctcttgcttttgtcagcaagatagccagatcaatgtcgatcgtggctggctcgaagatacctgcaagaatgtcattgcgctgccattctccaaattgcagttcgcgcttagctggataacgccacggaatgatgtcgtcgtgcacaacaatggtgacttctacagcgcggagaatctcgctctctccaggggaagccgaagtttccaaaaggtcgttgatcaaagctcgccgcgttgtttcatcaagccttacggtcaccgtaaccagcaaatcaatatcactgtgtggcttcaggccgccatccactgcggagccgtacaaatgtacggccagcaacgtcggttcgagatggcgctcgatgacgccaactacctctgatagttgagtcgatacttcggcgatcaccgcttccctcatactcttcctttttcaatattattgaagcatttatcagggttattgtctcatgagcggatacatatttgaatgtatttagaaaaataaacaaatagctagctcactcggtcgctacgctccgggcgtgagactgcggcgggcgctgcggacacatacaaagttacccacagattccgtggataagcaggggactaacatgtgaggcaaaacagcagggccgcgccggtggcgtttttccataggctccgccctcctgccagagttcacataaacagacgcttttccggtgcatctgtgggagccgtgaggctcaaccatgaatctgacagtacgggcgaaacccgacaggacttaaagatccccaccgtttccggcgggtcgctccctcttgcgctctcctgttccgaccctgccgtttaccggatacctgttccgcctttctcccttacgggaagtgtggcgctttctcatagctcacacactggtatctcggctcggtgtaggtcgttcgctccaagctgggctgtaagcaagaactccccgttcagcccgactgctgcgccttatccggtaactgttcacttgagtccaacccggaaaagcacggtaaaacgccactggcagcagccattggtaactgggagttcgcagaggatttgtttagctaaacacgcggttgctcttgaagtgtgcgccaaagtccggctacactggaaggacagatttggttgctgtgctctgcgaaagccagttaccacggttaagcagttccccaactgacttaaccttcgatcaaaccacctccccaggtggttttttcgtttacagggcaaaagattacgcgcagaaaaaaaggatctcaagaagatcctttgatcttttctactgaaccgctctagatttcagtgcaatttatctcttcaaatgtagcacctgaagtcagccccatacgatataagttgtaattctcatgttagtcatgccccgcgcccaccggaaggagctgactgggttgaaggctctcaagggcatcggtcgagatcccggtgcctaatgagtgagctaacttacattaattgcgttgcgctcactgcccgctttccagtcgggaaacctgtcgtgccagctgcattaatgaatcggccaacgcgcggggagaggcggtttgcgtattgggcgccagggtggtttttcttttcaccagtgagacgggcaacagctgattgcccttcaccgcctggccctgagagagttgcagcaagcggtccacgctggtttgccccagcaggcgaaaatcctgtttgatggtggttaacggcgggatataacatgagctgtcttcggtatcgtcgtatcccactaccgagatgtccgcaccaacgcgcagcccggactcggtaatggcgcgcattgcgcccagcgccatctgatcgttggcaaccagcatcgcagtgggaacgatgccctcattcagcatttgcatggtttgttgaaaaccggacatggcactccagtcgccttcccgttccgctatcggctgaatttgattgcgagtgagatatttatgccagccagccagacgcagacgcgccgagacagaacttaatgggcccgctaacagcgcgatttgctggtgacccaatgcgaccagatgctccacgcccagtcgcgtaccgtcttcatgggagaaaataatactgttgatgggtgtctggtcagagacatcaagaaataacgccggaacattagtgcaggcagcttccacagcaatggcatcctggtcatccagcggatagttaatgatcagcccactgacgcgttgcgcgagaagattgtgcaccgccgctttacaggcttcgacgccgcttcgttctaccatcgacaccaccacgctggcacccagttgatcggcgcgagatttaatcgccgcgacaatttgcgacggcgcgtgcagggccagactggaggtggcaacgccaatcagcaacgactgtttgcccgccagttgttgtgccacgcggttgggaatgtaattcagctccgccatcgccgcttccactttttcccgcgttttcgcagaaacgtggctggcctggttcaccacgcgggaaacggtctgataagagacaccggcatactctgcgacatcgtataacgttactggtttcac

SEQ ID NO: 133 - DNA, 8445 bp, Synthetic construct
  source 1..8445: mol_type = other DNA
attcaccaccctgaattgactctcttccgggcgctatcatgccataccgcgaaaggttttgcgccattcgatggtgtccgggatctcgacgctctcccttatgcgactcctgcattaggaaattaatacgactcactataggggaattgtgagcggataacaattcccctgtagaaataattttgtttaactttaataaggagatataccatgggtgaactgccgagtaggtagctgataacgactgcaagtgagtcggcttttttgttgctaagtgaactgccgagtaggtagctgataacggatccgaattcgagctcggcgcgcctgcaggtcgacaagcttgcggccgcataatgcttaagtcgaacagaaagtaatcgtattgtacacggccgcataatcgaaattaatacgactcactataggggaattgtgagcggataacaattccccatcttagtatattagttaagtataagaaggagatatacatatgtttttgcaaagacctaaaccttacagcgatgaaagtttagaaagtttctttatccgagtggctaacaaaaatggctacggtgatgtccatcgcttcctagaagccactaaacgattccttcaagacattgaccataatggctatcaaacctttccgactgatataactcggataaacccatactcagctaaaaacagttccagcgcacgaactgcgtcattcctgaaacttgcacaattgacatttaatgaaccgccagagctacttgggttggcaattaacagaacaaacatgaaatactcgccgtcaactagcgcggttgttagaggtgcagaagtctttcctcgcagtttactacggacgcactccatcccctgctgtcctttgtgtctgcgagaaaatggctacgcctcctacctttggcactttcaggggtacgaatactgccacagccataacgtacctttaattaccacttgtagctgtggtaaggagtttgactaccgagtatctgggttaaagggcatttgctgcaaatgcaaggagcctatcaccttaaccagcagggagaacggtcatgaggcagcgtgtactgtttcaaactggcttgctggccatgaatctaaacctctgccaaatcttcctaaaagctaccgatggggtttagttcattggtggatgggtattaaagatagcgagttcgatcacttttcgttcgttcaatttttctcaaactggccaaggtcattccactcgataatcgaagatgaagtagagttcaaccttgagcatgctgttgtcagcacgtctgaattacgactaaaagatcttcttggtcgattgtttttcggttcaattcggttacctgagcggaatcttcaacacaatatcatccttggtgagcttctctgctatttagaaaatcgtttatggcaagacaagggattaatcgccaacctcaaaatgaacgcgttagaggcgactgtaatgttaaattgtagcctcgatcagattgcatcaatggttgaacaacgcatcttgaagccaaatcgaaaaagcaagcccaacagccctcttgatgttaccgattatctatttcatttcggcgatattttctgtctttggttagctgagttccaaagcgatgagtttaaccgttcgttttatgtgtcgaggtggtaaatgcaaactctgaaagaactaatcgcatccaatcctgacgacttaacaactgaacttaagagagcatttcgtccactcacaccgcatattgcaattgatggtaatgaacttgacgcactgacgatattagtcaatttaaccgataagactgatgatcagaaagacctgctcgatcgagccaaatgcaagcaaaaacttcgagatgaaaaatggtgggctagctgcataaattgcgttaattacagacaaagccataacccaaaattcccggatatacgttctgaaggcgtgattcgaacccaagccctgggtgaattaccgagtttcctactctcgtcctcaaaaatcccaccataccattggtcatatagccatgattcaaaatacgtcaacaaaagcgcattcctcaccaatgagttttgttgggatggtgagatctcatgtttgggtgagcttcttaaagatgcagatcacccactttggaatactttgaaaaagttaggttgttctcaaaaaacttgcaaagcaatggcaaaacaactagctgatattactctcacgactatcaatgtcacactcgcaccaaattacctgactcaaatatctctccccgatagtgatacatcctacatttcactctctcctgttgcatcgctatcgatgcaaagccactttcatcagaggctccaagatgaaaatcggcatagcgcgataacgcggtttagccgaactaccaacatgggggtcactgcgatgacatgtggcggcgcatttagaatgttaaagtctggcgctaagttttccagcccccctcatcaccgattaaacagtaaacgaagttggttgacgtcagagcatgttcagtcattaaaacagtaccagcgcctcaacaaaagcctcatacctgaaaactctcggattgcactccgtagaaaatacaaaatcgagcttcaaaatatggtcagatcttggtttgcaatgcaagaccatacccttgattcgaacatacttatccaacatttgaatcatgacctatcttacttaggagccacaaaacgttttgcatacgatccagcgatgaccaagctctttactgagcttttgaaacgagagttatcaaattcaatcaataatggtgagcaacacactaatggatcgtttttagtcctaccgaatatcagggtttgtggcgcaacagctttaagctccccggtaacggtggggattccatcacttacagctttctttggcttcgttcacgcatttgaacggaatataaatcgcaccacctcatcgtttcgtgttgaatcctttgcgatatgcgtccatcaactacatgtcgagaagcgaggtttgacagcagagtttgtggaaaaaggcgacgggactatatccgctcccgcgacccgggatgactggcagtgtgatgtcgtatttagccttattttgaacaccaactttgctcaacatattgaccaagatacgttagttacatcactaccaaagcgattggctcggggttcagcaaaaattgcgattgatgactttaaacatatcaactcattctcgacattagaaacagcgatcgaatctctgccaatagaagctggtaggtggttatcactttacgcacagtcaaacaataatctaagtgatctattagcagccatgacagaggaccatcagctcatggcaagctgcgtcggttaccacttgttagaagagcccaaagataaaccaaactccctcagaggttacaaacacgctatcgccgagtgcatcattggactcattaactcaatcacctttagctcagagactgatcccaacacaatcttttggtcgctaaagaactatcaaaactacctagtggtacagccaaggagtatcaacgatgaaactaccgacaaatctagcctatgagcgctctatcgacccatcagatgtctgtttttttgtcgtctggcccgatgatagaaaaacacctttaacctacaattctcgtactctgctcgggcaaatggaagcggcatcattagcctatgatgtctcaggtcaaccaataaaaagtgccaccgctgaggcgttagctcaagggaaccctcatcaagttgatttctgccacgttccatacggtgcgagtcatattgaatgcagtttctccgtctcgttttcttctgaactacgtcaaccatataagtgtaactcaagcaaagttaaacaaacgctagtgcaattagtcgagctctacgaaacgaaaatcggctggactgagctagcaacccgatatttgatgaacatttgcaacggtaaatggctgtggaaaaatacccgtaaagcctattgctggaacattgtacttacaccttggccttggaacggggaaaaggttggatttgaagatattcgtactaactacacctcacggcaagactttaaaaataataaaaattggtctgctatagttgaaatgatcaaaaccgcattttctagtactgatgggctggcgatatttgaagtcagggccaccttgcacttgccaacgaatgctatggtgcggccaagccaagttttcacagaaaaagaaagtggcagtaaaagtaaatctaaaactcaaaacagtcgagtttttcagagtacaactattgatggtgaacgatcgccaatactaggggcctttaaaacgggagcagctattgcaaccattgacgactggtatcctgaagccactgagccactaagggtcggacggtttggggttcatcgcgaagatgtcacttgctaccgtcatccgtctaccggaaaagattttttctcgatattacaacaagcagagcactatattgaagtgttgagcgccaacaaaactcccgctcaagaaactatcaacgacatgcactttttaatggctaacctgattaagggtgggatgttccagcataaaggagactgactgtgaaatggtattataagacaatcacctttctgccagagttgtgcaacaacgagtcactggctgcaaagtgtctccgcgttctgcatggatttaactatcagtatgagacacgaaatatcggcgtttcatttccgctttggtgtgatgcaacggttggaaaaaagatttcatttgtcagcaagaacaagatagaactcgacttactacttaaacaacactatttcgtccaaatggaacaacttcaatactttcatatatccaacactgttctcgtcccagaagattgtacatacgtttcctttagacgctgtcaatctatagataagctcacagcagcagggctggcaaggaaaatcagacgcctggagaaacgtgctctatctagaggcgagcaatttgacccatcatcttttgctcaaaaagagcatactgcaatagcgcactaccactcacttggggagtccagcaaacagacgaaccgcaactttcgactcaatatcaggatgctctcggagcaaccccgtgaggggaactcgatttttagtagctatggcttatcaaattcagaaaactcgtttcagcctgtacccttaatctgacctaggctgctgccaccgctgagcaataactagcataaccccttggggcctctaaacgggtcttgaggggttttttgctgaaacctcaggcatttgagaagcacacggtcacactgcttccggtagtcaataaaccggtaaaccagcaatagacataagcggctatttaacgaccctgccctgaaccgacgaccgggtcatcgtggccggatcttgcggcccctcggcttgaacgaattgttagacattatttgccgactaccttggtgatctcgcctttcacgtagtggacaaattcttccaactgatctgcgcgcgaggccaagcgatcttcttcttgtccaagataagcctgtctagcttcaagtatgacgggctgatactgggccggcaggcgctccattgcccagtcggcagcgacatccttcggcgcgattttgccggttactgcgctgtaccaaatgcgggacaacgtaagcactacatttcgctcatcgccagcccagtcgggcggcgagttccatagcgttaaggtttcatttagcgcctcaaatagatcctgttcaggaaccggatcaaagagttcctccgccgctggacctaccaaggcaacgctatgttctcttgcttttgtcagcaagatagccagatcaatgtcgatcgtggctggctcgaagatacctgcaagaatgtcattgcgctgccattctccaaattgcagttcgcgcttagctggataacgccacggaatgatgtcgtcgtgcacaacaatggtgacttctacagcgcggagaatctcgctctctccaggggaagccgaagtttccaaaaggtcgttgatcaaagctcgccgcgttgtttcatcaagccttacggtcaccgtaaccagcaaatcaatatcactgtgtggcttcaggccgccatccactgcggagccgtacaaatgtacggccagcaacgtcggttcgagatggcgctcgatgacgccaactacctctgatagttgagtcgatacttcggcgatcaccgcttccctcatactcttcctttttcaatattattgaagcatttatcagggttattgtctcatgagcggatacatatttgaatgtatttagaaaaataaacaaatagctagctcactcggtcgctacgctccgggcgtgagactgcggcgggcgctgcggacacatacaaagttacccacagattccgtggataagcaggggactaacatgtgaggcaaaacagcagggccgcgccggtggcgtttttccataggctccgccctcctgccagagttcacataaacagacgcttttccggtgcatctgtgggagccgtgaggctcaaccatgaatctgacagtacgggcgaaacccgacaggacttaaagatccccaccgtttccggcgggtcgctccctcttgcgctctcctgttccgaccctgccgtttaccggatacctgttccgcctttctcccttacgggaagtgtggcgctttctcatagctcacacactggtatctcggctcggtgtaggtcgttcgctccaagctgggctgtaagcaagaactccccgttcagcccgactgctgcgccttatccggtaactgttcacttgagtccaacccggaaaagcacggtaaaacgccactggcagcagccattggtaactgggagttcgcagaggatttgtttagctaaacacgcggttgctcttgaagtgtgcgccaaagtccggctacactggaaggacagatttggttgctgtgctctgcgaaagccagttaccacggttaagcagttccccaactgacttaaccttcgatcaaaccacctccccaggtggttttttcgtttacagggcaaaagattacgcgcagaaaaaaaggatctcaagaagatcctttgatcttttctactgaaccgctctagatttcagtgcaatttatctcttcaaatgtagcacctgaagtcagccccatacgatataagttgtaattctcatgttagtcatgccccgcgcccaccggaaggagctgactgggttgaaggctctcaagggcatcggtcgagatcccggtgcctaatgagtgagctaacttacattaattgcgttgcgctcactgcccgctttccagtcgggaaacctgtcgtgccagctgcattaatgaatcggccaacgcgcggggagaggcggtttgcgtattgggcgccagggtggtttttcttttcaccagtgagacgggcaacagctgattgcccttcaccgcctggccctgagagagttgcagcaagcggtccacgctggtttgccccagcaggcgaaaatcctgtttgatggtggttaacggcgggatataacatgagctgtcttcggtatcgtcgtatcccactaccgagatgtccgcaccaacgcgcagcccggactcggtaatggcgcgcattgcgcccagcgccatctgatcgttggcaaccagcatcgcagtgggaacgatgccctcattcagcatttgcatggtttgttgaaaaccggacatggcactccagtcgccttcccgttccgctatcggctgaatttgattgcgagtgagatatttatgccagccagccagacgcagacgcgccgagacagaacttaatgggcccgctaacagcgcgatttgctggtgacccaatgcgaccagatgctccacgcccagtcgcgtaccgtcttcatgggagaaaataatactgttgatgggtgtctggtcagagacatcaagaaataacgccggaacattagtgcaggcagcttccacagcaatggcatcctggtcatccagcggatagttaatgatcagcccactgacgcgttgcgcgagaagattgtgcaccgccgctttacaggcttcgacgccgcttcgttctaccatcgacaccaccacgctggcacccagttgatcggcgcgagatttaatcgccgcgacaatttgcgacggcgcgtgcagggccagactggaggtggcaacgccaatcagcaacgactgtttgcccgccagttgttgtgccacgcggttgggaatgtaattcagctccgccatcgccgcttccactttttcccgcgttttcgcagaaacgtggctggcctggttcaccacgcgggaaacggtctgataagagacaccggcatactctgcgacatcgtataacgttactggtttcac

SEQ ID NO: 134 - DNA, 8445 bp, Synthetic construct
  source 1..8445: mol_type = other DNA
attcaccaccctgaattgactctcttccgggcgctatcatgccataccgcgaaaggttttgcgccattcgatggtgtccgggatctcgacgctctcccttatgcgactcctgcattaggaaattaatacgactcactataggggaattgtgagcggataacaattcccctgtagaaataattttgtttaactttaataaggagatataccatgggtgaactgccgagtaggtagctgataacgcaaacaactgagaaatttttaattcgctctggtgaactgccgagtaggtagctgataacggatccgaattcgagctcggcgcgcctgcaggtcgacaagcttgcggccgcataatgcttaagtcgaacagaaagtaatcgtattgtacacggccgcataatcgaaattaatacgactcactataggggaattgtgagcggataacaattccccatcttagtatattagttaagtataagaaggagatatacatatgtttttgcaaagacctaaaccttacagcgatgaaagtttagaaagtttctttatccgagtggctaacaaaaatggctacggtgatgtccatcgcttcctagaagccactaaacgattccttcaagacattgaccataatggctatcaaacctttccgactgatataactcggataaacccatactcagctaaaaacagttccagcgcacgaactgcgtcattcctgaaacttgcacaattgacatttaatgaaccgccagagctacttgggttggcaattaacagaacaaacatgaaatactcgccgtcaactagcgcggttgttagaggtgcagaagtctttcctcgcagtttactacggacgcactccatcccctgctgtcctttgtgtctgcgagaaaatggctacgcctcctacctttggcactttcaggggtacgaatactgccacagccataacgtacctttaattaccacttgtagctgtggtaaggagtttgactaccgagtatctgggttaaagggcatttgctgcaaatgcaaggagcctatcaccttaaccagcagggagaacggtcatgaggcagcgtgtactgtttcaaactggcttgctggccatgaatctaaacctctgccaaatcttcctaaaagctaccgatggggtttagttcattggtggatgggtattaaagatagcgagttcgatcacttttcgttcgttcaatttttctcaaactggccaaggtcattccactcgataatcgaagatgaagtagagttcaaccttgagcatgctgttgtcagcacgtctgaattacgactaaaagatcttcttggtcgattgtttttcggttcaattcggttacctgagcggaatcttcaacacaatatcatccttggtgagcttctctgctatttagaaaatcgtttatggcaagacaagggattaatcgccaacctcaaaatgaacgcgttagaggcgactgtaatgttaaattgtagcctcgatcagattgcatcaatggttgaacaacgcatcttgaagccaaatcgaaaaagcaagcccaacagccctcttgatgttaccgattatctatttcatttcggcgatattttctgtctttggttagctgagttccaaagcgatgagtttaaccgttcgttttatgtgtcgaggtggtaaatgcaaactctgaaagaactaatcgcatccaatcctgacgacttaacaactgaacttaagagagcatttcgtccactcacaccgcatattgcaattgatggtaatgaacttgacgcactgacgatattagtcaatttaaccgataagactgatgatcagaaagacctgctcgatcgagccaaatgcaagcaaaaacttcgagatgaaaaatggtgggctagctgcataaattgcgttaattacagacaaagccataacccaaaattcccggatatacgttctgaaggcgtgattcgaacccaagccctgggtgaattaccgagtttcctactctcgtcctcaaaaatcccaccataccattggtcatatagccatgattcaaaatacgtcaacaaaagcgcattcctcaccaatgagttttgttgggatggtgagatctcatgtttgggtgagcttcttaaagatgcagatcacccactttggaatactttgaaaaagttaggttgttctcaaaaaacttgcaaagcaatggcaaaacaactagctgatattactctcacgactatcaatgtcacactcgcaccaaattacctgactcaaatatctctccccgatagtgatacatcctacatttcactctctcctgttgcatcgctatcgatgcaaagccactttcatcagaggctccaagatgaaaatcggcatagcgcgataacgcggtttagccgaactaccaacatgggggtcactgcgatgacatgtggcggcgcatttagaatgttaaagtctggcgctaagttttccagcccccctcatcaccgattaaacagtaaacgaagttggttgacgtcagagcatgttcagtcattaaaacagtaccagcgcctcaacaaaagcctcatacctgaaaactctcggattgcactccgtagaaaatacaaaatcgagcttcaaaatatggtcagatcttggtttgcaatgcaagaccatacccttgattcgaacatacttatccaacatttgaatcatgacctatcttacttaggagccacaaaacgttttgcatacgatccagcgatgaccaagctctttactgagcttttgaaacgagagttatcaaattcaatcaataatggtgagcaacacactaatggatcgtttttagtcctaccgaatatcagggtttgtggcgcaacagctttaagctccccggtaacggtggggattccatcacttacagctttctttggcttcgttcacgcatttgaacggaatataaatcgcaccacctcatcgtttcgtgttgaatcctttgcgatatgcgtccatcaactacatgtcgagaagcgaggtttgacagcagagtttgtggaaaaaggcgacgggactatatccgctcccgcgacccgggatgactggcagtgtgatgtcgtatttagccttattttgaacaccaactttgctcaacatattgaccaagatacgttagttacatcactaccaaagcgattggctcggggttcagcaaaaattgcgattgatgactttaaacatatcaactcattctcgacattagaaacagcgatcgaatctctgccaatagaagctggtaggtggttatcactttacgcacagtcaaacaataatctaagtgatctattagcagccatgacagaggaccatcagctcatggcaagctgcgtcggttaccacttgttagaagagcccaaagataaaccaaactccctcagaggttacaaacacgctatcgccgagtgcatcattggactcattaactcaatcacctttagctcagagactgatcccaacacaatcttttggtcgctaaagaactatcaaaactacctagtggtacagccaaggagtatcaacgatgaaactaccgacaaatctagcctatgagcgctctatcgacccatcagatgtctgtttttttgtcgtctggcccgatgatagaaaaacacctttaacctacaattctcgtactctgctcgggcaaatggaagcggcatcattagcctatgatgtctcaggtcaaccaataaaaagtgccaccgctgaggcgttagctcaagggaaccctcatcaagttgatttctgccacgttccatacggtgcgagtcatattgaatgcagtttctccgtctcgttttcttctgaactacgtcaaccatataagtgtaactcaagcaaagttaaacaaacgctagtgcaattagtcgagctctacgaaacgaaaatcggctggactgagctagcaacccgatatttgatgaacatttgcaacggtaaatggctgtggaaaaatacccgtaaagcctattgctggaacattgtacttacaccttggccttggaacggggaaaaggttggatttgaagatattcgtactaactacacctcacggcaagactttaaaaataataaaaattggtctgctatagttgaaatgatcaaaaccgcattttctagtactgatgggctggcgatatttgaagtcagggccaccttgcacttgccaacgaatgctatggtgcggccaagccaagttttcacagaaaaagaaagtggcagtaaaagtaaatctaaaactcaaaacagtcgagtttttcagagtacaactattgatggtgaacgatcgccaatactaggggcctttaaaacgggagcagctattgcaaccattgacgactggtatcctgaagccactgagccactaagggtcggacggtttggggttcatcgcgaagatgtcacttgctaccgtcatccgtctaccggaaaagattttttctcgatattacaacaagcagagcactatattgaagtgttgagcgccaacaaaactcccgctcaagaaactatcaacgacatgcactttttaatggctaacctgattaagggtgggatgttccagcataaaggagactgactgtgaaatggtattataagacaatcacctttctgccagagttgtgcaacaacgagtcactggctgcaaagtgtctccgcgttctgcatggatttaactatcagtatgagacacgaaatatcggcgtttcatttccgctttggtgtgatgcaacggttggaaaaaagatttcatttgtcagcaagaacaagatagaactcgacttactacttaaacaacactatttcgtccaaatggaacaacttcaatactttcatatatccaacactgttctcgtcccagaagattgtacatacgtttcctttagacgctgtcaatctatagataagctcacagcagcagggctggcaaggaaaatcagacgcctggagaaacgtgctctatctagaggcgagcaatttgacccatcatcttttgctcaaaaagagcatactgcaatagcgcactaccactcacttggggagtccagcaaacagacgaaccgcaactttcgactcaatatcaggatgctctcggagcaaccccgtgaggggaactcgatttttagtagctatggcttatcaaattcagaaaactcgtttcagcctgtacccttaatctgacctaggctgctgccaccgctgagcaataactagcataaccccttggggcctctaaacgggtcttgaggggttttttgctgaaacctcaggcatttgagaagcacacggtcacactgcttccggtagtcaataaaccggtaaaccagcaatagacataagcggctatttaacgaccctgccctgaaccgacgaccgggtcatcgtggccggatcttgcggcccctcggcttgaacgaattgttagacattatttgccgactaccttggtgatctcgcctttcacgtagtggacaaattcttccaactgatctgcgcgcgaggccaagcgatcttcttcttgtccaagataagcctgtctagcttcaagtatgacgggctgatactgggccggcaggcgctccattgcccagtcggcagcgacatccttcggcgcgattttgccggttactgcgctgtaccaaatgcgggacaacgtaagcactacatttcgctcatcgccagcccagtcgggcggcgagttccatagcgttaaggtttcatttagcgcctcaaatagatcctgttcaggaaccggatcaaagagttcctccgccgctggacctaccaaggcaacgctatgttctcttgcttttgtcagcaagatagccagatcaatgtcgatcgtggctggctcgaagatacctgcaagaatgtcattgcgctgccattctccaaattgcagttcgcgcttagctggataacgccacggaatgatgtcgtcgtgcacaacaatggtgacttctacagcgcggagaatctcgctctctccaggggaagccgaagtttccaaaaggtcgttgatcaaagctcgccgcgttgtttcatcaagccttacggtcaccgtaaccagcaaatcaatatcactgtgtggcttcaggccgccatccactgcggagccgtacaaatgtacggccagcaacgtcggttcgagatggcgctcgatgacgccaactacctctgatagttgagtcgatacttcggcgatcaccgcttccctcatactcttcctttttcaatattattgaagcatttatcagggttattgtctcatgagcggatacatatttgaatgtatttagaaaaataaacaaatagctagctcactcggtcgctacgctccgggcgtgagactgcggcgggcgctgcggacacatacaaagttacccacagattccgtggataagcaggggactaacatgtgaggcaaaacagcagggccgcgccggtggcgtttttccataggctccgccctcctgccagagttcacataaacagacgcttttccggtgcatctgtgggagccgtgaggctcaaccatgaatctgacagtacgggcgaaacccgacaggacttaaagatccccaccgtttccggcgggtcgctccctcttgcgctctcctgttccgaccctgccgtttaccggatacctgttccgcctttctcccttacgggaagtgtggcgctttctcatagctcacacactggtatctcggctcggtgtaggtcgttcgctccaagctgggctgtaagcaagaactccccgttcagcccgactgctgcgccttatccggtaactgttcacttgagtccaacccggaaaagcacggtaaaacgccactggcagcagccattggtaactgggagttcgcagaggatttgtttagctaaacacgcggttgctcttgaagtgtgcgccaaagtccggctacactggaaggacagatttggttgctgtgctctgcgaaagccagttaccacggttaagcagttccccaactgacttaaccttcgatcaaaccacctccccaggtggttttttcgtttacagggcaaaagattacgcgcagaaaaaaaggatctcaagaagatcctttgatcttttctactgaaccgctctagatttcagtgcaatttatctcttcaaatgtagcacctgaagtcagccccatacgatataagttgtaattctcatgttagtcatgccccgcgcccaccggaaggagctgactgggttgaaggctctcaagggcatcggtcgagatcccggtgcctaatgagtgagctaacttacattaattgcgttgcgctcactgcccgctttccagtcgggaaacctgtcgtgccagctgcattaatgaatcggccaacgcgcggggagaggcggtttgcgtattgggcgccagggtggtttttcttttcaccagtgagacgggcaacagctgattgcccttcaccgcctggccctgagagagttgcagcaagcggtccacgctggtttgccccagcaggcgaaaatcctgtttgatggtggttaacggcgggatataacatgagctgtcttcggtatcgtcgtatcccactaccgagatgtccgcaccaacgcgcagcccggactcggtaatggcgcgcattgcgcccagcgccatctgatcgttggcaaccagcatcgcagtgggaacgatgccctcattcagcatttgcatggtttgttgaaaaccggacatggcactccagtcgccttcccgttccgctatcggctgaatttgattgcgagtgagatatttatgccagccagccagacgcagacgcgccgagacagaacttaatgggcccgctaacagcgcgatttgctggtgacccaatgcgaccagatgctccacgcccagtcgcgtaccgtcttcatgggagaaaataatactgttgatgggtgtctggtcagagacatcaagaaataacgccggaacattagtgcaggcagcttccacagcaatggcatcctggtcatccagcggatagttaatgatcagcccactgacgcgttgcgcgagaagattgtgcaccgccgctttacaggcttcgacgccgcttcgttctaccatcgacaccaccacgctggcacccagttgatcggcgcgagatttaatcgccgcgacaatttgcgacggcgcgtgcagggccagactggaggtggcaacgccaatcagcaacgactgtttgcccgccagttgttgtgccacgcggttgggaatgtaattcagctccgccatcgccgcttccactttttcccgcgttttcgcagaaacgtggctggcctggttcaccacgcgggaaacggtctgataagagacaccggcatactctgcgacatcgtataacgttactggtttcac

SEQ ID NO: 135 - DNA, 8445 bp, Synthetic construct
  source 1..8445: mol_type = other DNA
attcaccaccctgaattgactctcttccgggcgctatcatgccataccgcgaaaggttttgcgccattcgatggtgtccgggatctcgacgctctcccttatgcgactcctgcattaggaaattaatacgactcactataggggaattgtgagcggataacaattcccctgtagaaataattttgtttaactttaataaggagatataccatgggtgaactgccgagtaggtagctgataacattgaacgcgcgaagcacgccgccggacaggtgtgaactgccgagtaggtagctgataacggatccgaattcgagctcggcgcgcctgcaggtcgacaagcttgcggccgcataatgcttaagtcgaacagaaagtaatcgtattgtacacggccgcataatcgaaattaatacgactcactataggggaattgtgagcggataacaattccccatcttagtatattagttaagtataagaaggagatatacatatgtttttgcaaagacctaaaccttacagcgatgaaagtttagaaagtttctttatccgagtggctaacaaaaatggctacggtgatgtccatcgcttcctagaagccactaaacgattccttcaagacattgaccataatggctatcaaacctttccgactgatataactcggataaacccatactcagctaaaaacagttccagcgcacgaactgcgtcattcctgaaacttgcacaattgacatttaatgaaccgccagagctacttgggttggcaattaacagaacaaacatgaaatactcgccgtcaactagcgcggttgttagaggtgcagaagtctttcctcgcagtttactacggacgcactccatcccctgctgtcctttgtgtctgcgagaaaatggctacgcctcctacctttggcactttcaggggtacgaatactgccacagccataacgtacctttaattaccacttgtagctgtggtaaggagtttgactaccgagtatctgggttaaagggcatttgctgcaaatgcaaggagcctatcaccttaaccagcagggagaacggtcatgaggcagcgtgtactgtttcaaactggcttgctggccatgaatctaaacctctgccaaatcttcctaaaagctaccgatggggtttagttcattggtggatgggtattaaagatagcgagttcgatcacttttcgttcgttcaatttttctcaaactggccaaggtcattccactcgataatcgaagatgaagtagagttcaaccttgagcatgctgttgtcagcacgtctgaattacgactaaaagatcttcttggtcgattgtttttcggttcaattcggttacctgagcggaatcttcaacacaatatcatccttggtgagcttctctgctatttagaaaatcgtttatggcaagacaagggattaatcgccaacctcaaaatgaacgcgttagaggcgactgtaatgttaaattgtagcctcgatcagattgcatcaatggttgaacaacgcatcttgaagccaaatcgaaaaagcaagcccaacagccctcttgatgttaccgattatctatttcatttcggcgatattttctgtctttggttagctgagttccaaagcgatgagtttaaccgttcgttttatgtgtcgaggtggtaaatgcaaactctgaaagaactaatcgcatccaatcctgacgacttaacaactgaacttaagagagcatttcgtccactcacaccgcatattgcaattgatggtaatgaacttgacgcactgacgatattagtcaatttaaccgataagactgatgatcagaaagacctgctcgatcgagccaaatgcaagcaaaaacttcgagatgaaaaatggtgggctagctgcataaattgcgttaattacagacaaagccataacccaaaattcccggatatacgttctgaaggcgtgattcgaacccaagccctgggtgaattaccgagtttcctactctcgtcctcaaaaatcccaccataccattggtcatatagccatgattcaaaatacgtcaacaaaagcgcattcctcaccaatgagttttgttgggatggtgagatctcatgtttgggtgagcttcttaaagatgcagatcacccactttggaatactttgaaaaagttaggttgttctcaaaaaacttgcaaagcaatggcaaaacaactagctgatattactctcacgactatcaatgtcacactcgcaccaaattacctgactcaaatatctctccccgatagtgatacatcctacatttcactctctcctgttgcatcgctatcgatgcaaagccactttcatcagaggctccaagatgaaaatcggcatagcgcgataacgcggtttagccgaactaccaacatgggggtcactgcgatgacatgtggcggcgcatttagaatgttaaagtctggcgctaagttttccagcccccctcatcaccgattaaacagtaaacgaagttggttgacgtcagagcatgttcagtcattaaaacagtaccagcgcctcaacaaaagcctcatacctgaaaactctcggattgcactccgtagaaaatacaaaatcgagcttcaaaatatggtcagatcttggtttgcaatgcaagaccatacccttgattcgaacatacttatccaacatttgaatcatgacctatcttacttaggagccacaaaacgttttgcatacgatccagcgatgaccaagctctttactgagcttttgaaacgagagttatcaaattcaatcaataatggtgagcaacacactaatggatcgtttttagtcctaccgaatatcagggtttgtggcgcaacagctttaagctccccggtaacggtggggattccatcacttacagctttctttggcttcgttcacgcatttgaacggaatataaatcgcaccacctcatcgtttcgtgttgaatcctttgcgatatgcgtccatcaactacatgtcgagaagcgaggtttgacagcagagtttgtggaaaaaggcgacgggactatatccgctcccgcgacccgggatgactggcagtgtgatgtcgtatttagccttattttgaacaccaactttgctcaacatattgaccaagatacgttagttacatcactaccaaagcgattggctcggggttcagcaaaaattgcgattgatgactttaaacatatcaactcattctcgacattagaaacagcgatcgaatctctgccaatagaagctggtaggtggttatcactttacgcacagtcaaacaataatctaagtgatctattagcagccatgacagaggaccatcagctcatggcaagctgcgtcggttaccacttgttagaagagcccaaagataaaccaaactccctcagaggttacaaacacgctatcgccgagtgcatcattggactcattaactcaatcacctttagctcagagactgatcccaacacaatcttttggtcgctaaagaactatcaaaactacctagtggtacagccaaggagtatcaacgatgaaactaccgacaaatctagcctatgagcgctctatcgacccatcagatgtctgtttttttgtcgtctggcccgatgatagaaaaacacctttaacctacaattctcgtactctgctcgggcaaatggaagcggcatcattagcctatgatgtctcaggtcaaccaataaaaagtgccaccgctgaggcgttagctcaagggaaccctcatcaagttgatttctgccacgttccatacggtgcgagtcatattgaatgcagtttctccgtctcgttttcttctgaactacgtcaaccatataagtgtaactcaagcaaagttaaacaaacgctagtgcaattagtcgagctctacgaaacgaaaatcggctggactgagctagcaacccgatatttgatgaacatttgcaacggtaaatggctgtggaaaaatacccgtaaagcctattgctggaacattgtacttacaccttggccttggaacggggaaaaggttggatttgaagatattcgtactaactacacctcacggcaagactttaaaaataataaaaattggtctgctatagttgaaatgatcaaaaccgcattttctagtactgatgggctggcgatatttgaagtcagggccaccttgcacttgccaacgaatgctatggtgcggccaagccaagttttcacagaaaaagaaagtggcagtaaaagtaaatctaaaactcaaaacagtcgagtttttcagagtacaactattgatggtgaacgatcgccaatactaggggcctttaaaacgggagcagctattgcaaccattgacgactggtatcctgaagccactgagccactaagggtcggacggtttggggttcatcgcgaagatgtcacttgctaccgtcatccgtctaccggaaaagattttttctcgatattacaacaagcagagcactatattgaagtgttgagcgccaacaaaactcccgctcaagaaactatcaacgacatgcactttttaatggctaacctgattaagggtgggatgttccagcataaaggagactgactgtgaaatggtattataagacaatcacctttctgccagagttgtgcaacaacgagtcactggctgcaaagtgtctccgcgttctgcatggatttaactatcagtatgagacacgaaatatcggcgtttcatttccgctttggtgtgatgcaacggttggaaaaaagatttcatttgtcagcaagaacaagatagaactcgacttactacttaaacaacactatttcgtccaaatggaacaacttcaatactttcatatatccaacactgttctcgtcccagaagattgtacatacgtttcctttagacgctgtcaatctatagataagctcacagcagcagggctggcaaggaaaatcagacgcctggagaaacgtgctctatctagaggcgagcaatttgacccatcatcttttgctcaaaaagagcatactgcaatagcgcactaccactcacttggggagtccagcaaacagacgaaccgcaactttcgactcaatatcaggatgctctcggagcaaccccgtgaggggaactcgatttttagtagctatggcttatcaaattcagaaaactcgtttcagcctgtacccttaatctgacctaggctgctgccaccgctgagcaataactagcataaccccttggggcctctaaacgggtcttgaggggttttttgctgaaacctcaggcatttgagaagcacacggtcacactgcttccggtagtcaataaaccggtaaaccagcaatagacataagcggctatttaacgaccctgccctgaaccgacgaccgggtcatcgtggccggatcttgcggcccctcggcttgaacgaattgttagacattatttgccgactaccttggtgatctcgcctttcacgtagtggacaaattcttccaactgatctgcgcgcgaggccaagcgatcttcttcttgtccaagataagcctgtctagcttcaagtatgacgggctgatactgggccggcaggcgctccattgcccagtcggcagcgacatccttcggcgcgattttgccggttactgcgctgtaccaaatgcgggacaacgtaagcactacatttcgctcatcgccagcccagtcgggcggcgagttccatagcgttaaggtttcatttagcgcctcaaatagatcctgttcaggaaccggatcaaagagttcctccgccgctggacctaccaaggcaacgctatgttctcttgcttttgtcagcaagatagccagatcaatgtcgatcgtggctggctcgaagatacctgcaagaatgtcattgcgctgccattctccaaattgcagttcgcgcttagctggataacgccacggaatgatgtcgtcgtgcacaacaatggtgacttctacagcgcggagaatctcgctctctccaggggaagccgaagtttccaaaaggtcgttgatcaaagctcgccgcgttgtttcatcaagccttacggtcaccgtaaccagcaaatcaatatcactgtgtggcttcaggccgccatccactgcggagccgtacaaatgtacggccagcaacgtcggttcgagatggcgctcgatgacgccaactacctctgatagttgagtcgatacttcggcgatcaccgcttccctcatactcttcctttttcaatattattgaagcatttatcagggttattgtctcatgagcggatacatatttgaatgtatttagaaaaataaacaaatagctagctcactcggtcgctacgctccgggcgtgagactgcggcgggcgctgcggacacatacaaagttacccacagattccgtggataagcaggggactaacatgtgaggcaaaacagcagggccgcgccggtggcgtttttccataggctccgccctcctgccagagttcacataaacagacgcttttccggtgcatctgtgggagccgtgaggctcaaccatgaatctgacagtacgggcgaaacccgacaggacttaaagatccccaccgtttccggcgggtcgctccctcttgcgctctcctgttccgaccctgccgtttaccggatacctgttccgcctttctcccttacgggaagtgtggcgctttctcatagctcacacactggtatctcggctcggtgtaggtcgttcgctccaagctgggctgtaagcaagaactccccgttcagcccgactgctgcgccttatccggtaactgttcacttgagtccaacccggaaaagcacggtaaaacgccactggcagcagccattggtaactgggagttcgcagaggatttgtttagctaaacacgcggttgctcttgaagtgtgcgccaaagtccggctacactggaaggacagatttggttgctgtgctctgcgaaagccagttaccacggttaagcagttccccaactgacttaaccttcgatcaaaccacctccccaggtggttttttcgtttacagggcaaaagattacgcgcagaaaaaaaggatctcaagaagatcctttgatcttttctactgaaccgctctagatttcagtgcaatttatctcttcaaatgtagcacctgaagtcagccccatacgatataagttgtaattctcatgttagtcatgccccgcgcccaccggaaggagctgactgggttgaaggctctcaagggcatcggtcgagatcccggtgcctaatgagtgagctaacttacattaattgcgttgcgctcactgcccgctttccagtcgggaaacctgtcgtgccagctgcattaatgaatcggccaacgcgcggggagaggcggtttgcgtattgggcgccagggtggtttttcttttcaccagtgagacgggcaacagctgattgcccttcaccgcctggccctgagagagttgcagcaagcggtccacgctggtttgccccagcaggcgaaaatcctgtttgatggtggttaacggcgggatataacatgagctgtcttcggtatcgtcgtatcccactaccgagatgtccgcaccaacgcgcagcccggactcggtaatggcgcgcattgcgcccagcgccatctgatcgttggcaaccagcatcgcagtgggaacgatgccctcattcagcatttgcatggtttgttgaaaaccggacatggcactccagtcgccttcccgttccgctatcggctgaatttgattgcgagtgagatatttatgccagccagccagacgcagacgcgccgagacagaacttaatgggcccgctaacagcgcgatttgctggtgacccaatgcgaccagatgctccacgcccagtcgcgtaccgtcttcatgggagaaaataatactgttgatgggtgtctggtcagagacatcaagaaataacgccggaacattagtgcaggcagcttccacagcaatggcatcctggtcatccagcggatagttaatgatcagcccactgacgcgttgcgcgagaagattgtgcaccgccgctttacaggcttcgacgccgcttcgttctaccatcgacaccaccacgctggcacccagttgatcggcgcgagatttaatcgccgcgacaatttgcgacggcgcgtgcagggccagactggaggtggcaacgccaatcagcaacgactgtttgcccgccagttgttgtgccacgcggttgggaatgtaattcagctccgccatcgccgcttccactttttcccgcgttttcgcagaaacgtggctggcctggttcaccacgcgggaaacggtctgataagagacaccggcatactctgcgacatcgtataacgttactggtttcac

SEQ ID NO: 136 - DNA, 8445 bp, Synthetic construct
  source 1..8445: mol_type = other DNA
attcaccaccctgaattgactctcttccgggcgctatcatgccataccgcgaaaggttttgcgccattcgatggtgtccgggatctcgacgctctcccttatgcgactcctgcattaggaaattaatacgactcactataggggaattgtgagcggataacaattcccctgtagaaataattttgtttaactttaataaggagatataccatgggtgaactgccgagtaggtagctgataactggcccacgttgtggatcacccgttaaacaaagtgaactgccgagtaggtagctgataacggatccgaattcgagctcggcgcgcctgcaggtcgacaagcttgcggccgcataatgcttaagtcgaacagaaagtaatcgtattgtacacggccgcataatcgaaattaatacgactcactataggggaattgtgagcggataacaattccccatcttagtatattagttaagtataagaaggagatatacatatgtttttgcaaagacctaaaccttacagcgatgaaagtttagaaagtttctttatccgagtggctaacaaaaatggctacggtgatgtccatcgcttcctagaagccactaaacgattccttcaagacattgaccataatggctatcaaacctttccgactgatataactcggataaacccatactcagctaaaaacagttccagcgcacgaactgcgtcattcctgaaacttgcacaattgacatttaatgaaccgccagagctacttgggttggcaattaacagaacaaacatgaaatactcgccgtcaactagcgcggttgttagaggtgcagaagtctttcctcgcagtttactacggacgcactccatcccctgctgtcctttgtgtctgcgagaaaatggctacgcctcctacctttggcactttcaggggtacgaatactgccacagccataacgtacctttaattaccacttgtagctgtggtaaggagtttgactaccgagtatctgggttaaagggcatttgctgcaaatgcaaggagcctatcaccttaaccagcagggagaacggtcatgaggcagcgtgtactgtttcaaactggcttgctggccatgaatctaaacctctgccaaatcttcctaaaagctaccgatggggtttagttcattggtggatgggtattaaagatagcgagttcgatcacttttcgttcgttcaatttttctcaaactggccaaggtcattccactcgataatcgaagatgaagtagagttcaaccttgagcatgctgttgtcagcacgtctgaattacgactaaaagatcttcttggtcgattgtttttcggttcaattcggttacctgagcggaatcttcaacacaatatcatccttggtgagcttctctgctatttagaaaatcgtttatggcaagacaagggattaatcgccaacctcaaaatgaacgcgttagaggcgactgtaatgttaaattgtagcctcgatcagattgcatcaatggttgaacaacgcatcttgaagccaaatcgaaaaagcaagcccaacagccctcttgatgttaccgattatctatttcatttcggcgatattttctgtctttggttagctgagttccaaagcgatgagtttaaccgttcgttttatgtgtcgaggtggtaaatgcaaactctgaaagaactaatcgcatccaatcctgacgacttaacaactgaacttaagagagcatttcgtccactcacaccgcatattgcaattgatggtaatgaacttgacgcactgacgatattagtcaatttaaccgataagactgatgatcagaaagacctgctcgatcgagccaaatgcaagcaaaaacttcgagatgaaaaatggtgggctagctgcataaattgcgttaattacagacaaagccataacccaaaattcccggatatacgttctgaaggcgtgattcgaacccaagccctgggtgaattaccgagtttcctactctcgtcctcaaaaatcccaccataccattggtcatatagccatgattcaaaatacgtcaacaaaagcgcattcctcaccaatgagttttgttgggatggtgagatctcatgtttgggtgagcttcttaaagatgcagatcacccactttggaatactttgaaaaagttaggttgttctcaaaaaacttgcaaagcaatggcaaaacaactagctgatattactctcacgactatcaatgtcacactcgcaccaaattacctgactcaaatatctctccccgatagtgatacatcctacatttcactctctcctgttgcatcgctatcgatgcaaagccactttcatcagaggctccaagatgaaaatcggcatagcgcgataacgcggtttagccgaactaccaacatgggggtcactgcgatgacatgtggcggcgcatttagaatgttaaagtctggcgctaagttttccagcccccctcatcaccgattaaacagtaaacgaagttggttgacgtcagagcatgttcagtcattaaaacagtaccagcgcctcaacaaaagcctcatacctgaaaactctcggattgcactccgtagaaaatacaaaatcgagcttcaaaatatggtcagatcttggtttgcaatgcaagaccatacccttgattcgaacatacttatccaacatttgaatcatgacctatcttacttaggagccacaaaacgttttgcatacgatccagcgatgaccaagctctttactgagcttttgaaacgagagttatcaaattcaatcaataatggtgagcaacacactaatggatcgtttttagtcctaccgaatatcagggtttgtggcgcaacagctttaagctccccggtaacggtggggattccatcacttacagctttctttggcttcgttcacgcatttgaacggaatataaatcgcaccacctcatcgtttcgtgttgaatcctttgcgatatgcgtccatcaactacatgtcgagaagcgaggtttgacagcagagtttgtggaaaaaggcgacgggactatatccgctcccgcgacccgggatgactggcagtgtgatgtcgtatttagccttattttgaacaccaactttgctcaacatattgaccaagatacgttagttacatcactaccaaagcgattggctcggggttcagcaaaaattgcgattgatgactttaaacatatcaactcattctcgacattagaaacagcgatcgaatctctgccaatagaagctggtaggtggttatcactttacgcacagtcaaacaataatctaagtgatctattagcagccatgacagaggaccatcagctcatggcaagctgcgtcggttaccacttgttagaagagcccaaagataaaccaaactccctcagaggttacaaacacgctatcgccgagtgcatcattggactcattaactcaatcacctttagctcagagactgatcccaacacaatcttttggtcgctaaagaactatcaaaactacctagtggtacagccaaggagtatcaacgatgaaactaccgacaaatctagcctatgagcgctctatcgacccatcagatgtctgtttttttgtcgtctggcccgatgatagaaaaacacctttaacctacaattctcgtactctgctcgggcaaatggaagcggcatcattagcctatgatgtctcaggtcaaccaataaaaagtgccaccgctgaggcgttagctcaagggaaccctcatcaagttgatttctgccacgttccatacggtgcgagtcatattgaatgcagtttctccgtctcgttttcttctgaactacgtcaaccatataagtgtaactcaagcaaagttaaacaaacgctagtgcaattagtcgagctctacgaaacgaaaatcggctggactgagctagcaacccgatatttgatgaacatttgcaacggtaaatggctgtggaaaaatacccgtaaagcctattgctggaacattgtacttacaccttggccttggaacggggaaaaggttggatttgaagatattcgtactaactacacctcacggcaagactttaaaaataataaaaattggtctgctatagttgaaatgatcaaaaccgcattttctagtactgatgggctggcgatatttgaagtcagggccaccttgcacttgccaacgaatgctatggtgcggccaagccaagttttcacagaaaaagaaagtggcagtaaaagtaaatctaaaactcaaaacagtcgagtttttcagagtacaactattgatggtgaacgatcgccaatactaggggcctttaaaacgggagcagctattgcaaccattgacgactggtatcctgaagccactgagccactaagggtcggacggtttggggttcatcgcgaagatgtcacttgctaccgtcatccgtctaccggaaaagattttttctcgatattacaacaagcagagcactatattgaagtgttgagcgccaacaaaactcccgctcaagaaactatcaacgacatgcactttttaatggctaacctgattaagggtgggatgttccagcataaaggagactgactgtgaaatggtattataagacaatcacctttctgccagagttgtgcaacaacgagtcactggctgcaaagtgtctccgcgttctgcatggatttaactatcagtatgagacacgaaatatcggcgtttcatttccgctttggtgtgatgcaacggttggaaaaaagatttcatttgtcagcaagaacaagatagaactcgacttactacttaaacaacactatttcgtccaaatggaacaacttcaatactttcatatatccaacactgttctcgtcccagaagattgtacatacgtttcctttagacgctgtcaatctatagataagctcacagcagcagggctggcaaggaaaatcagacgcctggagaaacgtgctctatctagaggcgagcaatttgacccatcatcttttgctcaaaaagagcatactgcaatagcgcactaccactcacttggggagtccagcaaacagacgaaccgcaactttcgactcaatatcaggatgctctcggagcaaccccgtgaggggaactcgatttttagtagctatggcttatcaaattcagaaaactcgtttcagcctgtacccttaatctgacctaggctgctgccaccgctgagcaataactagcataaccccttggggcctctaaacgggtcttgaggggttttttgctgaaacctcaggcatttgagaagcacacggtcacactgcttccggtagtcaataaaccggtaaaccagcaatagacataagcggctatttaacgaccctgccctgaaccgacgaccgggtcatcgtggccggatcttgcggcccctcggcttgaacgaattgttagacattatttgccgactaccttggtgatctcgcctttcacgtagtggacaaattcttccaactgatctgcgcgcgaggccaagcgatcttcttcttgtccaagataagcctgtctagcttcaagtatgacgggctgatactgggccggcaggcgctccattgcccagtcggcagcgacatccttcggcgcgattttgccggttactgcgctgtaccaaatgcgggacaacgtaagcactacatttcgctcatcgccagcccagtcgggcggcgagttccatagcgttaaggtttcatttagcgcctcaaatagatcctgttcaggaaccggatcaaagagttcctccgccgctggacctaccaaggcaacgctatgttctcttgcttttgtcagcaagatagccagatcaatgtcgatcgtggctggctcgaagatacctgcaagaatgtcattgcgctgccattctccaaattgcagttcgcgcttagctggataacgccacggaatgatgtcgtcgtgcacaacaatggtgacttctacagcgcggagaatctcgctctctccaggggaagccgaagtttccaaaaggtcgttgatcaaagctcgccgcgttgtttcatcaagccttacggtcaccgtaaccagcaaatcaatatcactgtgtggcttcaggccgccatccactgcggagccgtacaaatgtacggccagcaacgtcggttcgagatggcgctcgatgacgccaactacctctgatagttgagtcgatacttcggcgatcaccgcttccctcatactcttcctttttcaatattattgaagcatttatcagggttattgtctcatgagcggatacatatttgaatgtatttagaaaaataaacaaatagctagctcactcggtcgctacgctccgggcgtgagactgcggcgggcgctgcggacacatacaaagttacccacagattccgtggataagcaggggactaacatgtgaggcaaaacagcagggccgcgccggtggcgtttttccataggctccgccctcctgccagagttcacataaacagacgcttttccggtgcatctgtgggagccgtgaggctcaaccatgaatctgacagtacgggcgaaacccgacaggacttaaagatccccaccgtttccggcgggtcgctccctcttgcgctctcctgttccgaccctgccgtttaccggatacctgttccgcctttctcccttacgggaagtgtggcgctttctcatagctcacacactggtatctcggctcggtgtaggtcgttcgctccaagctgggctgtaagcaagaactccccgttcagcccgactgctgcgccttatccggtaactgttcacttgagtccaacccggaaaagcacggtaaaacgccactggcagcagccattggtaactgggagttcgcagaggatttgtttagctaaacacgcggttgctcttgaagtgtgcgccaaagtccggctacactggaaggacagatttggttgctgtgctctgcgaaagccagttaccacggttaagcagttccccaactgacttaaccttcgatcaaaccacctccccaggtggttttttcgtttacagggcaaaagattacgcgcagaaaaaaaggatctcaagaagatcctttgatcttttctactgaaccgctctagatttcagtgcaatttatctcttcaaatgtagcacctgaagtcagccccatacgatataagttgtaattctcatgttagtcatgccccgcgcccaccggaaggagctgactgggttgaaggctctcaagggcatcggtcgagatcccggtgcctaatgagtgagctaacttacattaattgcgttgcgctcactgcccgctttccagtcgggaaacctgtcgtgccagctgcattaatgaatcggccaacgcgcggggagaggcggtttgcgtattgggcgccagggtggtttttcttttcaccagtgagacgggcaacagctgattgcccttcaccgcctggccctgagagagttgcagcaagcggtccacgctggtttgccccagcaggcgaaaatcctgtttgatggtggttaacggcgggatataacatgagctgtcttcggtatcgtcgtatcccactaccgagatgtccgcaccaacgcgcagcccggactcggtaatggcgcgcattgcgcccagcgccatctgatcgttggcaaccagcatcgcagtgggaacgatgccctcattcagcatttgcatggtttgttgaaaaccggacatggcactccagtcgccttcccgttccgctatcggctgaatttgattgcgagtgagatatttatgccagccagccagacgcagacgcgccgagacagaacttaatgggcccgctaacagcgcgatttgctggtgacccaatgcgaccagatgctccacgcccagtcgcgtaccgtcttcatgggagaaaataatactgttgatgggtgtctggtcagagacatcaagaaataacgccggaacattagtgcaggcagcttccacagcaatggcatcctggtcatccagcggatagttaatgatcagcccactgacgcgttgcgcgagaagattgtgcaccgccgctttacaggcttcgacgccgcttcgttctaccatcgacaccaccacgctggcacccagttgatcggcgcgagatttaatcgccgcgacaatttgcgacggcgcgtgcagggccagactggaggtggcaacgccaatcagcaacgactgtttgcccgccagttgttgtgccacgcggttgggaatgtaattcagctccgccatcgccgcttccactttttcccgcgttttcgcagaaacgtggctggcctggttcaccacgcgggaaacggtctgataagagacaccggcatactctgcgacatcgtataacgttactggtttcac

SEQ ID NO: 137 - DNA, 8445 bp, Synthetic construct
  source 1..8445: mol_type = other DNA
attcaccaccctgaattgactctcttccgggcgctatcatgccataccgcgaaaggttttgcgccattcgatggtgtccgggatctcgacgctctcccttatgcgactcctgcattaggaaattaatacgactcactataggggaattgtgagcggataacaattcccctgtagaaataattttgtttaactttaataaggagatataccatgggtgaactgccgagtaggtagctgataactgaagataggtctggtcggcgaagaaaccgccgtgaactgccgagtaggtagctgataacggatccgaattcgagctcggcgcgcctgcaggtcgacaagcttgcggccgcataatgcttaagtcgaacagaaagtaatcgtattgtacacggccgcataatcgaaattaatacgactcactataggggaattgtgagcggataacaattccccatcttagtatattagttaagtataagaaggagatatacatatgtttttgcaaagacctaaaccttacagcgatgaaagtttagaaagtttctttatccgagtggctaacaaaaatggctacggtgatgtccatcgcttcctagaagccactaaacgattccttcaagacattgaccataatggctatcaaacctttccgactgatataactcggataaacccatactcagctaaaaacagttccagcgcacgaactgcgtcattcctgaaacttgcacaattgacatttaatgaaccgccagagctacttgggttggcaattaacagaacaaacatgaaatactcgccgtcaactagcgcggttgttagaggtgcagaagtctttcctcgcagtttactacggacgcactccatcccctgctgtcctttgtgtctgcgagaaaatggctacgcctcctacctttggcactttcaggggtacgaatactgccacagccataacgtacctttaattaccacttgtagctgtggtaaggagtttgactaccgagtatctgggttaaagggcatttgctgcaaatgcaaggagcctatcaccttaaccagcagggagaacggtcatgaggcagcgtgtactgtttcaaactggcttgctggccatgaatctaaacctctgccaaatcttcctaaaagctaccgatggggtttagttcattggtggatgggtattaaagatagcgagttcgatcacttttcgttcgttcaatttttctcaaactggccaaggtcattccactcgataatcgaagatgaagtagagttcaaccttgagcatgctgttgtcagcacgtctgaattacgactaaaagatcttcttggtcgattgtttttcggttcaattcggttacctgagcggaatcttcaacacaatatcatccttggtgagcttctctgctatttagaaaatcgtttatggcaagacaagggattaatcgccaacctcaaaatgaacgcgttagaggcgactgtaatgttaaattgtagcctcgatcagattgcatcaatggttgaacaacgcatcttgaagccaaatcgaaaaagcaagcccaacagccctcttgatgttaccgattatctatttcatttcggcgatattttctgtctttggttagctgagttccaaagcgatgagtttaaccgttcgttttatgtgtcgaggtggtaaatgcaaactctgaaagaactaatcgcatccaatcctgacgacttaacaactgaacttaagagagcatttcgtccactcacaccgcatattgcaattgatggtaatgaacttgacgcactgacgatattagtcaatttaaccgataagactgatgatcagaaagacctgctcgatcgagccaaatgcaagcaaaaacttcgagatgaaaaatggtgggctagctgcataaattgcgttaattacagacaaagccataacccaaaattcccggatatacgttctgaaggcgtgattcgaacccaagccctgggtgaattaccgagtttcctactctcgtcctcaaaaatcccaccataccattggtcatatagccatgattcaaaatacgtcaacaaaagcgcattcctcaccaatgagttttgttgggatggtgagatctcatgtttgggtgagcttcttaaagatgcagatcacccactttggaatactttgaaaaagttaggttgttctcaaaaaacttgcaaagcaatggcaaaacaactagctgatattactctcacgactatcaatgtcacactcgcaccaaattacctgactcaaatatctctccccgatagtgatacatcctacatttcactctctcctgttgcatcgctatcgatgcaaagccactttcatcagaggctccaagatgaaaatcggcatagcgcgataacgcggtttagccgaactaccaacatgggggtcactgcgatgacatgtggcggcgcatttagaatgttaaagtctggcgctaagttttccagcccccctcatcaccgattaaacagtaaacgaagttggttgacgtcagagcatgttcagtcattaaaacagtaccagcgcctcaacaaaagcctcatacctgaaaactctcggattgcactccgtagaaaatacaaaatcgagcttcaaaatatggtcagatcttggtttgcaatgcaagaccatacccttgattcgaacatacttatccaacatttgaatcatgacctatcttacttaggagccacaaaacgttttgcatacgatccagcgatgaccaagctctttactgagcttttgaaacgagagttatcaaattcaatcaataatggtgagcaacacactaatggatcgtttttagtcctaccgaatatcagggtttgtggcgcaacagctttaagctccccggtaacggtggggattccatcacttacagctttctttggcttcgttcacgcatttgaacggaatataaatcgcaccacctcatcgtttcgtgttgaatcctttgcgatatgcgtccatcaactacatgtcgagaagcgaggtttgacagcagagtttgtggaaaaaggcgacgggactatatccgctcccgcgacccgggatgactggcagtgtgatgtcgtatttagccttattttgaacaccaactttgctcaacatattgaccaagatacgttagttacatcactaccaaagcgattggctcggggttcagcaaaaattgcgattgatgactttaaacatatcaactcattctcgacattagaaacagcgatcgaatctctgccaatagaagctggtaggtggttatcactttacgcacagtcaaacaataatctaagtgatctattagcagccatgacagaggaccatcagctcatggcaagctgcgtcggttaccacttgttagaagagcccaaagataaaccaaactccctcagaggttacaaacacgctatcgccgagtgcatcattggactcattaactcaatcacctttagctcagagactgatcccaacacaatcttttggtcgctaaagaactatcaaaactacctagtggtacagccaaggagtatcaacgatgaaactaccgacaaatctagcctatgagcgctctatcgacccatcagatgtctgtttttttgtcgtctggcccgatgatagaaaaacacctttaacctacaattctcgtactctgctcgggcaaatggaagcggcatcattagcctatgatgtctcaggtcaaccaataaaaagtgccaccgctgaggcgttagctcaagggaaccctcatcaagttgatttctgccacgttccatacggtgcgagtcatattgaatgcagtttctccgtctcgttttcttctgaactacgtcaaccatataagtgtaactcaagcaaagttaaacaaacgctagtgcaattagtcgagctctacgaaacgaaaatcggctggactgagctagcaacccgatatttgatgaacatttgcaacggtaaatggctgtggaaaaatacccgtaaagcctattgctggaacattgtacttacaccttggccttggaacggggaaaaggttggatttgaagatattcgtactaactacacctcacggcaagactttaaaaataataaaaattggtctgctatagttgaaatgatcaaaaccgcattttctagtactgatgggctggcgatatttgaagtcagggccaccttgcacttgccaacgaatgctatggtgcggccaagccaagttttcacagaaaaagaaagtggcagtaaaagtaaatctaaaactcaaaacagtcgagtttttcagagtacaactattgatggtgaacgatcgccaatactaggggcctttaaaacgggagcagctattgcaaccattgacgactggtatcctgaagccactgagccactaagggtcggacggtttggggttcatcgcgaagatgtcacttgctaccgtcatccgtctaccggaaaagattttttctcgatattacaacaagcagagcactatattgaagtgttgagcgccaacaaaactcccgctcaagaaactatcaacgacatgcactttttaatggctaacctgattaagggtgggatgttccagcataaaggagactgactgtgaaatggtattataagacaatcacctttctgccagagttgtgcaacaacgagtcactggctgcaaagtgtctccgcgttctgcatggatttaactatcagtatgagacacgaaatatcggcgtttcatttccgctttggtgtgatgcaacggttggaaaaaagatttcatttgtcagcaagaacaagatagaactcgacttactacttaaacaacactatttcgtccaaatggaacaacttcaatactttcatatatccaacactgttctcgtcccagaagattgtacatacgtttcctttagacgctgtcaatctatagataagctcacagcagcagggctggcaaggaaaatcagacgcctggagaaacgtgctctatctagaggcgagcaatttgacccatcatcttttgctcaaaaagagcatactgcaatagcgcactaccactcacttggggagtccagcaaacagacgaaccgcaactttcgactcaatatcaggatgctctcggagcaaccccgtgaggggaactcgatttttagtagctatggcttatcaaattcagaaaactcgtttcagcctgtacccttaatctgacctaggctgctgccaccgctgagcaataactagcataaccccttggggcctctaaacgggtcttgaggggttttttgctgaaacctcaggcatttgagaagcacacggtcacactgcttccggtagtcaataaaccggtaaaccagcaatagacataagcggctatttaacgaccctgccctgaaccgacgaccgggtcatcgtggccggatcttgcggcccctcggcttgaacgaattgttagacattatttgccgactaccttggtgatctcgcctttcacgtagtggacaaattcttccaactgatctgcgcgcgaggccaagcgatcttcttcttgtccaagataagcctgtctagcttcaagtatgacgggctgatactgggccggcaggcgctccattgcccagtcggcagcgacatccttcggcgcgattttgccggttactgcgctgtaccaaatgcgggacaacgtaagcactacatttcgctcatcgccagcccagtcgggcggcgagttccatagcgttaaggtttcatttagcgcctcaaatagatcctgttcaggaaccggatcaaagagttcctccgccgctggacctaccaaggcaacgctatgttctcttgcttttgtcagcaagatagccagatcaatgtcgatcgtggctggctcgaagatacctgcaagaatgtcattgcgctgccattctccaaattgcagttcgcgcttagctggataacgccacggaatgatgtcgtcgtgcacaacaatggtgacttctacagcgcggagaatctcgctctctccaggggaagccgaagtttccaaaaggtcgttgatcaaagctcgccgcgttgtttcatcaagccttacggtcaccgtaaccagcaaatcaatatcactgtgtggcttcaggccgccatccactgcggagccgtacaaatgtacggccagcaacgtcggttcgagatggcgctcgatgacgccaactacctctgatagttgagtcgatacttcggcgatcaccgcttccctcatactcttcctttttcaatattattgaagcatttatcagggttattgtctcatgagcggatacatatttgaatgtatttagaaaaataaacaaatagctagctcactcggtcgctacgctccgggcgtgagactgcggcgggcgctgcggacacatacaaagttacccacagattccgtggataagcaggggactaacatgtgaggcaaaacagcagggccgcgccggtggcgtttttccataggctccgccctcctgccagagttcacataaacagacgcttttccggtgcatctgtgggagccgtgaggctcaaccatgaatctgacagtacgggcgaaacccgacaggacttaaagatccccaccgtttccggcgggtcgctccctcttgcgctctcctgttccgaccctgccgtttaccggatacctgttccgcctttctcccttacgggaagtgtggcgctttctcatagctcacacactggtatctcggctcggtgtaggtcgttcgctccaagctgggctgtaagcaagaactccccgttcagcccgactgctgcgccttatccggtaactgttcacttgagtccaacccggaaaagcacggtaaaacgccactggcagcagccattggtaactgggagttcgcagaggatttgtttagctaaacacgcggttgctcttgaagtgtgcgccaaagtccggctacactggaaggacagatttggttgctgtgctctgcgaaagccagttaccacggttaagcagttccccaactgacttaaccttcgatcaaaccacctccccaggtggttttttcgtttacagggcaaaagattacgcgcagaaaaaaaggatctcaagaagatcctttgatcttttctactgaaccgctctagatttcagtgcaatttatctcttcaaatgtagcacctgaagtcagccccatacgatataagttgtaattctcatgttagtcatgccccgcgcccaccggaaggagctgactgggttgaaggctctcaagggcatcggtcgagatcccggtgcctaatgagtgagctaacttacattaattgcgttgcgctcactgcccgctttccagtcgggaaacctgtcgtgccagctgcattaatgaatcggccaacgcgcggggagaggcggtttgcgtattgggcgccagggtggtttttcttttcaccagtgagacgggcaacagctgattgcccttcaccgcctggccctgagagagttgcagcaagcggtccacgctggtttgccccagcaggcgaaaatcctgtttgatggtggttaacggcgggatataacatgagctgtcttcggtatcgtcgtatcccactaccgagatgtccgcaccaacgcgcagcccggactcggtaatggcgcgcattgcgcccagcgccatctgatcgttggcaaccagcatcgcagtgggaacgatgccctcattcagcatttgcatggtttgttgaaaaccggacatggcactccagtcgccttcccgttccgctatcggctgaatttgattgcgagtgagatatttatgccagccagccagacgcagacgcgccgagacagaacttaatgggcccgctaacagcgcgatttgctggtgacccaatgcgaccagatgctccacgcccagtcgcgtaccgtcttcatgggagaaaataatactgttgatgggtgtctggtcagagacatcaagaaataacgccggaacattagtgcaggcagcttccacagcaatggcatcctggtcatccagcggatagttaatgatcagcccactgacgcgttgcgcgagaagattgtgcaccgccgctttacaggcttcgacgccgcttcgttctaccatcgacaccaccacgctggcacccagttgatcggcgcgagatttaatcgccgcgacaatttgcgacggcgcgtgcagggccagactggaggtggcaacgccaatcagcaacgactgtttgcccgccagttgttgtgccacgcggttgggaatgtaattcagctccgccatcgccgcttccactttttcccgcgttttcgcagaaacgtggctggcctggttcaccacgcgggaaacggtctgataagagacaccggcatactctgcgacatcgtataacgttactggtttcac

SEQ ID NO: 138 - DNA, 8445 bp, Synthetic construct
  source 1..8445: mol_type = other DNA
attcaccaccctgaattgactctcttccgggcgctatcatgccataccgcgaaaggttttgcgccattcgatggtgtccgggatctcgacgctctcccttatgcgactcctgcattaggaaattaatacgactcactataggggaattgtgagcggataacaattcccctgtagaaataattttgtttaactttaataaggagatataccatgggtgaactgccgagtaggtagctgataacagcctgtaatctctgcttaaaagcacagaatcgtgaactgccgagtaggtagctgataacggatccgaattcgagctcggcgcgcctgcaggtcgacaagcttgcggccgcataatgcttaagtcgaacagaaagtaatcgtattgtacacggccgcataatcgaaattaatacgactcactataggggaattgtgagcggataacaattccccatcttagtatattagttaagtataagaaggagatatacatatgtttttgcaaagacctaaaccttacagcgatgaaagtttagaaagtttctttatccgagtggctaacaaaaatggctacggtgatgtccatcgcttcctagaagccactaaacgattccttcaagacattgaccataatggctatcaaacctttccgactgatataactcggataaacccatactcagctaaaaacagttccagcgcacgaactgcgtcattcctgaaacttgcacaattgacatttaatgaaccgccagagctacttgggttggcaattaacagaacaaacatgaaatactcgccgtcaactagcgcggttgttagaggtgcagaagtctttcctcgcagtttactacggacgcactccatcccctgctgtcctttgtgtctgcgagaaaatggctacgcctcctacctttggcactttcaggggtacgaatactgccacagccataacgtacctttaattaccacttgtagctgtggtaaggagtttgactaccgagtatctgggttaaagggcatttgctgcaaatgcaaggagcctatcaccttaaccagcagggagaacggtcatgaggcagcgtgtactgtttcaaactggcttgctggccatgaatctaaacctctgccaaatcttcctaaaagctaccgatggggtttagttcattggtggatgggtattaaagatagcgagttcgatcacttttcgttcgttcaatttttctcaaactggccaaggtcattccactcgataatcgaagatgaagtagagttcaaccttgagcatgctgttgtcagcacgtctgaattacgactaaaagatcttcttggtcgattgtttttcggttcaattcggttacctgagcggaatcttcaacacaatatcatccttggtgagcttctctgctatttagaaaatcgtttatggcaagacaagggattaatcgccaacctcaaaatgaacgcgttagaggcgactgtaatgttaaattgtagcctcgatcagattgcatcaatggttgaacaacgcatcttgaagccaaatcgaaaaagcaagcccaacagccctcttgatgttaccgattatctatttcatttcggcgatattttctgtctttggttagctgagttccaaagcgatgagtttaaccgttcgttttatgtgtcgaggtggtaaatgcaaactctgaaagaactaatcgcatccaatcctgacgacttaacaactgaacttaagagagcatttcgtccactcacaccgcatattgcaattgatggtaatgaacttgacgcactgacgatattagtcaatttaaccgataagactgatgatcagaaagacctgctcgatcgagccaaatgcaagcaaaaacttcgagatgaaaaatggtgggctagctgcataaattgcgttaattacagacaaagccataacccaaaattcccggatatacgttctgaaggcgtgattcgaacccaagccctgggtgaattaccgagtttcctactctcgtcctcaaaaatcccaccataccattggtcatatagccatgattcaaaatacgtcaacaaaagcgcattcctcaccaatgagttttgttgggatggtgagatctcatgtttgggtgagcttcttaaagatgcagatcacccactttggaatactttgaaaaagttaggttgttctcaaaaaacttgcaaagcaatggcaaaacaactagctgatattactctcacgactatcaatgtcacactcgcaccaaattacctgactcaaatatctctccccgatagtgatacatcctacatttcactctctcctgttgcatcgctatcgatgcaaagccactttcatcagaggctccaagatgaaaatcggcatagcgcgataacgcggtttagccgaactaccaacatgggggtcactgcgatgacatgtggcggcgcatttagaatgttaaagtctggcgctaagttttccagcccccctcatcaccgattaaacagtaaacgaagttggttgacgtcagagcatgttcagtcattaaaacagtaccagcgcctcaacaaaagcctcatacctgaaaactctcggattgcactccgtagaaaatacaaaatcgagcttcaaaatatggtcagatcttggtttgcaatgcaagaccatacccttgattcgaacatacttatccaacatttgaatcatgacctatcttacttaggagccacaaaacgttttgcatacgatccagcgatgaccaagctctttactgagcttttgaaacgagagttatcaaattcaatcaataatggtgagcaacacactaatggatcgtttttagtcctaccgaatatcagggtttgtggcgcaacagctttaagctccccggtaacggtggggattccatcacttacagctttctttggcttcgttcacgcatttgaacggaatataaatcgcaccacctcatcgtttcgtgttgaatcctttgcgatatgcgtccatcaactacatgtcgagaagcgaggtttgacagcagagtttgtggaaaaaggcgacgggactatatccgctcccgcgacccgggatgactggcagtgtgatgtcgtatttagccttattttgaacaccaactttgctcaacatattgaccaagatacgttagttacatcactaccaaagcgattggctcggggttcagcaaaaattgcgattgatgactttaaacatatcaactcattctcgacattagaaacagcgatcgaatctctgccaatagaagctggtaggtggttatcactttacgcacagtcaaacaataatctaagtgatctattagcagccatgacagaggaccatcagctcatggcaagctgcgtcggttaccacttgttagaagagcccaaagataaaccaaactccctcagaggttacaaacacgctatcgccgagtgcatcattggactcattaactcaatcacctttagctcagagactgatcccaacacaatcttttggtcgctaaagaactatcaaaactacctagtggtacagccaaggagtatcaacgatgaaactaccgacaaatctagcctatgagcgctctatcgacccatcagatgtctgtttttttgtcgtctggcccgatgatagaaaaacacctttaacctacaattctcgtactctgctcgggcaaatggaagcggcatcattagcctatgatgtctcaggtcaaccaataaaaagtgccaccgctgaggcgttagctcaagggaaccctcatcaagttgatttctgccacgttccatacggtgcgagtcatattgaatgcagtttctccgtctcgttttcttctgaactacgtcaaccatataagtgtaactcaagcaaagttaaacaaacgctagtgcaattagtcgagctctacgaaacgaaaatcggctggactgagctagcaacccgatatttgatgaacatttgcaacggtaaatggctgtggaaaaatacccgtaaagcctattgctggaacattgtacttacaccttggccttggaacggggaaaaggttggatttgaagatattcgtactaactacacctcacggcaagactttaaaaataataaaaattggtctgctatagttgaaatgatcaaaaccgcattttctagtactgatgggctggcgatatttgaagtcagggccaccttgcacttgccaacgaatgctatggtgcggccaagccaagttttcacagaaaaagaaagtggcagtaaaagtaaatctaaaactcaaaacagtcgagtttttcagagtacaactattgatggtgaacgatcgccaatactaggggcctttaaaacgggagcagctattgcaaccattgacgactggtatcctgaagccactgagccactaagggtcggacggtttggggttcatcgcgaagatgtcacttgctaccgtcatccgtctaccggaaaagattttttctcgatattacaacaagcagagcactatattgaagtgttgagcgccaacaaaactcccgctcaagaaactatcaacgacatgcactttttaatggctaacctgattaagggtgggatgttccagcataaaggagactgactgtgaaatggtattataagacaatcacctttctgccagagttgtgcaacaacgagtcactggctgcaaagtgtctccgcgttctgcatggatttaactatcagtatgagacacgaaatatcggcgtttcatttccgctttggtgtgatgcaacggttggaaaaaagatttcatttgtcagcaagaacaagatagaactcgacttactacttaaacaacactatttcgtccaaatggaacaacttcaatactttcatatatccaacactgttctcgtcccagaagattgtacatacgtttcctttagacgctgtcaatctatagataagctcacagcagcagggctggcaaggaaaatcagacgcctggagaaacgtgctctatctagaggcgagcaatttgacccatcatcttttgctcaaaaagagcatactgcaatagcgcactaccactcacttggggagtccagcaaacagacgaaccgcaactttcgactcaatatcaggatgctctcggagcaaccccgtgaggggaactcgatttttagtagctatggcttatcaaattcagaaaactcgtttcagcctgtacccttaatctgacctaggctgctgccaccgctgagcaataactagcataaccccttggggcctctaaacgggtcttgaggggttttttgctgaaacctcaggcatttgagaagcacacggtcacactgcttccggtagtcaataaaccggtaaaccagcaatagacataagcggctatttaacgaccctgccctgaaccgacgaccgggtcatcgtggccggatcttgcggcccctcggcttgaacgaattgttagacattatttgccgactaccttggtgatctcgcctttcacgtagtggacaaattcttccaactgatctgcgcgcgaggccaagcgatcttcttcttgtccaagataagcctgtctagcttcaagtatgacgggctgatactgggccggcaggcgctccattgcccagtcggcagcgacatccttcggcgcgattttgccggttactgcgctgtaccaaatgcgggacaacgtaagcactacatttcgctcatcgccagcccagtcgggcggcgagttccatagcgttaaggtttcatttagcgcctcaaatagatcctgttcaggaaccggatcaaagagttcctccgccgctggacctaccaaggcaacgctatgttctcttgcttttgtcagcaagatagccagatcaatgtcgatcgtggctggctcgaagatacctgcaagaatgtcattgcgctgccattctccaaattgcagttcgcgcttagctggataacgccacggaatgatgtcgtcgtgcacaacaatggtgacttctacagcgcggagaatctcgctctctccaggggaagccgaagtttccaaaaggtcgttgatcaaagctcgccgcgttgtttcatcaagccttacggtcaccgtaaccagcaaatcaatatcactgtgtggcttcaggccgccatccactgcggagccgtacaaatgtacggccagcaacgtcggttcgagatggcgctcgatgacgccaactacctctgatagttgagtcgatacttcggcgatcaccgcttccctcatactcttcctttttcaatattattgaagcatttatcagggttattgtctcatgagcggatacatatttgaatgtatttagaaaaataaacaaatagctagctcactcggtcgctacgctccgggcgtgagactgcggcgggcgctgcggacacatacaaagttacccacagattccgtggataagcaggggactaacatgtgaggcaaaacagcagggccgcgccggtggcgtttttccataggctccgccctcctgccagagttcacataaacagacgcttttccggtgcatctgtgggagccgtgaggctcaaccatgaatctgacagtacgggcgaaacccgacaggacttaaagatccccaccgtttccggcgggtcgctccctcttgcgctctcctgttccgaccctgccgtttaccggatacctgttccgcctttctcccttacgggaagtgtggcgctttctcatagctcacacactggtatctcggctcggtgtaggtcgttcgctccaagctgggctgtaagcaagaactccccgttcagcccgactgctgcgccttatccggtaactgttcacttgagtccaacccggaaaagcacggtaaaacgccactggcagcagccattggtaactgggagttcgcagaggatttgtttagctaaacacgcggttgctcttgaagtgtgcgccaaagtccggctacactggaaggacagatttggttgctgtgctctgcgaaagccagttaccacggttaagcagttccccaactgacttaaccttcgatcaaaccacctccccaggtggttttttcgtttacagggcaaaagattacgcgcagaaaaaaaggatctcaagaagatcctttgatcttttctactgaaccgctctagatttcagtgcaatttatctcttcaaatgtagcacctgaagtcagccccatacgatataagttgtaattctcatgttagtcatgccccgcgcccaccggaaggagctgactgggttgaaggctctcaagggcatcggtcgagatcccggtgcctaatgagtgagctaacttacattaattgcgttgcgctcactgcccgctttccagtcgggaaacctgtcgtgccagctgcattaatgaatcggccaacgcgcggggagaggcggtttgcgtattgggcgccagggtggtttttcttttcaccagtgagacgggcaacagctgattgcccttcaccgcctggccctgagagagttgcagcaagcggtccacgctggtttgccccagcaggcgaaaatcctgtttgatggtggttaacggcgggatataacatgagctgtcttcggtatcgtcgtatcccactaccgagatgtccgcaccaacgcgcagcccggactcggtaatggcgcgcattgcgcccagcgccatctgatcgttggcaaccagcatcgcagtgggaacgatgccctcattcagcatttgcatggtttgttgaaaaccggacatggcactccagtcgccttcccgttccgctatcggctgaatttgattgcgagtgagatatttatgccagccagccagacgcagacgcgccgagacagaacttaatgggcccgctaacagcgcgatttgctggtgacccaatgcgaccagatgctccacgcccagtcgcgtaccgtcttcatgggagaaaataatactgttgatgggtgtctggtcagagacatcaagaaataacgccggaacattagtgcaggcagcttccacagcaatggcatcctggtcatccagcggatagttaatgatcagcccactgacgcgttgcgcgagaagattgtgcaccgccgctttacaggcttcgacgccgcttcgttctaccatcgacaccaccacgctggcacccagttgatcggcgcgagatttaatcgccgcgacaatttgcgacggcgcgtgcagggccagactggaggtggcaacgccaatcagcaacgactgtttgcccgccagttgttgtgccacgcggttgggaatgtaattcagctccgccatcgccgcttccactttttcccgcgttttcgcagaaacgtggctggcctggttcaccacgcgggaaacggtctgataagagacaccggcatactctgcgacatcgtataacgttactggtttcac

SEQ ID NO: 139 - DNA, 8445 bp, Synthetic construct
  source 1..8445: mol_type = other DNA
attcaccaccctgaattgactctcttccgggcgctatcatgccataccgcgaaaggttttgcgccattcgatggtgtccgggatctcgacgctctcccttatgcgactcctgcattaggaaattaatacgactcactataggggaattgtgagcggataacaattcccctgtagaaataattttgtttaactttaataaggagatataccatgggtgaactgccgagtaggtagctgataactgagattttcactcgtcagtgtgaacacaattgtgaactgccgagtaggtagctgataacggatccgaattcgagctcggcgcgcctgcaggtcgacaagcttgcggccgcataatgcttaagtcgaacagaaagtaatcgtattgtacacggccgcataatcgaaattaatacgactcactataggggaattgtgagcggataacaattccccatcttagtatattagttaagtataagaaggagatatacatatgtttttgcaaagacctaaaccttacagcgatgaaagtttagaaagtttctttatccgagtggctaacaaaaatggctacggtgatgtccatcgcttcctagaagccactaaacgattccttcaagacattgaccataatggctatcaaacctttccgactgatataactcggataaacccatactcagctaaaaacagttccagcgcacgaactgcgtcattcctgaaacttgcacaattgacatttaatgaaccgccagagctacttgggttggcaattaacagaacaaacatgaaatactcgccgtcaactagcgcggttgttagaggtgcagaagtctttcctcgcagtttactacggacgcactccatcccctgctgtcctttgtgtctgcgagaaaatggctacgcctcctacctttggcactttcaggggtacgaatactgccacagccataacgtacctttaattaccacttgtagctgtggtaaggagtttgactaccgagtatctgggttaaagggcatttgctgcaaatgcaaggagcctatcaccttaaccagcagggagaacggtcatgaggcagcgtgtactgtttcaaactggcttgctggccatgaatctaaacctctgccaaatcttcctaaaagctaccgatggggtttagttcattggtggatgggtattaaagatagcgagttcgatcacttttcgttcgttcaatttttctcaaactggccaaggtcattccactcgataatcgaagatgaagtagagttcaaccttgagcatgctgttgtcagcacgtctgaattacgactaaaagatcttcttggtcgattgtttttcggttcaattcggttacctgagcggaatcttcaacacaatatcatccttggtgagcttctctgctatttagaaaatcgtttatggcaagacaagggattaatcgccaacctcaaaatgaacgcgttagaggcgactgtaatgttaaattgtagcctcgatcagattgcatcaatggttgaacaacgcatcttgaagccaaatcgaaaaagcaagcccaacagccctcttgatgttaccgattatctatttcatttcggcgatattttctgtctttggttagctgagttccaaagcgatgagtttaaccgttcgttttatgtgtcgaggtggtaaatgcaaactctgaaagaactaatcgcatccaatcctgacgacttaacaactgaacttaagagagcatttcgtccactcacaccgcatattgcaattgatggtaatgaacttgacgcactgacgatattagtcaatttaaccgataagactgatgatcagaaagacctgctcgatcgagccaaatgcaagcaaaaacttcgagatgaaaaatggtgggctagctgcataaattgcgttaattacagacaaagccataacccaaaattcccggatatacgttctgaaggcgtgattcgaacccaagccctgggtgaattaccgagtttcctactctcgtcctcaaaaatcccaccataccattggtcatatagccatgattcaaaatacgtcaacaaaagcgcattcctcaccaatgagttttgttgggatggtgagatctcatgtttgggtgagcttcttaaagatgcagatcacccactttggaatactttgaaaaagttaggttgttctcaaaaaacttgcaaagcaatggcaaaacaactagctgatattactctcacgactatcaatgtcacactcgcaccaaattacctgactcaaatatctctccccgatagtgatacatcctacatttcactctctcctgttgcatcgctatcgatgcaaagccactttcatcagaggctccaagatgaaaatcggcatagcgcgataacgcggtttagccgaactaccaacatgggggtcactgcgatgacatgtggcggcgcatttagaatgttaaagtctggcgctaagttttccagcccccctcatcaccgattaaacagtaaacgaagttggttgacgtcagagcatgttcagtcattaaaacagtaccagcgcctcaacaaaagcctcatacctgaaaactctcggattgcactccgtagaaaatacaaaatcgagcttcaaaatatggtcagatcttggtttgcaatgcaagaccatacccttgattcgaacatacttatccaacatttgaatcatgacctatcttacttaggagccacaaaacgttttgcatacgatccagcgatgaccaagctctttactgagcttttgaaacgagagttatcaaattcaatcaataatggtgagcaacacactaatggatcgtttttagtcctaccgaatatcagggtttgtggcgcaacagctttaagctccccggtaacggtggggattccatcacttacagctttctttggcttcgttcacgcatttgaacggaatataaatcgcaccacctcatcgtttcgtgttgaatcctttgcgatatgcgtccatcaactacatgtcgagaagcgaggtttgacagcagagtttgtggaaaaaggcgacgggactatatccgctcccgcgacccgggatgactggcagtgtgatgtcgtatttagccttattttgaacaccaactttgctcaacatattgaccaagatacgttagttacatcactaccaaagcgattggctcggggttcagcaaaaattgcgattgatgactttaaacatatcaactcattctcgacattagaaacagcgatcgaatctctgccaatagaagctggtaggtggttatcactttacgcacagtcaaacaataatctaagtgatctattagcagccatgacagaggaccatcagctcatggcaagctgcgtcggttaccacttgttagaagagcccaaagataaaccaaactccctcagaggttacaaacacgctatcgccgagtgcatcattggactcattaactcaatcacctttagctcagagactgatcccaacacaatcttttggtcgctaaagaactatcaaaactacctagtggtacagccaaggagtatcaacgatgaaactaccgacaaatctagcctatgagcgctctatcgacccatcagatgtctgtttttttgtcgtctggcccgatgatagaaaaacacctttaacctacaattctcgtactctgctcgggcaaatggaagcggcatcattagcctatgatgtctcaggtcaaccaataaaaagtgccaccgctgaggcgttagctcaagggaaccctcatcaagttgatttctgccacgttccatacggtgcgagtcatattgaatgcagtttctccgtctcgttttcttctgaactacgtcaaccatataagtgtaactcaagcaaagttaaacaaacgctagtgcaattagtcgagctctacgaaacgaaaatcggctggactgagctagcaacccgatatttgatgaacatttgcaacggtaaatggctgtggaaaaatacccgtaaagcctattgctggaacattgtacttacaccttggccttggaacggggaaaaggttggatttgaagatattcgtactaactacacctcacggcaagactttaaaaataataaaaattggtctgctatagttgaaatgatcaaaaccgcattttctagtactgatgggctggcgatatttgaagtcagggccaccttgcacttgccaacgaatgctatggtgcggccaagccaagttttcacagaaaaagaaagtggcagtaaaagtaaatctaaaactcaaaacagtcgagtttttcagagtacaactattgatggtgaacgatcgccaatactaggggcctttaaaacgggagcagctattgcaaccattgacgactggtatcctgaagccactgagccactaagggtcggacggtttggggttcatcgcgaagatgtcacttgctaccgtcatccgtctaccggaaaagattttttctcgatattacaacaagcagagcactatattgaagtgttgagcgccaacaaaactcccgctcaagaaactatcaacgacatgcactttttaatggctaacctgattaagggtgggatgttccagcataaaggagactgactgtgaaatggtattataagacaatcacctttctgccagagttgtgcaacaacgagtcactggctgcaaagtgtctccgcgttctgcatggatttaactatcagtatgagacacgaaatatcggcgtttcatttccgctttggtgtgatgcaacggttggaaaaaagatttcatttgtcagcaagaacaagatagaactcgacttactacttaaacaacactatttcgtccaaatggaacaacttcaatactttcatatatccaacactgttctcgtcccagaagattgtacatacgtttcctttagacgctgtcaatctatagataagctcacagcagcagggctggcaaggaaaatcagacgcctggagaaacgtgctctatctagaggcgagcaatttgacccatcatcttttgctcaaaaagagcatactgcaatagcgcactaccactcacttggggagtccagcaaacagacgaaccgcaactttcgactcaatatcaggatgctctcggagcaaccccgtgaggggaactcgatttttagtagctatggcttatcaaattcagaaaactcgtttcagcctgtacccttaatctgacctaggctgctgccaccgctgagcaataactagcataaccccttggggcctctaaacgggtcttgaggggttttttgctgaaacctcaggcatttgagaagcacacggtcacactgcttccggtagtcaataaaccggtaaaccagcaatagacataagcggctatttaacgaccctgccctgaaccgacgaccgggtcatcgtggccggatcttgcggcccctcggcttgaacgaattgttagacattatttgccgactaccttggtgatctcgcctttcacgtagtggacaaattcttccaactgatctgcgcgcgaggccaagcgatcttcttcttgtccaagataagcctgtctagcttcaagtatgacgggctgatactgggccggcaggcgctccattgcccagtcggcagcgacatccttcggcgcgattttgccggttactgcgctgtaccaaatgcgggacaacgtaagcactacatttcgctcatcgccagcccagtcgggcggcgagttccatagcgttaaggtttcatttagcgcctcaaatagatcctgttcaggaaccggatcaaagagttcctccgccgctggacctaccaaggcaacgctatgttctcttgcttttgtcagcaagatagccagatcaatgtcgatcgtggctggctcgaagatacctgcaagaatgtcattgcgctgccattctccaaattgcagttcgcgcttagctggataacgccacggaatgatgtcgtcgtgcacaacaatggtgacttctacagcgcggagaatctcgctctctccaggggaagccgaagtttccaaaaggtcgttgatcaaagctcgccgcgttgtttcatcaagccttacggtcaccgtaaccagcaaatcaatatcactgtgtggcttcaggccgccatccactgcggagccgtacaaatgtacggccagcaacgtcggttcgagatggcgctcgatgacgccaactacctctgatagttgagtcgatacttcggcgatcaccgcttccctcatactcttcctttttcaatattattgaagcatttatcagggttattgtctcatgagcggatacatatttgaatgtatttagaaaaataaacaaatagctagctcactcggtcgctacgctccgggcgtgagactgcggcgggcgctgcggacacatacaaagttacccacagattccgtggataagcaggggactaacatgtgaggcaaaacagcagggccgcgccggtggcgtttttccataggctccgccctcctgccagagttcacataaacagacgcttttccggtgcatctgtgggagccgtgaggctcaaccatgaatctgacagtacgggcgaaacccgacaggacttaaagatccccaccgtttccggcgggtcgctccctcttgcgctctcctgttccgaccctgccgtttaccggatacctgttccgcctttctcccttacgggaagtgtggcgctttctcatagctcacacactggtatctcggctcggtgtaggtcgttcgctccaagctgggctgtaagcaagaactccccgttcagcccgactgctgcgccttatccggtaactgttcacttgagtccaacccggaaaagcacggtaaaacgccactggcagcagccattggtaactgggagttcgcagaggatttgtttagctaaacacgcggttgctcttgaagtgtgcgccaaagtccggctacactggaaggacagatttggttgctgtgctctgcgaaagccagttaccacggttaagcagttccccaactgacttaaccttcgatcaaaccacctccccaggtggttttttcgtttacagggcaaaagattacgcgcagaaaaaaaggatctcaagaagatcctttgatcttttctactgaaccgctctagatttcagtgcaatttatctcttcaaatgtagcacctgaagtcagccccatacgatataagttgtaattctcatgttagtcatgccccgcgcccaccggaaggagctgactgggttgaaggctctcaagggcatcggtcgagatcccggtgcctaatgagtgagctaacttacattaattgcgttgcgctcactgcccgctttccagtcgggaaacctgtcgtgccagctgcattaatgaatcggccaacgcgcggggagaggcggtttgcgtattgggcgccagggtggtttttcttttcaccagtgagacgggcaacagctgattgcccttcaccgcctggccctgagagagttgcagcaagcggtccacgctggtttgccccagcaggcgaaaatcctgtttgatggtggttaacggcgggatataacatgagctgtcttcggtatcgtcgtatcccactaccgagatgtccgcaccaacgcgcagcccggactcggtaatggcgcgcattgcgcccagcgccatctgatcgttggcaaccagcatcgcagtgggaacgatgccctcattcagcatttgcatggtttgttgaaaaccggacatggcactccagtcgccttcccgttccgctatcggctgaatttgattgcgagtgagatatttatgccagccagccagacgcagacgcgccgagacagaacttaatgggcccgctaacagcgcgatttgctggtgacccaatgcgaccagatgctccacgcccagtcgcgtaccgtcttcatgggagaaaataatactgttgatgggtgtctggtcagagacatcaagaaataacgccggaacattagtgcaggcagcttccacagcaatggcatcctggtcatccagcggatagttaatgatcagcccactgacgcgttgcgcgagaagattgtgcaccgccgctttacaggcttcgacgccgcttcgttctaccatcgacaccaccacgctggcacccagttgatcggcgcgagatttaatcgccgcgacaatttgcgacggcgcgtgcagggccagactggaggtggcaacgccaatcagcaacgactgtttgcccgccagttgttgtgccacgcggttgggaatgtaattcagctccgccatcgccgcttccactttttcccgcgttttcgcagaaacgtggctggcctggttcaccacgcgggaaacggtctgataagagacaccggcatactctgcgacatcgtataacgttactggtttcac

SEQ ID NO: 140 - DNA, 690 bp, Synthetic construct
  source 1..690: mol_type = other DNA
atgacaagcttacctacgccctcagcaattacgacttcggcgttagagtatgcattccatactcccgctcgcaatctaacgaaatctcgcggaaaaaatattcatcgttatgtcagtgtaaagatgagtaagaggattacggtagaatctactctagagtgtgatgcctgctatcactttgattttgagccaagtattgttcgcttttgcgctcaaccgattcgatttttatattatctcaatggtcagtctcactcctatgttcctgactttctagttcaatttgataccaacgagtttgttctatatgaagtaaagtcagcttatgctaagaacaaacctgattttgatgttgaatgggaggcgaaagtaaaagcagcaactgaactagggctagaattggagcttgttgaagagagtgatattagggatacggttgtattaaataatcttaagcgcatgcatcgttatgcttcgaaagatgagctgaataacgtacataactctctcttaaaaataataaagtacaatggcgcccaatctgcaagatgcttgggagaacagttgggtttaaaaggccgaactgttttaccaattttgtgcgatttgctgtcaaggtgtttactcgatacacgtttggataagcctctatctcttgaatctcgatttgagttggccagttatggctaa

SEQ ID NO: 141 - protein, 229 aa, Vibrio cholerae
MTSLPTPSAITTSALEYAFHTPARNLTKSRGKNIHRYVSVKMSKRITVESTLECDACYHFDFEPSIVRFCAQPIRFLYYLNGQSHSYVPDFLVQFDTNEFVLYEVKSAYAKNKPDFDVEWEAKVKAATELGLELELVEESDIRDTVVLNNLKRMHRYASKDELNNVHNSLLKIIKYNGAQSARCLGEQLGLKGRTVLPILCDLLSRCLLDTRLDKPLSLESRFELASYG

SEQ ID NO: 142 - DNA, 1812 bp, Synthetic construct
  source 1..1812: mol_type = other DNA
atggctaagaaagggttctcgagtttccatagaaaagcagtctcttcccaagatacgcttgaatcgatagagcttgtctctagcgctaattgtctagaaagtgttacgtatcaagatatatcagcatttcccgaaacaattgcggtagagattaatttccgattaagcattcttcgctttttagcgcgaaagtgcgaaaccattgtggccaaatcaattgaaccacatcgtgtagagctacagcaaaactatagtagaaaaatacccagtgcaataacgatatatcgatggtggcttgcttttcgaaaatcagactacaaccccattagcttagcacctaatatcaaggatagaggtaatagagagacaaaagtgtcaacagttgttgattctattatggaacaggcagttgaaagagttatatctggacgaaaagtcaatgttagctctgcatataaacgtgttcgacgaaaagttcgtcaatacaatctaactcatggaacgaaatacacgtatcctaagtacgaatctgtaagaaagcgagtaaaaaagaaaaccccatttgagttattagccgcagggaaaggggagagagtagctaagagagagtttcgccgaatgggaaaaaagatcctcacgtctagcgtgctagagagggttgaaatagatcacactgtcgttgacctttttgcagtacacgaagagtatcgaattccattgggccgaccttggcttactcaattggttgattgttacagtaaagctgtaatcggtttttatttaggtttcgagcctcctagctatgtgtcggtttcccttgcacttaagaatgcaatacaacgcaaagatgacttaatctcctcgtatgaatcgatcgagaatgaatggctatgttatgggatcccagacctactcgtaactgataatggtaaagagtttttgtcgaaagcatttgatcaagcatgtgaatcactattgatcaatgtgcatcaaaataaagttgagacgcccgacaacaaacctcatgttgaacgtaactacgggactattaatacttctctgttagacgatttacctgggaaatccttcagccagtaccttcaaagagaagggtacgactctgtgggagaagctacccttacactcaatgagattagagaaatttacttaatttggttggtggatatttatcataaaaaacccaatcagagaggcactaattgtcctaatgttgcgtggaaaaagggttgtcaagaatgggaaccagaggagttctctggttctaaagacgaattagactttaaatttgctattgttgattacaaacaacttactaaagtagggataactgtctacaaagaactgagttatagcaatgaccgtttagctgaatatagagggaagaaaggaaaccataaagttcagttcaagtataaccctgagtgtatggcagttatttgggtgttggatgaggatatgaatgagtactttacagttaatgcgattgactacgaatatgcaagtagagtatcactttggcaacataaatataacatgaaatatcaagcagaactaaattcagcagaatatgatgaagacaaggaaattgatgcagaaataaaaattgaagaaatcgcagatcgttcaattgttaagactaacaaaatcagagctcggaggcgtggcgctaggcatcaagagaatagcgcaagggctaagtcaatcagtaatgcgaacccggcctcgatacaaaaacatgaagatgaaatcgttagtgcagataatgacgattgggatattgattatgtctga

SEQ ID NO: 143 - protein, 603 aa, Vibrio cholerae
MAKKGFSSFHRKAVSSQDTLESIELVSSANCLESVTYQDISAFPETIAVEINFRLSILRFLARKCETIVAKSIEPHRVELQQNYSRKIPSAITIYRWWLAFRKSDYNPISLAPNIKDRGNRETKVSTVVDSIMEQAVERVISGRKVNVSSAYKRVRRKVRQYNLTHGTKYTYPKYESVRKRVKKKTPFELLAAGKGERVAKREFRRMGKKILTSSVLERVEIDHTVVDLFAVHEEYRIPLGRPWLTQLVDCYSKAVIGFYLGFEPPSYVSVSLALKNAIQRKDDLISSYESIENEWLCYGIPDLLVTDNGKEFLSKAFDQACESLLINVHQNKVETPDNKPHVERNYGTINTSLLDDLPGKSFSQYLQREGYDSVGEATLTLNEIREIYLIWLVDIYHKKPNQRGTNCPNVAWKKGCQEWEPEEFSGSKDELDFKFAIVDYKQLTKVGITVYKELSYSNDRLAEYRGKKGNHKVQFKYNPECMAVIWVLDEDMNEYFTVNAIDYEYASRVSLWQHKYNMKYQAELNSAEYDEDKEIDAEIKIEEIADRSIVKTNKIRARRRGARHQENSARAKSISNANPASIQKHEDEIVSADNDDWDIDYV

SEQ ID NO: 144 - DNA, 993 bp, Synthetic construct
  source 1..993: mol_type = other DNA
atgagtgaaacgcgtgaggctcgtatatcaagagctaaaagggcatttgtatccacaccgagcgttaggaaaatcttgagttacatggatagatgtagagacctatcagacctagagtctgagcctacatgcatgatggtctatggtgcttcgggtgtaggtaaaacgaccgtcatcaagaaatacttaaatcaaaacagaagagagtccgaagccgggggcgatataataccggttttgcatattgagttgccagacaatgcgaagccagtagatgcagcaagggaattgctggttgaaatgggtgacccgctagcactttatgaaactgacttagctagattgacgaaaagactgactgaattaatccctgcggtcggcgtgaagctgattattatcgatgagttccaacatttggtggaagaaaggtcaaatcgggttcttacccaagtaggtaattggctaaaaatgatacttaacaaaacgaaatgtccaattgttatatttggtatgccatactcaaaagttgtactgcaagcaaactcgcaacttcacgggcgattttccattcaggttgaactgcgcccctttagctaccagggaggtagaggtgtatttaaaacttttttggaataccttgataaagccctaccttttgaaaaacaggctggcttagccaacgaaagtttgcagaaaaaattgtatgcattctctcagggaaacatgcgttcgttgagaaaccttatttatcaagcatctatcgaagcaattgataatcagcatgagacgataaccgaagaagatttcgtttttgcatcgaagttgacatcgggcgataaacccaactcatggaaaaatccttttgaggagggtgttgaggtaacagaagatatgttacgaccgccaccaaaagatattggttgggaagactatttgagacattcaaccccgagagtgagtaaaccaggtagaaataaaaactttttcgaataa

SEQ ID NO: 145 - protein, 330 aa, Vibrio cholerae
MSETREARISRAKRAFVSTPSVRKILSYMDRCRDLSDLESEPTCMMVYGASGVGKTTVIKKYLNQNRRESEAGGDIIPVLHIELPDNAKPVDAARELLVEMGDPLALYETDLARLTKRLTELIPAVGVKLIIIDEFQHLVEERSNRVLTQVGNWLKMILNKTKCPIVIFGMPYSKVVLQANSQLHGRFSIQVELRPFSYQGGRGVFKTFLEYLDKALPFEKQAGLANESLQKKLYAFSQGNMRSLRNLIYQASIEAIDNQHETITEEDFVFASKLTSGDKPNSWKNPFEEGVEVTEDMLRPPPKDIGWEDYLRHSTPRVSKPGRNKNFFE

SEQ ID NO: 146 - DNA, 1185 bp, Synthetic construct
  source 1..1185: mol_type = other DNA
atgtttttgcaaagacctaaaccttacagcgatgaaagcttagaaagcttctttatccgagtggctaacaaaaatggctacggtgatgtccatcgcttcctagaagccactaaacgattccttcaagacattgaccataatggctatcaaacctttccgactgatataactcggataaacccatactcagctaaaaacagttccagcgcacgaactgcgtcattcctgaagcttgcacaattgacatttaatgaaccgccagagctacttgggttggcaattaacagaacaaacatgaaatactcgccgtcaactagcgcggttgttagaggtgcagaagtctttcctcgcagtttactacggacgcactccatcccctgctgtcctttgtgtctgcgagaaaatggctacgcctcctacctttggcactttcaggggtacgaatactgccacagccataacgtacctttaattaccacttgtagctgtggtaaggagtttgactaccgagtatctgggttaaagggcatttgctgcaaatgcaaggagcctatcaccttaaccagcagggagaacggtcatgaggcagcgtgtactgtttcaaactggcttgctggccatgaatctaaacctctgccaaatcttcctaaaagctaccgatggggtttagttcattggtggatgggtattaaagatagcgaattcgatcacttttcgttcgttcaatttttctcaaactggccaaggtcattccactcgataatcgaagatgaagtagagttcaaccttgagcatgctgttgtcagcacgtctgaattacgactaaaagatcttcttggtcgattgtttttcggttcaattcggttacctgagcggaatcttcaacacaatatcatccttggtgagcttctctgctatttagaaaatcgtttatggcaagacaagggattaatcgccaacctcaaaatgaacgcgttagaggcgactgtaatgttaaattgtagcctcgatcagattgcatcaatggttgaacaacgcatcttgaagccaaatcgaaaaagcaagcccaacagccctcttgatgttaccgattatctatttcatttcggcgatattttctgtctttggttagctgaattccaaagcgatgagtttaaccgttcgttttatgtgtcgaggtggtaa

SEQ ID NO: 147 - protein, 394 aa, Vibrio cholerae
MFLQRPKPYSDESLESFFIRVANKNGYGDVHRFLEATKRFLQDIDHNGYQTFPTDITRINPYSAKNSSSARTASFLKLAQLTFNEPPELLGLAINRTNMKYSPSTSAVVRGAEVFPRSLLRTHSIPCCPLCLRENGYASYLWHFQGYEYCHSHNVPLITTCSCGKEFDYRVSGLKGICCKCKEPITLTSRENGHEAACTVSNWLAGHESKPLPNLPKSYRWGLVHWWMGIKDSEFDHFSFVQFFSNWPRSFHSIIEDEVEFNLEHAVVSTSELRLKDLLGRLFFGSIRLPERNLQHNIILGELLCYLENRLWQDKGLIANLKMNALEATVMLNCSLDQIASMVEQRILKPNRKSKPNSPLDVTDYLFHFGDIFCLWLAEFQSDEFNRSFYVSRW

SEQ ID NO: 148 - DNA, 1923 bp, Synthetic construct
  source 1..1923: mol_type = other DNA
atgcaaactctgaaagaactaatcgcatccaatcctgacgacttaacaactgaacttaagagagcatttcgtccactcacaccgcatattgcaattgatggtaatgaacttgacgcactgacgatattagtcaatttaaccgataagactgatgatcagaaagacctgctcgatcgagccaaatgcaagcaaaaacttcgagatgaaaaatggtgggctagctgcataaattgcgttaactacagacaaagccataacccaaaattcccggatatacgttctgaaggcgtgattcgaacccaagccctaggtgaattaccgagtttcctactctcgtcttcaaaaatcccaccataccattggtcatatagccatgattcaaaatacgtcaacaaaagcgcattcctcaccaatgagttttgttgggatggtgagatctcatgtttgggtgagcttcttaaagatgcagatcacccactttggaatactttgaaaaagttaggttgttctcaaaaaacttgcaaagcaatggcaaaacaactagctgatattactctcacgactatcaatgtcacactcgcaccaaattacctgactcaaatatctctccccgatagtgatacatcctacatttcactctctcctgttgcatcgctatcgatgcaaagccactttcatcagaggctccaagatgaaaatcggcatagcgcgataacgcggtttagccgaactaccaacatgggggtcactgcgatgacatgtggcggcgcatttagaatgttaaagtctggcgctaagttttccagcccccctcatcaccgattaaacagtaaacgaagttggttaacgtcagagcatgttcagtcattaaaacagtaccagcgcctcaacaaaagcctcatacctgaaaactctcggattgcactccgtagaaaatacaaaatcgagcttcaaaatatggtcagatcttggtttgcaatgcaagaccatacccttgattcgaacatacttatccaacatttgaatcatgacctatcttacttaggagccacaaaacgttttgcatacgatccagcgatgaccaagctctttactgagcttttgaaacgagagttatcaaattcaatcaataatggtgagcaacacactaatggatcgtttttagtcctaccgaatatcagggtttgtggcgcaacagctttaagctccccggtaacggtggggatcccatcacttacagctttctttggcttcgttcacgcatttgaacggaatataaatcgcaccacctcatcgtttcgtgttgaatcctttgcgatatgcgtccatcaactacatgtcgagaagcgaggtttgacagcagagtttgtggaaaaaggcgacgggactatatccgctcccgcgacccgggatgactggcagtgtgatgtcgtatttagccttattttgaacaccaactttgctcaacatattgaccaagatacgttagttacatcactaccaaagcgattggctcgaggttcagcaaaaattgcgattgatgactttaaacatatcaactcattctcgacattagaaacagcgatcgaatctctgccaatagaagctggtaggtggttatcactttacgcacagtcaaacaataatctaagtgatctattagcagccatgacagaggaccatcagctcatggcaagctgcgtcggttaccacttgttagaagagcccaaagataaaccaaactccctcagaggttacaaacacgctatcgccgagtgcatcattggactcattaactcaatcacctttagctcagagactgatcccaacacaatcttttggtcgctaaagaactatcaaaactacctagtggtacagccaaggagtatcaacgatgaaactaccgacaaatctagcctatga

SEQ ID NO: 149 - protein, 640 aa, Vibrio cholerae
MQTLKELIASNPDDLTTELKRAFRPLTPHIAIDGNELDALTILVNLTDKTDDQKDLLDRAKCKQKLRDEKWWASCINCVNYRQSHNPKFPDIRSEGVIRTQALGELPSFLLSSSKIPPYHWSYSHDSKYVNKSAFLTNEFCWDGEISCLGELLKDADHPLWNTLKKLGCSQKTCKAMAKQLADITLTTINVTLAPNYLTQISLPDSDTSYISLSPVASLSMQSHFHQRLQDENRHSAITRFSRTTNMGVTAMTCGGAFRMLKSGAKFSSPPHHRLNSKRSWLTSEHVQSLKQYQRLNKSLIPENSRIALRRKYKIELQNMVRSWFAMQDHTLDSNILIQHLNHDLSYLGATKRFAYDPAMTKLFTELLKRELSNSINNGEQHTNGSFLVLPNIRVCGATALSSPVTVGIPSLTAFFGFVHAFERNINRTTSSFRVESFAICVHQLHVEKRGLTAEFVEKGDGTISAPATRDDWQCDVVFSLILNTNFAQHIDQDTLVTSLPKRLARGSAKIAIDDFKHINSFSTLETAIESLPIEAGRWLSLYAQSNNNLSDLLAAMTEDHQLMASCVGYHLLEEPKDKPNSLRGYKHAIAECIIGLINSITFSSETDPNTIFWSLKNYQNYLVVQPRSINDETTDKSSL

SEQ ID NO: 150 - DNA, 1059 bp, Synthetic construct
  source 1..1059: mol_type = other DNA
atgaaactaccgacaaatctagcctatgagcgctctatcgacccatcagatgtctgtttttttgtcgtctggcccgatgatagaaaaacacctttaacctacaattctcgtactctgctcgggcaaatggaagcggcatcattagcctatgatgtctcaggtcaaccaataaaaagtgccaccgctgaggcgttagctcaagggaaccctcatcaagttgatttctgccacgttccatatggtgcgagtcatattgaatgcagtttctccgtctcgttttcttctgaactacgtcaaccatataagtgtaactcaagcaaagttaaacaaacgctagtgcaattagtcgagctctacgaaacgaaaatcggctggactgagctagcaacccgatatttgatgaatatttgcaacggtaaatggctgtggaaaaatacccgtaaagcttattgctggaacattgtacttacaccttggccatggaacggggaaaaggttggatttgaagatatccgtactaactacacctcacggcaagactttaaaaataataaaaattggtctgctatagttgaaatgatcaaaaccgcattttctagtactgatgggctggcgatatttgaagtcagggccaccttgcacttgccaacgaatgctatggtgcggccaagccaagttttcacagaaaaagaaagtggcagtaaaagtaaatctaaaactcaaaacagtcgagtttttcagagtacaactattgatggtgaacgatcgccaatactaggggcctttaaaacgggagcagctattgcaaccattgacgactggtatcctgaagccactgagccactaagggtcggacggtttggggttcatcgcgaagatgtcacttgctaccgtcatccgtctaccggaaaagattttttctcgatattacaacaagcagagcactatattgaagtgttgagcgccaacaaaactcccgctcaagaaactatcaacgacatgcactttttaatggctaacctgattaagggtgggatgttccagcataaaggagactga

SEQ ID NO: 151 - protein, 352 aa, Vibrio cholerae
MKLPTNLAYERSIDPSDVCFFVVWPDDRKTPLTYNSRTLLGQMEAASLAYDVSGQPIKSATAEALAQGNPHQVDFCHVPYGASHIECSFSVSFSSELRQPYKCNSSKVKQTLVQLVELYETKIGWTELATRYLMNICNGKWLWKNTRKAYCWNIVLTPWPWNGEKVGFEDIRTNYTSRQDFKNNKNWSAIVEMIKTAFSSTDGLAIFEVRATLHLPTNAMVRPSQVFTEKESGSKSKSKTQNSRVFQSTTIDGERSPILGAFKTGAAIATIDDWYPEATEPLRVGRFGVHREDVTCYRHPSTGKDFFSILQQAEHYIEVLSANKTPAQETINDMHFLMANLIKGGMFQHKGD

SEQ ID NO: 152 - DNA, 600 bp, Synthetic construct
  source 1..600: mol_type = other DNA
gtgaaatggtattataagacaatcacctttctgccagagttgtgcaacaacgagtcactggctgcaaagtgtcttcgcgttctgcatggatttaactatcagtatgagacacgaaatattggcgtttcatttccgctttggtgtgatgcaacggttggaaaaaagatttcatttgtcagcaagaacaagatagaactcgacttactacttaaacaacactatttcgtccaaatggaacaacttcaatattttcatatatccaacactgttctcgtcccagaagattgtacatacgtttcctttagacgctgtcaatctatagataagctcacagcagcagggctggcaaggaaaatcagacgcctggagaaacgtgctctatctagaggcgagcaatttgacccatcatcttttgctcaaaaagagcatactgcaatagcgcactaccactcacttggggagtccagcaaacagacgaaccgcaactttcgactcaatatcaggatgctctcggagcaaccccgtgaggggaactcgatttttagtagctatggcttatcaaattcagaaaactcgtttcagcctgtacccttaatctga

SEQ ID NO: 153 - protein, 199 aa, Vibrio cholerae
MKWYYKTITFLPELCNNESLAAKCLRVLHGFNYQYETRNIGVSFPLWCDATVGKKISFVSKNKIELDLLLKQHYFVQMEQLQYFHISNTVLVPEDCTYVSFRRCQSIDKLTAAGLARKIRRLEKRALSRGEQFDPSSFAQKEHTAIAHYHSLGESSKQTNRNFRLNIRMLSEQPREGNSIFSSYGLSNSENSFQPVPLI

SEQ ID NO: 154 - DNA, 28 bp, Synthetic construct
  source 1..28: mol_type = other DNA
gtgaactgccgagtaggtagctgataac

SEQ ID NO: 155 - DNA, 32 bp, Synthetic construct
  source 1..32: mol_type = other DNA
gttgtctgacacttgtcacaaaccgctaggag

SEQ ID NO: 156 - RNA, 60 nt, Synthetic construct
  source 1..60: mol_type = other RNA
ctgataacgttgtctgacacttgtcacaaaccgctaggaggtgaactgccgagtaggtag

SEQ ID NO: 157 - DNA, 28 bp, Synthetic construct
  source 1..28: mol_type = other DNA
gtgaactgccgagtaggtagctgataac

SEQ ID NO: 158 - DNA, 32 bp, Synthetic construct
  source 1..32: mol_type = other DNA
tgggaggattcataaagcattgtttgttggct

SEQ ID NO: 159 - RNA, 60 nt, Synthetic construct
  source 1..60: mol_type = other RNA
ctgataactgggaggattcataaagcattgtttgttggctgtgaactgccgagtaggtag

SEQ ID NO: 160 - DNA, 28 bp, Synthetic construct
  source 1..28: mol_type = other DNA
gtgaactgccgagtaggtagctgataac

SEQ ID NO: 161 - DNA, 32 bp, Synthetic construct
  source 1..32: mol_type = other DNA
gtcatcttcggctactttttctctgtcacaga

SEQ ID NO: 162 - RNA, 60 nt, Synthetic construct
  source 1..60: mol_type = other RNA
ctgataacgtcatcttcggctactttttctctgtcacagagtgaactgccgagtaggtag

SEQ ID NO: 163 - DNA, 28 bp, Synthetic construct
  source 1..28: mol_type = other DNA
gtgaactgccgagtaggtagctgataac

SEQ ID NO: 164 - DNA, 32 bp, Synthetic construct
  source 1..32: mol_type = other DNA
tatcccattacggtcaatccgccgtttgttcc

SEQ ID NO: 165 - RNA, 60 nt, Synthetic construct
  source 1..60: mol_type = other RNA
ctgataactatcccattacggtcaatccgccgtttgttccgtgaactgccgagtaggtag

SEQ ID NO: 166 - DNA, 28 bp, Synthetic construct
  source 1..28: mol_type = other DNA
gtgaactgccgagtaggtagctgataac

SEQ ID NO: 167 - DNA, 32 bp, Synthetic construct
  source 1..32: mol_type = other DNA
agtacagcgcggctgaaatcatcattaaagcg

SEQ ID NO: 168 - RNA, 60 nt, Synthetic construct
  source 1..60: mol_type = other RNA
ctgataacagtacagcgcggctgaaatcatcattaaagcggtgaactgccgagtaggtag

SEQ ID NO: 169 - DNA, 28 bp, Synthetic construct
  source 1..28: mol_type = other DNA
gtgaactgccgagtaggtagctgataac

SEQ ID NO: 170 - DNA, 32 bp, Synthetic construct
  source 1..32: mol_type = other DNA
agcggtgcacgggtgaactgatcgcgcagcgg

SEQ ID NO: 171 - RNA, 60 nt, Synthetic construct
  source 1..60: mol_type = other RNA
ctgataacagcggtgcacgggtgaactgatcgcgcagcgggtgaactgccgagtaggtag

SEQ ID NO: 172 - DNA, 28 bp, Synthetic construct
  source 1..28: mol_type = other DNA
gtgaactgccgagtaggtagctgataac

SEQ ID NO: 173 - DNA, 32 bp, Synthetic construct
  source 1..32: mol_type = other DNA
gcgccactggtgtgggccataattcaattcgc

SEQ ID NO: 174 - RNA, 60 nt, Synthetic construct
  source 1..60: mol_type = other RNA
ctgataacgcgccactggtgtgggccataattcaattcgcgtgaactgccgagtaggtag

SEQ ID NO: 175 - DNA, 28 bp, Synthetic construct
  source 1..28: mol_type = other DNA
gtgaactgccgagtaggtagctgataac

SEQ ID NO: 176 - DNA, 32 bp, Synthetic construct
  source 1..32: mol_type = other DNA
aaaagtttgtgttttttaaatagtacataatg

SEQ ID NO: 177 - RNA, 60 nt, Synthetic construct
  source 1..60: mol_type = other RNA
ctgataacaaaagtttgtgttttttaaatagtacataatggtgaactgccgagtaggtag

SEQ ID NO: 178 - DNA, 28 bp, Synthetic construct
  source 1..28: mol_type = other DNA
gtgaactgccgagtaggtagctgataac

SEQ ID NO: 179 - DNA, 32 bp, Synthetic construct
  source 1..32: mol_type = other DNA
cgagtttgtcagaaagcagaccaaacagcggt

SEQ ID NO: 180 - RNA, 60 nt, Synthetic construct
  source 1..60: mol_type = other RNA
ctgataaccgagtttgtcagaaagcagaccaaacagcggtgtgaactgccgagtaggtag

SEQ ID NO: 181 - DNA, 28 bp, Synthetic construct
  source 1..28: mol_type = other DNA
gtgaactgccgagtaggtagctgataac

SEQ ID NO: 182 - DNA, 32 bp, Synthetic construct
  source 1..32: mol_type = other DNA
gcctggcttggcgatgctcgcctgatcgacaa

SEQ ID NO: 183 - RNA, 60 nt, Synthetic construct
  source 1..60: mol_type = other RNA
ctgataacgcctggcttggcgatgctcgcctgatcgacaagtgaactgccgagtaggtag

SEQ ID NO: 184 - DNA, 28 bp, Synthetic construct
  source 1..28: mol_type = other DNA
gtgaactgccgagtaggtagctgataac

SEQ ID NO: 185 - DNA, 32 bp, Synthetic construct
  source 1..32: mol_type = other DNA
gtcagagtggcgtatccgatgaatcaccacag

SEQ ID NO: 186 - RNA, 60 nt, Synthetic construct
  source 1..60: mol_type = other RNA
ctgataacgtcagagtggcgtatccgatgaatcaccacaggtgaactgccgagtaggtag

SEQ ID NO: 187 - DNA, 28 bp, Synthetic construct
  source 1..28: mol_type = other DNA
gtgaactgccgagtaggtagctgataac

SEQ ID NO: 188 - DNA, 32 bp, Synthetic construct
  source 1..32: mol_type = other DNA
tcgatccgtgggtgtttatgttctcagcagga

SEQ ID NO: 189 - RNA, 60 nt, Synthetic construct
  source 1..60: mol_type = other RNA
ctgataactcgatccgtgggtgtttatgttctcagcaggagtgaactgccgagtaggtag

SEQ ID NO: 190 - DNA, 28 bp, Synthetic construct
  source 1..28: mol_type = other DNA
gtgaactgccgagtaggtagctgataac

SEQ ID NO: 191 - DNA, 32 bp, Synthetic construct
  source 1..32: mol_type = other DNA
gcattactaagctggcgcgtgaagctgtagaa

SEQ ID NO: 192 - RNA, 60 nt, Synthetic construct
  source 1..60: mol_type = other RNA
ctgataacgcattactaagctggcgcgtgaagctgtagaagtgaactgccgagtaggtag

SEQ ID NO: 193 - DNA, 28 bp, Synthetic construct
  source 1..28: mol_type = other DNA
gtgaactgccgagtaggtagctgataac

SEQ ID NO: 194 - DNA, 32 bp, Synthetic construct
  source 1..32: mol_type = other DNA
gagaatattgtggcaaaagcgcataaggtgct

SEQ ID NO: 195 - RNA, 60 nt, Synthetic construct
  source 1..60: mol_type = other RNA
ctgataacgagaatattgtggcaaaagcgcataaggtgctgtgaactgccgagtaggtag

SEQ ID NO: 196 - DNA, 28 bp, Synthetic construct
  source 1..28: mol_type = other DNA
gtgaactgccgagtaggtagctgataac

SEQ ID NO: 197 - DNA, 32 bp, Synthetic construct
  source 1..32: mol_type = other DNA
gcagaagtgcacggcgtgtgcggcggcgagca

SEQ ID NO: 198 - RNA, 60 nt, Synthetic construct
  source 1..60: mol_type = other RNA
ctgataacgcagaagtgcacggcgtgtgcggcggcgagcagtgaactgccgagtaggtag

SEQ ID NO: 199 - DNA, 28 bp, Synthetic construct
  source 1..28: mol_type = other DNA
gtgaactgccgagtaggtagctgataac

SEQ ID NO: 200 - DNA, 32 bp, Synthetic construct
  source 1..32: mol_type = other DNA
ttacttacggcgttgcgcattctcattgcacc

SEQ ID NO: 201 - RNA, 60 nt, Synthetic construct
  source 1..60: mol_type = other RNA
ctgataacttacttacggcgttgcgcattctcattgcaccgtgaactgccgagtaggtag

SEQ ID NO: 202 - DNA, 28 bp, Synthetic construct
  source 1..28: mol_type = other DNA
gtgaactgccgagtaggtagctgataac

SEQ ID NO: 203 - DNA, 32 bp, Synthetic construct
  source 1..32: mol_type = other DNA
ggggcgtaaaaagaaggggcgctgattaacgc

SEQ ID NO: 204 - RNA, 60 nt, Synthetic construct
  source 1..60: mol_type = other RNA
ctgataacggggcgtaaaaagaaggggcgctgattaacgcgtgaactgccgagtaggtag

SEQ ID NO: 205 - DNA, 28 bp, Synthetic construct
  source 1..28: mol_type = other DNA
gtgaactgccgagtaggtagctgataac

SEQ ID NO: 206 - DNA, 32 bp, Synthetic construct
  source 1..32: mol_type = other DNA
tcttgctgagattgataaggtaattaacctta

SEQ ID NO: 207 - RNA, 60 nt, Synthetic construct
  source 1..60: mol_type = other RNA
ctgataactcttgctgagattgataaggtaattaaccttagtgaactgccgagtaggtag

SEQ ID NO: 208 - DNA, 28 bp, Synthetic construct
  source 1..28: mol_type = other DNA
gtgaactgccgagtaggtagctgataac

SEQ ID NO: 209 - DNA, 32 bp, Synthetic construct
  source 1..32: mol_type = other DNA
gactgcaagtgagtcggcttttttgttgctaa

SEQ ID NO: 210 - RNA, 60 nt, Synthetic construct
  source 1..60: mol_type = other RNA
ctgataacgactgcaagtgagtcggcttttttgttgctaagtgaactgccgagtaggtag

SEQ ID NO: 211 - DNA, 28 bp, Synthetic construct
  source 1..28: mol_type = other DNA
gtgaactgccgagtaggtagctgataac

SEQ ID NO: 212 - DNA, 32 bp, Synthetic construct
  source 1..32: mol_type = other DNA
gcaaacaactgagaaatttttaattcgctctg

SEQ ID NO: 213 - RNA, 60 nt, Synthetic construct
  source 1..60: mol_type = other RNA
ctgataacgcaaacaactgagaaatttttaattcgctctggtgaactgccgagtaggtag

SEQ ID NO: 214 - DNA, 28 bp, Synthetic construct
  source 1..28: mol_type = other DNA
gtgaactgccgagtaggtagctgataac

SEQ ID NO: 215 - DNA, 32 bp, Synthetic construct
  source 1..32: mol_type = other DNA
attgaacgcgcgaagcacgccgccggacaggt

SEQ ID NO: 216 - RNA, 60 nt, Synthetic construct
  source 1..60: mol_type = other RNA
ctgataacattgaacgcgcgaagcacgccgccggacaggtgtgaactgccgagtaggtag

SEQ ID NO: 217 - DNA, 28 bp, Synthetic construct
  source 1..28: mol_type = other DNA
gtgaactgccgagtaggtagctgataac

SEQ ID NO: 218 - DNA, 32 bp, Synthetic construct
  source 1..32: mol_type = other DNA
tggcccacgttgtggatcacccgttaaacaaa

SEQ ID NO: 219 - RNA, 60 nt, Synthetic construct
  source 1..60: mol_type = other RNA
ctgataactggcccacgttgtggatcacccgttaaacaaagtgaactgccgagtaggtag

SEQ ID NO: 220 - DNA, 28 bp, Synthetic construct
  source 1..28: mol_type = other DNA
gtgaactgccgagtaggtagctgataac

SEQ ID NO: 221 - DNA, 32 bp, Synthetic construct
  source 1..32: mol_type = other DNA
tgaagataggtctggtcggcgaagaaaccgcc

SEQ ID NO: 222 - RNA, 60 nt, Synthetic construct
  source 1..60: mol_type = other RNA
ctgataactgaagataggtctggtcggcgaagaaaccgccgtgaactgccgagtaggtag

SEQ ID NO: 223 - DNA, 28 bp, Synthetic construct
  source 1..28: mol_type = other DNA
gtgaactgccgagtaggtagctgataac

SEQ ID NO: 224 - DNA, 32 bp, Synthetic construct
  source 1..32: mol_type = other DNA
agcctgtaatctctgcttaaaagcacagaatc

SEQ ID NO: 225 - RNA, 60 nt, Synthetic construct
  source 1..60: mol_type = other RNA
ctgataacagcctgtaatctctgcttaaaagcacagaatcgtgaactgccgagtaggtag

SEQ ID NO: 226 - DNA, 28 bp, Synthetic construct
  source 1..28: mol_type = other DNA
gtgaactgccgagtaggtagctgataac

SEQ ID NO: 227 - DNA, 32 bp, Synthetic construct
  source 1..32: mol_type = other DNA
tgagattttcactcgtcagtgtgaacacaatt

SEQ ID NO: 228 - RNA, 60 nt, Synthetic construct
  source 1..60: mol_type = other RNA
ctgataactgagattttcactcgtcagtgtgaacacaattgtgaactgccgagtaggtag

SEQ ID NO: 229 - DNA, 28 bp, Synthetic construct
  source 1..28: mol_type = other DNA
gtgaactgccgagtaggtagctgataac

SEQ ID NO: 230 - DNA, 32 bp, Synthetic construct
  source 1..32: mol_type = other DNA
gtacagcgcggctgaaatcatcattaaagcga

SEQ ID NO: 231 - RNA, 60 nt, Synthetic construct
  source 1..60: mol_type = other RNA
ctgataacgtacagcgcggctgaaatcatcattaaagcgagtgaactgccgagtaggtag

SEQ ID NO: 232 - DNA, 28 bp, Synthetic construct
  source 1..28: mol_type = other DNA
gtgaactgccgagtaggtagctgataac

SEQ ID NO: 233 - DNA, 32 bp, Synthetic construct
  source 1..32: mol_type = other DNA
tacagcgcggctgaaatcatcattaaagcgag

SEQ ID NO: 234 - RNA, 60 nt, Synthetic construct
  source 1..60: mol_type = other RNA
ctgataactacagcgcggctgaaatcatcattaaagcgaggtgaactgccgagtaggtag

SEQ ID NO: 235 - DNA, 28 bp, Synthetic construct
  source 1..28: mol_type = other DNA
gtgaactgccgagtaggtagctgataac

SEQ ID NO: 236 - DNA, 32 bp, Synthetic construct
  source 1..32: mol_type = other DNA
acagcgcggctgaaatcatcattaaagcgagt

SEQ ID NO: 237 - RNA, 60 nt, Synthetic construct
  source 1..60: mol_type = other RNA
ctgataacacagcgcggctgaaatcatcattaaagcgagtgtgaactgccgagtaggtag

SEQ ID NO: 238 - DNA, 28 bp, Synthetic construct
  source 1..28: mol_type = other DNA
gtgaactgccgagtaggtagctgataac

SEQ ID NO: 239 - DNA, 32 bp, Synthetic construct
  source 1..32: mol_type = other DNA
cagcgcggctgaaatcatcattaaagcgagtg

SEQ ID NO: 240 - RNA, 60 nt, Synthetic construct
  source 1..60: mol_type = other RNA
ctgataaccagcgcggctgaaatcatcattaaagcgagtggtgaactgccgagtaggtag

SEQ ID NO: 241 - DNA, 28 bp, Synthetic construct
  source 1..28: mol_type = other DNA
gtgaactgccgagtaggtagctgataac

SEQ ID NO: 242 - DNA, 32 bp, Synthetic construct
  source 1..32: mol_type = other DNA
agcgcggctgaaatcatcattaaagcgagtgg

SEQ ID NO: 243 - RNA, 60 nt, Synthetic construct
  source 1..60: mol_type = other RNA
ctgataacagcgcggctgaaatcatcattaaagcgagtgggtgaactgccgagtaggtag

SEQ ID NO: 244 - DNA, 28 bp, Synthetic construct
  source 1..28: mol_type = other DNA
gtgaactgccgagtaggtagctgataac

SEQ ID NO: 245 - DNA, 32 bp, Synthetic construct
  source 1..32: mol_type = other DNA
gcgcggctgaaatcatcattaaagcgagtggc

SEQ ID NO: 246 - RNA, 60 nt, Synthetic construct
  source 1..60: mol_type = other RNA
ctgataacgcgcggctgaaatcatcattaaagcgagtggcgtgaactgccgagtaggtag

SEQ ID NO: 247 - DNA, 28 bp, Synthetic construct
  source 1..28: mol_type = other DNA
gtgaactgccgagtaggtagctgataac

SEQ ID NO: 248 - DNA, 32 bp, Synthetic construct
  source 1..32: mol_type = other DNA
cgcggctgaaatcatcattaaagcgagtggca

SEQ ID NO: 249 - RNA, 60 nt, Synthetic construct
  source 1..60: mol_type = other RNA
ctgataaccgcggctgaaatcatcattaaagcgagtggcagtgaactgccgagtaggtag

SEQ ID NO: 250 - DNA, 28 bp, Synthetic construct
  source 1..28: mol_type = other DNA
gtgaactgccgagtaggtagctgataac

SEQ ID NO: 251 - DNA, 32 bp, Synthetic construct
  source 1..32: mol_type = other DNA
gcggctgaaatcatcattaaagcgagtggcaa

SEQ ID NO: 252 - RNA, 60 nt, Synthetic construct
  source 1..60: mol_type = other RNA
ctgataacgcggctgaaatcatcattaaagcgagtggcaagtgaactgccgagtaggtag

SEQ ID NO: 253 - DNA, 28 bp, Synthetic construct
  source 1..28: mol_type = other DNA
gtgaactgccgagtaggtagctgataac

SEQ ID NO: 254 - DNA, 32 bp, Synthetic construct
  source 1..32: mol_type = other DNA
cggctgaaatcatcattaaagcgagtggcaac

SEQ ID NO: 255 - RNA, 60 nt, Synthetic construct
  source 1..60: mol_type = other RNA
ctgataaccggctgaaatcatcattaaagcgagtggcaacgtgaactgccgagtaggtag

SEQ ID NO: 256 - DNA, 28 bp, Synthetic construct
  source 1..28: mol_type = other DNA
gtgaactgccgagtaggtagctgataac

SEQ ID NO: 257 - DNA, 32 bp, Synthetic construct
  source 1..32: mol_type = other DNA
ggctgaaatcatcattaaagcgagtggcaaca

SEQ ID NO: 258 - RNA, 60 nt, Synthetic construct
  source 1..60: mol_type = other RNA
ctgataacggctgaaatcatcattaaagcgagtggcaacagtgaactgccgagtaggtag

SEQ ID NO: 259 - DNA, 28 bp, Synthetic construct
  source 1..28: mol_type = other DNA
gtgaactgccgagtaggtagctgataac

SEQ ID NO: 260 - DNA, 32 bp, Synthetic construct
  source 1..32: mol_type = other DNA
gctgaaatcatcattaaagcgagtggcaacat

SEQ ID NO: 261 - RNA, 60 nt, Synthetic construct
  source 1..60: mol_type = other RNA
ctgataacgctgaaatcatcattaaagcgagtggcaacatgtgaactgccgagtaggtag

SEQ ID NO: 262 - DNA, 28 bp, Synthetic construct
  source 1..28: mol_type = other DNA
gtgaactgccgagtaggtagctgataac

SEQ ID NO: 263 - DNA, 32 bp, Synthetic construct
  source 1..32: mol_type = other DNA
ctgaaatcatcattaaagcgagtggcaacatg

SEQ ID NO: 264 - RNA, 60 nt, Synthetic construct
  source 1..60: mol_type = other RNA
ctgataacctgaaatcatcattaaagcgagtggcaacatggtgaactgccgagtaggtag

SEQ ID NO: 265 - DNA, 28 bp, Synthetic construct
  source 1..28: mol_type = other DNA
gtgaactgccgagtaggtagctgataac

SEQ ID NO: 266 - DNA, 32 bp, Synthetic construct
  source 1..32: mol_type = other DNA
tgaaatcatcattaaagcgagtggcaacatgg

SEQ ID NO: 267 - RNA, 60 nt, Synthetic construct
  source 1..60: mol_type = other RNA
ctgataactgaaatcatcattaaagcgagtggcaacatgggtgaactgccgagtaggtag

SEQ ID NO: 268 - DNA, 28 bp, Synthetic construct
  source 1..28: mol_type = other DNA
gtgaactgccgagtaggtagctgataac

SEQ ID NO: 269 - DNA, 32 bp, Synthetic construct
  source 1..32: mol_type = other DNA
gaaatcatcattaaagcgagtggcaacatgga

SEQ ID NO: 270 - RNA, 60 nt, Synthetic construct
  source 1..60: mol_type = other RNA
ctgataacgaaatcatcattaaagcgagtggcaacatggagtgaactgccgagtaggtag

SEQ ID NO: 271 - DNA, 28 bp, Synthetic construct
  source 1..28: mol_type = other DNA
gtgaactgccgagtaggtagctgataac

SEQ ID NO: 272 - DNA, 32 bp, Synthetic construct
  source 1..32: mol_type = other DNA
aaatcatcattaaagcgagtggcaacatggaa

SEQ ID NO: 273 - RNA, 60 nt, Synthetic construct
  source 1..60: mol_type = other RNA
ctgataacaaatcatcattaaagcgagtggcaacatggaagtgaactgccgagtaggtag

SEQ ID NO: 274 - DNA, 28 bp, Synthetic construct
  source 1..28: mol_type = other DNA
gtgaactgccgagtaggtagctgataac

SEQ ID NO: 275 - DNA, 32 bp, Synthetic construct
  source 1..32: mol_type = other DNA
aatcatcattaaagcgagtggcaacatggaaa

SEQ ID NO: 276 - RNA, 60 nt, Synthetic construct
  source 1..60: mol_type = other RNA
ctgataacaatcatcattaaagcgagtggcaacatggaaagtgaactgccgagtaggtag

SEQ ID NO: 277 - DNA, 28 bp, Synthetic construct
  source 1..28: mol_type = other DNA
gtgaactgccgagtaggtagctgataac

SEQ ID NO: 278 - DNA, 32 bp, Synthetic construct
  source 1..32: mol_type = other DNA
tcatcagcgcggctgaaatcatcattaaagcg

SEQ ID NO: 279 - RNA, 60 nt, Synthetic construct
  source 1..60: mol_type = other RNA
ctgataactcatcagcgcggctgaaatcatcattaaagcggtgaactgccgagtaggtag

SEQ ID NO: 280 - DNA, 28 bp, Synthetic construct
  source 1..28: mol_type = other DNA
gtgaactgccgagtaggtagctgataac

SEQ ID NO: 281 - DNA, 32 bp, Synthetic construct
  source 1..32: mol_type = other DNA
agtagtcggcggctgaaatcatcattaaagcg

SEQ ID NO: 282 - RNA, 60 nt, Synthetic construct
  source 1..60: mol_type = other RNA
ctgataacagtagtcggcggctgaaatcatcattaaagcggtgaactgccgagtaggtag

SEQ ID NO: 283 - DNA, 28 bp, Synthetic construct
  source 1..28: mol_type = other DNA
gtgaactgccgagtaggtagctgataac

SEQ ID NO: 284 - DNA, 32 bp, Synthetic construct
  source 1..32: mol_type = other DNA
agtacagccgccctgaaatcatcattaaagcg

SEQ ID NO: 285 - RNA, 60 nt, Synthetic construct
  source 1..60: mol_type = other RNA
ctgataacagtacagccgccctgaaatcatcattaaagcggtgaactgccgagtaggtag

SEQ ID NO: 286 - DNA, 28 bp, Synthetic construct
  source 1..28: mol_type = other DNA
gtgaactgccgagtaggtagctgataac

SEQ ID NO: 287 - DNA, 32 bp, Synthetic construct
  source 1..32: mol_type = other DNA
agtacagcgcgggactaatcatcattaaagcg

SEQ ID NO: 288 - RNA, 60 nt, Synthetic construct
  source 1..60: mol_type = other RNA
ctgataacagtacagcgcgggactaatcatcattaaagcggtgaactgccgagtaggtag

SEQ ID NO: 289 - DNA, 28 bp, Synthetic construct
  source 1..28: mol_type = other DNA
gtgaactgccgagtaggtagctgataac

SEQ ID NO: 290 - DNA, 32 bp, Synthetic construct
  source 1..32: mol_type = other DNA
agtacagcgcggctgattagatcattaaagcg

SEQ ID NO: 291 - RNA, 60 nt, Synthetic construct
  source 1..60: mol_type = other RNA
ctgataacagtacagcgcggctgattagatcattaaagcggtgaactgccgagtaggtag

SEQ ID NO: 292 - DNA, 28 bp, Synthetic construct
  source 1..28: mol_type = other DNA
gtgaactgccgagtaggtagctgataac

SEQ ID NO: 293 - DNA, 32 bp, Synthetic construct
  source 1..32: mol_type = other DNA
agtacagcgcggctgaaatctagtttaaagcg

SEQ ID NO: 294 - RNA, 60 nt, Synthetic construct
  source 1..60: mol_type = other RNA
ctgataacagtacagcgcggctgaaatctagtttaaagcggtgaactgccgagtaggtag

SEQ ID NO: 295 - DNA, 28 bp, Synthetic construct
  source 1..28: mol_type = other DNA
gtgaactgccgagtaggtagctgataac

SEQ ID NO: 296 - DNA, 32 bp, Synthetic construct
  source 1..32: mol_type = other DNA
agtacagcgcggctgaaatcatcaaattagcg

SEQ ID NO: 297 - RNA, 60 nt, Synthetic construct
  source 1..60: mol_type = other RNA
ctgataacagtacagcgcggctgaaatcatcaaattagcggtgaactgccgagtaggtag

SEQ ID NO: 298 - DNA, 28 bp, Synthetic construct
  source 1..28: mol_type = other DNA
gtgaactgccgagtaggtagctgataac

SEQ ID NO: 299 - DNA, 32 bp, Synthetic construct
  source 1..32: mol_type = other DNA
agtacagcgcggctgaaatcatcattaatcgc

SEQ ID NO: 300 - RNA, 60 nt, Synthetic construct
  source 1..60: mol_type = other RNA
ctgataacagtacagcgcggctgaaatcatcattaatcgcgtgaactgccgagtaggtag

SEQ ID NO: 301 - DNA, 28 bp, Synthetic construct
  source 1..28: mol_type = other DNA
gtgaactgccgagtaggtagctgataac

SEQ ID NO: 302 - skipped

SEQ ID NO: 303 - RNA, 36 nt, Synthetic construct
  source 1..36: mol_type = other RNA
ctgataacagtacagcgtgaactgccgagtaggtag

SEQ ID NO: 304 - DNA, 28 bp, Synthetic construct
  source 1..28: mol_type = other DNA
gtgaactgccgagtaggtagctgataac

SEQ ID NO: 305 - DNA, 14 bp, Synthetic construct
  source 1..14: mol_type = other DNA
agtacagcgcggct

SEQ ID NO: 306 - RNA, 42 nt, Synthetic construct
  source 1..42: mol_type = other RNA
ctgataacagtacagcgcggctgtgaactgccgagtaggtag

SEQ ID NO: 307 - DNA, 28 bp, Synthetic construct
  source 1..28: mol_type = other DNA
gtgaactgccgagtaggtagctgataac

SEQ ID NO: 308 - DNA, 20 bp, Synthetic construct
  source 1..20: mol_type = other DNA
agtacagcgcggctgaaatc

SEQ ID NO: 309 - RNA, 48 nt, Synthetic construct
  source 1..48: mol_type = other RNA
ctgataacagtacagcgcggctgaaatcgtgaactgccgagtaggtag

SEQ ID NO: 310 - DNA, 28 bp, Synthetic construct
  source 1..28: mol_type = other DNA
gtgaactgccgagtaggtagctgataac

SEQ ID NO: 311 - DNA, 26 bp, Synthetic construct
  source 1..26: mol_type = other DNA
agtacagcgcggctgaaatcatcatt

SEQ ID NO: 312 - RNA, 54 nt, Synthetic construct
  source 1..54: mol_type = other RNA
ctgataacagtacagcgcggctgaaatcatcattgtgaactgccgagtaggtag

SEQ ID NO: 313 - DNA, 28 bp, Synthetic construct
  source 1..28: mol_type = other DNA
gtgaactgccgagtaggtagctgataac

SEQ ID NO: 314 - DNA, 38 bp, Synthetic construct
  source 1..38: mol_type = other DNA
agtacagcgcggctgaaatcatcattaaagcgagtggc

SEQ ID NO: 315 - RNA, 66 nt, Synthetic construct
  source 1..66: mol_type = other RNA
ctgataacagtacagcgcggctgaaatcatcattaaagcgagtggcgtgaactgccgagtaggtag

SEQ ID NO: 316 - DNA, 28 bp, Synthetic construct
  source 1..28: mol_type = other DNA
gtgaactgccgagtaggtagctgataac

SEQ ID NO: 317 - DNA, 44 bp, Synthetic construct
  source 1..44: mol_type = other DNA
agtacagcgcggctgaaatcatcattaaagcgagtggcaacatg

SEQ ID NO: 318 - RNA, 72 nt, Synthetic construct
  source 1..72: mol_type = other RNA
ctgataacagtacagcgcggctgaaatcatcattaaagcgagtggcaacatggtgaactgccgagtaggtag

SEQ ID NO: 319 - DNA, 28 bp, Synthetic construct
  source 1..28: mol_type = other DNA
gtgaactgccgagtaggtagctgataac

SEQ ID NO: 320 - DNA, 50 bp, Synthetic construct
  source 1..50: mol_type = other DNA
agtacagcgcggctgaaatcatcattaaagcgagtggcaacatggaaatc

SEQ ID NO: 321 - RNA, 78 nt, Synthetic construct
  source 1..78: mol_type = other RNA
ctgataacagtacagcgcggctgaaatcatcattaaagcgagtggcaacatggaaatcgtgaactgccgagtaggtag

SEQ ID NO: 322 - DNA, 28 bp, Synthetic construct
  source 1..28: mol_type = other DNA
gtgaactgccgagtaggtagctgataac

SEQ ID NO: 323 - DNA, 56 bp, Synthetic construct
  source 1..56: mol_type = other DNA
agtacagcgcggctgaaatcatcattaaagcgagtggcaacatggaaatcgctgat

SEQ ID NO: 324 - RNA, 84 nt, Synthetic construct
  source 1..84: mol_type = other RNA
ctgataacagtacagcgcggctgaaatcatcattaaagcgagtggcaacatggaaatcgctgatgtgaactgccgagtaggtag

SEQ ID NO: 325 - DNA, 28 bp, Synthetic construct
  source 1..28: mol_type = other DNA
gtgaactgccgagtaggtagctgataac

SEQ ID NO: 326 - DNA, 32 bp, Synthetic construct
  source 1..32: mol_type = other DNA
ttacaggacgctttggcttcattgcttttcag

SEQ ID NO: 327 - RNA, 60 nt, Synthetic construct
  source 1..60: mol_type = other RNA
ctgataacttacaggacgctttggcttcattgcttttcaggtgaactgccgagtaggtag

SEQ ID NO: 328 - DNA, 20 bp, Synthetic construct
  source 1..20: mol_type = other DNA
ggagaccagtctaggtctcg

SEQ ID NO: 329 - RNA, 104 nt, Synthetic construct
  source 1..104: mol_type = other RNA
gggagaccagtctaggtctcggttttagagctagaaatagcaagttaaaataaggctagtccgttatcaacttgaaaaagtggcaccgagtcggtgcttttttt

SEQ ID NO: 330 - DNA, 20 bp, Synthetic construct
  source 1..20: mol_type = other DNA
cggattgaccgtaatgggat

SEQ ID NO: 331 - RNA, 104 nt, Synthetic construct
  source 1..104: mol_type = other RNA
gcggattgaccgtaatgggatgttttagagctagaaatagcaagttaaaataaggctagtccgttatcaacttgaaaaagtggcaccgagtcggtgcttttttt

SEQ ID NO: 332 - DNA, 20 bp, Synthetic construct
  source 1..20: mol_type = other DNA
tgatttcagccgcgctgtac

SEQ ID NO: 333 - RNA, 104 nt, Synthetic construct
  source 1..104: mol_type = other RNA
gtgatttcagccgcgctgtacgttttagagctagaaatagcaagttaaaataaggctagtccgttatcaacttgaaaaagtggcaccgagtcggtgcttttttt

SEQ ID NO: 334 - DNA, 28 bp, Synthetic construct
  source 1..28: mol_type = other DNA
gttcactgccgtataggcagctaagaaa

SEQ ID NO: 335 - DNA, 20 bp, Synthetic construct
  source 1..20: mol_type = other DNA
cgagacctcaattggtctcc

SEQ ID NO: 336 - RNA, 48 nt, Synthetic construct
  source 1..48: mol_type = other RNA
ctaagaaacgagacctcaattggtctccgttcactgccgtataggcag

SEQ ID NO: 337 - DNA, 28 bp, Synthetic construct
  source 1..28: mol_type = other DNA
gttcactgccgtataggcagctaagaaa

SEQ ID NO: 338 - DNA, 32 bp, Synthetic construct; identical to SEQ ID NO: 164
  source 1..32: mol_type = other DNA

SEQ ID NO: 339 - RNA, 60 nt, Synthetic construct
  source 1..60: mol_type = other RNA
ctaagaaatatcccattacggtcaatccgccgtttgttccgttcactgccgtataggcag

SEQ ID NO: 340 - DNA, 28 bp, Synthetic construct
  source 1..28: mol_type = other DNA
gttcactgccgtataggcagctaagaaa

SEQ ID NO: 341 - DNA, 32 bp, Synthetic construct; identical to SEQ ID NO: 167
  source 1..32: mol_type = other DNA

SEQ ID NO: 342 - RNA, 60 nt, Synthetic construct
  source 1..60: mol_type = other RNA
ctaagaaaagtacagcgcggctgaaatcatcattaaagcggttcactgccgtataggcag

SEQ ID NO: 343 - DNA, 20 bp, Synthetic construct
  source 1..20: mol_type = other DNA
gtggtattcactccagagcg

SEQ ID NO: 344 - DNA, 18 bp, Synthetic construct
  source 1..18: mol_type = other DNA
caacagtactgcgatgag

SEQ ID NO: 345 - DNA, 17 bp, Synthetic construct
  source 1..17: mol_type = other DNA
cgaacctgttcaacgac

SEQ ID NO: 346 - DNA, 16 bp, Synthetic construct
  source 1..16: mol_type = other DNA
cgaactgctgtcgaag

SEQ ID NO: 347 - DNA, 20 bp, Synthetic construct
  source 1..20: mol_type = other DNA
gcccgagtttgtcagaaagc

SEQ ID NO: 348 - DNA, 19 bp, Synthetic construct
  source 1..19: mol_type = other DNA
cgtcctgtggatcctctac

SEQ ID NO: 349 - DNA, 18 bp, Synthetic construct
  source 1..18: mol_type = other DNA
gcatcaacgcatatagcg

SEQ ID NO: 350 - DNA, 20 bp, Synthetic construct
  source 1..20: mol_type = other DNA
catgcagtattccaggactc

SEQ ID NO: 351 - DNA, 19 bp, Synthetic construct
  source 1..19: mol_type = other DNA
ggagagcaaatcttgttgc

SEQ ID NO: 352 - DNA, 19 bp, Synthetic construct
  source 1..19: mol_type = other DNA
caccacagatgaaacgccg

SEQ ID NO: 353 - DNA, 19 bp, Synthetic construct
  source 1..19: mol_type = other DNA
cgccgcacatctgaacttc

SEQ ID NO: 354 - DNA, 21 bp, Synthetic construct
  source 1..21: mol_type = other DNA
gtctgaatttgacctgagcgc

SEQ ID NO: 355 - DNA, 20 bp, Synthetic construct
  source 1..20: mol_type = other DNA
catgcagtattccaggactc

SEQ ID NO: 356 - DNA, 19 bp, Synthetic construct
  source 1..19: mol_type = other DNA
ggagagcaaatcttgttgc

SEQ ID NO: 357 - DNA, 21 bp, Synthetic construct
  source 1..21: mol_type = other DNA
gcgctcaggtcaaattcagac

SEQ ID NO: 358 - DNA, 20 bp, Synthetic construct
  source 1..20: mol_type = other DNA
ggagtgacggcagttatctg

SEQ ID NO: 359 - DNA, 19 bp, Synthetic construct
  source 1..19: mol_type = other DNA
cgccgcacatctgaacttc

SEQ ID NO: 360 - DNA, 24 bp, Synthetic construct
  source 1..24: mol_type = other DNA
ctgaagtttagaccatgaagaggc

SEQ ID NO: 361 - DNA, 24 bp, Synthetic construct
  source 1..24: mol_type = other DNA
ggttgttttgtggttaagttgctg

SEQ ID NO: 362 - DNA, 51 bp, Synthetic construct
  source 1..51: mol_type = other DNA
ctctttccctacacgacgctcttccgatctgcattgtttgttggctacgag

SEQ ID NO: 363 - DNA, 56 bp, Synthetic construct
  source 1..56: mol_type = other DNA
ctctttccctacacgacgctcttccgatctgtttgtaattgactgaatatcaacgc

SEQ ID NO: 364 - DNA, 60 bp, Synthetic construct
  source 1..60: mol_type = other DNA
ctctttccctacacgacgctcttccgatctggtgacagttatatgtaaggaatatgacag

SEQ ID NO: 365 - DNA, 55 bp, Synthetic construct
  source 1..55: mol_type = other DNA
ctctttccctacacgacgctcttccgatctgctactttttctctgtcacagaatg

SEQ ID NO: 366 - DNA, 48 bp, Synthetic construct
  source 1..48: mol_type = other DNA
ctctttccctacacgacgctcttccgatctcaccacagatgaaacgcc

SEQ ID NO: 367 - DNA, 52 bp, Synthetic construct
  source 1..52: mol_type = other DNA
ctctttccctacacgacgctcttccgatctcatcattaaagcgagtggcaac

SEQ ID NO: 368 - DNA, 56 bp, Synthetic construct
  source 1..56: mol_type = other DNA
gactggagttcagacgtgtgctcttccgatctctgaagtttagaccatgaagaggc

SEQ ID NO: 369 - DNA, 56 bp, Synthetic construct
  source 1..56: mol_type = other DNA
gactggagttcagacgtgtgctcttccgatctggttgttttgtggttaagttgctg

SEQ ID NO: 370 - DNA, 48 bp, Synthetic construct
  source 1..48: mol_type = other DNA
ctggagttcagacgtgtgctcttccgatctgcgtttctacctgcaggg

SEQ ID NO: 371 - DNA, 32 bp, Synthetic construct
  source 1..32: mol_type = other DNA
ctctttccctacacgacgctcttccgatctnn

SEQ ID NO: 372 - DNA, 30 bp, Synthetic construct
  source 1..30: mol_type = other DNA
agatcggaagagcgtcgtgtagggaaagag

SEQ ID NO: 373 - DNA, 22 bp, Synthetic construct
  source 1..22: mol_type = other DNA
acactctttccctacacgacgc

SEQ ID NO: 374 - DNA, 31 bp, Synthetic construct
  source 1..31: mol_type = other DNA
agatcggaagagcacacgtctgaactccagc

SEQ ID NO: 375 - DNA, 30 bp, Synthetic construct
  source 1..30: mol_type = other DNA
ctggagttcagacgtgtgctcttccgatct

SEQ ID NO: 376 - RNA, 30 nt, Synthetic construct
  source 1..30: mol_type = other RNA
ctctttccctacacgacgctcttccgatct

SEQ ID NO: 377 - DNA, 59 bp, Synthetic construct
  source 1..59: mol_type = other DNA
aatgatacggcgaccaccgagatctacacnnnnnnnnacactctttccctacacgacgc

SEQ ID NO: 378 - DNA, 55 bp, Synthetic construct
  source 1..55: mol_type = other DNA
caagcagaagacggcatacgagatnnnnnnnngtgactggagttcagacgtgtgc

SEQ ID NO: 379 - DNA, 24 bp, Synthetic construct
  source 1..24: mol_type = other DNA
catctacaccaacgtgacctatcc

SEQ ID NO: 380-385 - skipped (6 entries)

SEQ ID NO: 386 - DNA, 20 bp, Synthetic construct
  source 1..20: mol_type = other DNA
cgagacctcaattggtctcc

SEQ ID NO: 387 - DNA, 37 bp, Synthetic construct
  source 1..37: mol_type = other DNA
caccctgccataaagaaactgttacccgtaggtagtc

SEQ ID NO: 388 - DNA, 37 bp, Synthetic construct
  source 1..37: mol_type = other DNA
ccactcgctttaatgatgatttcagccgcgctgtact

SEQ ID NO: 389 - DNA, 37 bp, Synthetic construct
  source 1..37: mol_type = other DNA
tgtagtcggtttatgcagcaacgagacgtcacggaaa

SEQ ID NO: 390 - DNA, 37 bp, Synthetic construct
  source 1..37: mol_type = other DNA
atctgtggtgcaacgggcgctgggtcggttacggcca

SEQ ID NO: 391 - DNA, 37 bp, Synthetic construct
  source 1..37: mol_type = other DNA
cagataactgccgtcactccagcgcagcaccatcacc

SEQ ID NO: 392 - DNA, 37 bp, Synthetic construct
  source 1..37: mol_type = other DNA
ccgtgacgtctcgttgctgcataaaccgactacacaa

SEQ ID NO: 393 - DNA, 6858 bp, Synthetic construct; identical to SEQ ID NO: 6
  source 1..6858: mol_type = other DNA

SEQ ID NO: 394 - DNA, 7897 bp, Synthetic construct
  source 1..7897: mol_type = other DNA
ttcgacgccgcttcgttctaccatcgacaccaccacgctggcacccagttgatcggcgcgagatttaatcgccgcgacaatttgcgacggcgcgtgcagggccagactggaggtggcaacgccaatcagcaacgactgtttgcccgccagttgttgtgccacgcggttgggaatgtaattcagctccgccatcgccgcttccactttttcccgcgttttcgcagaaacgtggctggcctggttcaccacgcgggaaacggtctgataagagacaccggcatactctgcgacatcgtataacgttactggtttcacattcaccaccctgaattgactctcttccgggcgctatcatgccataccgcgaaaggttttgcgccattcgatggtgtccgggatctcgacgctctcccttatgcgactcctgcattaggaaattaatacgactcactatagcggattgaccgtaatgggatgttttagagctagaaatagcaagttaaaataaggctagtccgttatcaacttgaaaaagtggcaccgagtcggtgctttttttggtagtgcagcgcgatcgtaatcaggatcccatggtacgcgtgctagaggcatcaaataaaacgaaaggctcagtcgaaagactgggcctttcgttttatctgttgtttgtcggtgaacgctctcctgagtaggacaaatggatccgaattcgagctcggcgcgcctgcaggtcgacaagcttgcggccgcataatgcttaagtcgaacagaaagtaatcgtattgtacacggccgcataatcgaaattaatacgactcactataggggaattgtgagcggataacaattccccatcttagtatattagttaagtataagaaggagatatacatatggataagaaatactcaataggcttagctatcggcacaaatagcgtcggatgggcggtgatcactgatgaatataaggttccgtctaaaaagttcaaggttctgggaaatacagaccgccacagtatcaaaaaaaatcttataggggctcttttatttgacagtggagagacagcggaagcgactcgtctcaaacggacagctcgtagaaggtatacacgtcggaagaatcgtatttgttatctacaggagattttttcaaatgagatggcgaaagtagatgatagtttctttcatcgacttgaagagtcttttttggtggaagaagacaagaagcatgaacgtcatcctatttttggaaatatagtagatgaagttgcttatcatgagaaatatccaactatctatcatctgcgaaaaaaattggtagattctactgataaagcggatttgcgcttaatctatttggccttagcgcatatgattaagtttcgtggtcattttttgattgagggagatttaaatcctgataatagtgatgtggacaaactatttatccagttggtacaaacctacaatcaattatttgaagaaaaccctattaacgcaagtggagtagatgctaaagcgattctttctgcacgattgagtaaatcaagacgattagaaaatctcattgctcagctccccggtgagaagaaaaatggcttatttgggaatctcattgctttgtcattgggtttgacccctaattttaaatcaaattttgatttggcagaagatgctaaattacagctttcaaaagatacttacgatgatgatttagataatttattggcgcaaattggagatcaatatgctgatttgtttttggcagctaagaatttatcagatgctattttactttcagatatcctaagagtaaatactgaaataactaaggctcccctatcagcttcaatgattaaacgctacgatgaacatcatcaagacttgactcttttaaaagctttagttcgacaacaacttccagaaaagtataaagaaatcttttttgatcaatcaaaaaacggatatgcaggttatattgatgggggagctagccaagaagaattttataaatttatcaaaccaattttagaaaaaatggatggtactgaggaattattggtgaaactaaatcgtgaagatttgctgcgcaagcaacggacctttgacaacggctctattccccatcaaattcacttgggtgagctgcatgctattttgagaagacaagaagacttttatccatttttaaaagacaatcgtgagaagattgaaaaaatcttgacttttcgaattccttattatgttggtccattggcgcgtggcaatagtcgttttgcatggatgactcggaagtctgaagaaacaattaccccatggaattttgaagaagttgtcgataaaggtgcttcagctcaatcatttattgaacgcatgacaaactttgataaaaatcttccaaatgaaaaagtactaccaaaacatagtttgctttatgagtattttacggtttataacgaattgacaaaggtcaaatatgttactgaaggaatgcgaaaaccagcatttctttcaggtgaacagaagaaagccattgttgatttactcttcaaaacaaatcgaaaagtaaccgttaagcaattaaaagaagattatttcaaaaaaatagaatgttttgatagtgttgaaatttcaggagttgaagatagatttaatgcttcattaggtacctaccatgatttgctaaaaattattaaagataaagattttttggataatgaagaaaatgaagatatcttagaggatattgttttaacattgaccttatttgaagatagggagatgattgaggaaagacttaaaacatatgctcacctctttgatgataaggtgatgaaacagcttaaacgtcgccgttatactggttggggacgtttgtctcgaaaattgattaatggtattagggataagcaatctggcaaaacaatattagattttttgaaatcagatggttttgccaatcgcaattttatgcagctgatccatgatgatagtttgacatttaaagaagacattcaaaaagcacaagtgtctggacaaggcgatagtttacatgaacatattgcaaatttagctggtagccctgctattaaaaaaggtattttacagactgtaaaagttgttgatgaattggtcaaagtaatggggcggcataagccagaaaatatcgttattgaaatggcacgtgaaaatcagacaactcaaaagggccagaaaaattcgcgagagcgtatgaaacgaatcgaagaaggtatcaaagaattaggaagtcagattcttaaagagcatcctgttgaaaatactcaattgcaaaatgaaaagctctatctctattatctccaaaatggaagagacatgtatgtggaccaagaattagatattaatcgtttaagtgattatgatgtcgatgccattgttccacaaagtttccttaaagacgattcaatagacaataaggtcttaacgcgttctgataaaaatcgtggtaaatcggataacgttccaagtgaagaagtagtcaaaaagatgaaaaactattggagacaacttctaaacgccaagttaatcactcaacgtaagtttgataatttaacgaaagctgaacgtggaggtttgagtgaacttgataaagctggttttatcaaacgccaattggttgaaactcgccaaatcactaagcatgtggcacaaattttggatagtcgcatgaatactaaatacgatgaaaatgataaacttattcgagaggttaaagtgattaccttaaaatctaaattagtttctgacttccgaaaagatttccaattctataaagtacgtgagattaacaattaccatcatgcccatgatgcgtatctaaatgccgtcgttggaactgctttgattaagaaatatccaaaacttgaatcggagtttgtctatggtgattataaagtttatgatgttcgtaaaatgattgctaagtctgagcaagaaataggcaaagcaaccgcaaaatatttcttttactctaatatcatgaacttcttcaaaacagaaattacacttgcaaatggagagattcgcaaacgccctctaatcgaaactaatggggaaactggagaaattgtctgggataaagggcgagattttgccacagtgcgcaaagtattgtccatgccccaagtcaatattgtcaagaaaacagaagtacagacaggcggattctccaaggagtcaattttaccaaaaagaaattcggacaagcttattgctcgtaaaaaagactgggatccaaaaaaatatggtggttttgatagtccaacggtagcttattcagtcctagtggttgctaaggtggaaaaagggaaatcgaagaagttaaaatccgttaaagagttactagggatcacaattatggaaagaagttcctttgaaaaaaatccgattgactttttagaagctaaaggatataaggaagttaaaaaagacttaatcattaaactacctaaatatagtctttttgagttagaaaacggtcgtaaacggatgctggctagtgccggagaattacaaaaaggaaatgagctggctctgccaagcaaatatgtgaattttttatatttagctagtcattatgaaaagttgaagggtagtccagaagataacgaacaaaaacaattgtttgtggagcagcataagcattatttagatgagattattgagcaaatcagtgaattttctaagcgtgttattttagcagatgccaatttagataaagttcttagtgcatataacaaacatagagacaaaccaatacgtgaacaagcagaaaatattattcatttatttacgttgacgaatcttggagctcccgctgcttttaaatattttgatacaacaattgatcgtaaacgatatacgtctacaaaagaagttttagatgccactcttatccatcaatccatcactggtctttatgaaacacgcattgatttgagtcagctaggaggtgactaatagcctaggctgctgccaccgctgagcaataactagcataaccccttggggcctctaaacgggtcttgaggggttttttgctgaaacctcaggcatttgagaagcacacggtcacactgcttccggtagtcaataaaccggtaaaccagcaatagacataagcggctatttaacgaccctgccctgaaccgacgaccgggtcatcgtggccggatcttgcggcccctcggcttgaacgaattgttagacattatttgccgactaccttggtgatctcgcctttcacgtagtggacaaattcttccaactgatctgcgcgcgaggccaagcgatcttcttcttgtccaagataagcctgtctagcttcaagtatgacgggctgatactgggccggcaggcgctccattgcccagtcggcagcgacatccttcggcgcgattttgccggttactgcgctgtaccaaatgcgggacaacgtaagcactacatttcgctcatcgccagcccagtcgggcggcgagttccatagcgttaaggtttcatttagcgcctcaaatagatcctgttcaggaaccggatcaaagagttcctccgccgctggacctaccaaggcaacgctatgttctcttgcttttgtcagcaagatagccagatcaatgtcgatcgtggctggctcgaagatacctgcaagaatgtcattgcgctgccattctccaaattgcagttcgcgcttagctggataacgccacggaatgatgtcgtcgtgcacaacaatggtgacttctacagcgcggagaatctcgctctctccaggggaagccgaagtttccaaaaggtcgttgatcaaagctcgccgcgttgtttcatcaagccttacggtcaccgtaaccagcaaatcaatatcactgtgtggcttcaggccgccatccactgcggagccgtacaaatgtacggccagcaacgtcggttcgagatggcgctcgatgacgccaactacctctgatagttgagtcgatacttcggcgatcaccgcttccctcatactcttcctttttcaatattattgaagcatttatcagggttattgtctcatgagcggatacatatttgaatgtatttagaaaaataaacaaatagctagctcactcggtcgctacgctccgggcgtgagactgcggcgggcgctgcggacacatacaaagttacccacagattccgtggataagcaggggactaacatgtgaggcaaaacagcagggccgcgccggtggcgtttttccataggctccgccctcctgccagagttcacataaacagacgcttttccggtgcatctgtgggagccgtgaggctcaaccatgaatctgacagtacgggcgaaacccgacaggacttaaagatccccaccgtttccggcgggtcgctccctcttgcgctctcctgttccgaccctgccgtttaccggatacctgttccgcctttctcccttacgggaagtgtggcgctttctcatagctcacacactggtatctcggctcggtgtaggtcgttcgctccaagctgggctgtaagcaagaactccccgttcagcccgactgctgcgccttatccggtaactgttcacttgagtccaacccggaaaagcacggtaaaacgccactggcagcagccattggtaactgggagttcgcagaggatttgtttagctaaacacgcggttgctcttgaagtgtgcgccaaagtccggctacactggaaggacagatttggttgctgtgctctgcgaaagccagttaccacggttaagcagttccccaactgacttaaccttcgatcaaaccacctccccaggtggttttttcgtttacagggcaaaagattacgcgcagaaaaaaaggatctcaagaagatcctttgatcttttctactgaaccgctctagatttcagtgcaatttatctcttcaaatgtagcacctgaagtcagccccatacgatataagttgtaattctcatgttagtcatgccccgcgcccaccggaaggagctgactgggttgaaggctctcaagggcatcggtcgagatcccggtgcctaatgagtgagctaacttacattaattgcgttgcgctcactgcccgctttccagtcgggaaacctgtcgtgccagctgcattaatgaatcggccaacgcgcggggagaggcggtttgcgtattgggcgccagggtggtttttcttttcaccagtgagacgggcaacagctgattgcccttcaccgcctggccctgagagagttgcagcaagcggtccacgctggtttgccccagcaggcgaaaatcctgtttgatggtggttaacggcgggatataacatgagctgtcttcggtatcgtcgtatcccactaccgagatgtccgcaccaacgcgcagcccggactcggtaatggcgcgcattgcgcccagcgccatctgatcgttggcaaccagcatcgcagtgggaacgatgccctcattcagcatttgcatggtttgttgaaaaccggacatggcactccagtcgccttcccgttccgctatcggctgaatttgattgcgagtgagatatttatgccagccagccagacgcagacgcgccgagacagaacttaatgggcccgctaacagcgcgatttgctggtgacccaatgcgaccagatgctccacgcccagtcgcgtaccgtcttcatgggagaaaataatactgttgatgggtgtctggtcagagacatcaagaaataacgccggaacattagtgcaggcagcttccacagcaatggcatcctggtcatccagcggatagttaatgatcagcccactgacgcgttgcgcgagaagattgtgcaccgccgctttacaggc

SEQ ID NO: 395 - DNA, 8532 bp, Synthetic construct
  source 1..8532: mol_type = other DNA
attcaccaccctgaattgactctcttccgggcgctatcatgccataccgcgaaaggttttgcgccattcgatggtgtccgggatctcgacgctctcccttatgcgactcctgcattaggaaattaatacgactcactataggggaattgtgagcggataacaattcccctgtagaaataattttgtttaactttaataaggagatataccatgggtgaactgccgagtaggtagctgataacgctgaaatcatcattaaagcgagtggcaacatgtgaactgccgagtaggtagctgataacggatccgaattcgagctcggcgcgcctgcaggtcgacaagcttgcggccgcataatgcttaagtcgaacagaaagtaatcgtattgtacacggccgcataatcgaaattaatacgactcactataggggaattgtgagcggataacaattccccatcttagtatattagttaagtataagaaggagatatacatatgtttttgcaaagacctaaaccttacagcgatgaaagtttagaaagtttctttatccgagtggctaacaaaaatggctacggtgatgtccatcgcttcctagaagccactaaacgattccttcaagacattgaccataatggctatcaaacctttccgactgatataactcggataaacccatactcagctaaaaacagttccagcgcacgaactgcgtcattcctgaaacttgcacaattgacatttaatgaaccgccagagctacttgggttggcaattaacagaacaaacatgaaatactcgccgtcaactagcgcggttgttagaggtgcagaagtctttcctcgcagtttactacggacgcactccatcccctgctgtcctttgtgtctgcgagaaaatggctacgcctcctacctttggcactttcaggggtacgaatactgccacagccataacgtacctttaattaccacttgtagctgtggtaaggagtttgactaccgagtatctgggttaaagggcatttgctgcaaatgcaaggagcctatcaccttaaccagcagggagaacggtcatgaggcagcgtgtactgtttcaaactggcttgctggccatgaatctaaacctctgccaaatcttcctaaaagctaccgatggggtttagttcattggtggatgggtattaaagatagcgagttcgatcacttttcgttcgttcaatttttctcaaactggccaaggtcattccactcgataatcgaagatgaagtagagttcaaccttgagcatgctgttgtcagcacgtctgaattacgactaaaagatcttcttggtcgattgtttttcggttcaattcggttacctgagcggaatcttcaacacaatatcatccttggtgagcttctctgctatttagaaaatcgtttatggcaagacaagggattaatcgccaacctcaaaatgaacgcgttagaggcgactgtaatgttaaattgtagcctcgatcagattgcatcaatggttgaacaacgcatcttgaagccaaatcgaaaaagcaagcccaacagccctcttgatgttaccgattatctatttcatttcggcgatattttctgtctttggttagctgagttccaaagcgatgagtttaaccgttcgttttatgtgtcgaggtggtccggtagcgaaacgccggggacttctgaatctgctactccggaaagcggaggctctggctcgtcaggaggttcaggaagttcaggcggtatgcaaactctgaaagaactaatcgcatccaatcctgacgacttaacaactgaacttaagagagcatttcgtccactcacaccgcatattgcaattgatggtaatgaacttgacgcactgacgatattagtcaatttaaccgataagactgatgatcagaaagacctgctcgatcgagccaaatgcaagcaaaaacttcgagatgaaaaatggtgggctagctgcataaattgcgttaattacagacaaagccataacccaaaattcccggatatacgttctgaaggcgtgattcgaacccaagccctgggtgaattaccgagtttcctactctcgtcctcaaaaatcccaccataccattggtcatatagccatgattcaaaatacgtcaacaaaagcgcattcctcaccaatgagttttgttgggatggtgagatctcatgtttgggtgagcttcttaaagatgcagatcacccactttggaatactttgaaaaagttaggttgttctcaaaaaacttgcaaagcaatggcaaaacaactagctgatattactctcacgactatcaatgtcacactcgcaccaaattacctgactcaaatatctctccccgatagtgatacatcctacatttcactctctcctgttgcatcgctatcgatgcaaagccactttcatcagaggctccaagatgaaaatcggcatagcgcgataacgcggtttagccgaactaccaacatgggggtcactgcgatgacatgtggcggcgcatttagaatgttaaagtctggcgctaagttttccagcccccctcatcaccgattaaacagtaaacgaagttggttgacgtcagagcatgttcagtcattaaaacagtaccagcgcctcaacaaaagcctcatacctgaaaactctcggattgcactccgtagaaaatacaaaatcgagcttcaaaatatggtcagatcttggtttgcaatgcaagaccatacccttgattcgaacatacttatccaacatttgaatcatgacctatcttacttaggagccacaaaacgttttgcatacgatccagcgatgaccaagctctttactgagcttttgaaacgagagttatcaaattcaatcaataatggtgagcaacacactaatggatcgtttttagtcctaccgaatatcagggtttgtggcgcaacagctttaagctccccggtaacggtggggattccatcacttacagctttctttggcttcgttcacgcatttgaacggaatataaatcgcaccacctcatcgtttcgtgttgaatcctttgcgatatgcgtccatcaactacatgtcgagaagcgaggtttgacagcagagtttgtggaaaaaggcgacgggactatatccgctcccgcgacccgggatgactggcagtgtgatgtcgtatttagccttattttgaacaccaactttgctcaacatattgaccaagatacgttagttacatcactaccaaagcgattggctcggggttcagcaaaaattgcgattgatgactttaaacatatcaactcattctcgacattagaaacagcgatcgaatctctgccaatagaagctggtaggtggttatcactttacgcacagtcaaacaataatctaagtgatctattagcagccatgacagaggaccatcagctcatggcaagctgcgtcggttaccacttgttagaagagcccaaagataaaccaaactccctcagaggttacaaacacgctatcgccgagtgcatcattggactcattaactcaatcacctttagctcagagactgatcccaacacaatcttttggtcgctaaagaactatcaaaactacctagtggtacagccaaggagtatcaacgatgaaactaccgacaaatctagcctatgagcgctctatcgacccatcagatgtctgtttttttgtcgtctggcccgatgatagaaaaacacctttaacctacaattctcgtactctgctcgggcaaatggaagcggcatcattagcctatgatgtctcaggtcaaccaataaaaagtgccaccgctgaggcgttagctcaagggaaccctcatcaagttgatttctgccacgttccatacggtgcgagtcatattgaatgcagtttctccgtctcgttttcttctgaactacgtcaaccatataagtgtaactcaagcaaagttaaacaaacgctagtgcaattagtcgagctctacgaaacgaaaatcggctggactgagctagcaacccgatatttgatgaacatttgcaacggtaaatggctgtggaaaaatacccgtaaagcctattgctggaacattgtacttacaccttggccttggaacggggaaaaggttggatttgaagatattcgtactaactacacctcacggcaagactttaaaaataataaaaattggtctgctatagttgaaatgatcaaaaccgcattttctagtactgatgggctggcgatatttgaagtcagggccaccttgcacttgccaacgaatgctatggtgcggccaagccaagttttcacagaaaaagaaagtggcagtaaaagtaaatctaaaactcaaaacagtcgagtttttcagagtacaactattgatggtgaacgatcgccaatactaggggcctttaaaacgggagcagctattgcaaccattgacgactggtatcctgaagccactgagccactaagggtcggacggtttggggttcatcgcgaagatgtcacttgctaccgtcatccgtctaccggaaaagattttttctcgatattacaacaagcagagcactatattgaagtgttgagcgccaacaaaactcccgctcaagaaactatcaacgacatgcactttttaatggctaacctgattaagggtgggatgttccagcataaaggagactgactgtgaaatggtattataagacaatcacctttctgccagagttgtgcaacaacgagtcactggctgcaaagtgtctccgcgttctgcatggatttaactatcagtatgagacacgaaatatcggcgtttcatttccgctttggtgtgatgcaacggttggaaaaaagatttcatttgtcagcaagaacaagatagaactcgacttactacttaaacaacactatttcgtccaaatggaacaacttcaatactttcatatatccaacactgttctcgtcccagaagattgtacatacgtttcctttagacgctgtcaatctatagataagctcacagcagcagggctggcaaggaaaatcagacgcctggagaaacgtgctctatctagaggcgagcaatttgacccatcatcttttgctcaaaaagagcatactgcaatagcgcactaccactcacttggggagtccagcaaacagacgaaccgcaactttcgactcaatatcaggatgctctcggagcaaccccgtgaggggaactcgatttttagtagctatggcttatcaaattcagaaaactcgtttcagcctgtacccttaatctgacctaggctgctgccaccgctgagcaataactagcataaccccttggggcctctaaacgggtcttgaggggttttttgctgaaacctcaggcatttgagaagcacacggtcacactgcttccggtagtcaataaaccggtaaaccagcaatagacataagcggctatttaacgaccctgccctgaaccgacgaccgggtcatcgtggccggatcttgcggcccctcggcttgaacgaattgttagacattatttgccgactaccttggtgatctcgcctttcacgtagtggacaaattcttccaactgatctgcgcgcgaggccaagcgatcttcttcttgtccaagataagcctgtctagcttcaagtatgacgggctgatactgggccggcaggcgctccattgcccagtcggcagcgacatccttcggcgcgattttgccggttactgcgctgtaccaaatgcgggacaacgtaagcactacatttcgctcatcgccagcccagtcgggcggcgagttccatagcgttaaggtttcatttagcgcctcaaatagatcctgttcaggaaccggatcaaagagttcctccgccgctggacctaccaaggcaacgctatgttctcttgcttttgtcagcaagatagccagatcaatgtcgatcgtggctggctcgaagatacctgcaagaatgtcattgcgctgccattctccaaattgcagttcgcgcttagctggataacgccacggaatgatgtcgtcgtgcacaacaatggtgacttctacagcgcggagaatctcgctctctccaggggaagccgaagtttccaaaaggtcgttgatcaaagctcgccgcgttgtttcatcaagccttacggtcaccgtaaccagcaaatcaatatcactgtgtggcttcaggccgccatccactgcggagccgtacaaatgtacggccagcaacgtcggttcgagatggcgctcgatgacgccaactacctctgatagttgagtcgatacttcggcgatcaccgcttccctcatactcttcctttttcaatattattgaagcatttatcagggttattgtctcatgagcggatacatatttgaatgtatttagaaaaataaacaaatagctagctcactcggtcgctacgctccgggcgtgagactgcggcgggcgctgcggacacatacaaagttacccacagattccgtggataagcaggggactaacatgtgaggcaaaacagcagggccgcgccggtggcgtttttccataggctccgccctcctgccagagttcacataaacagacgcttttccggtgcatctgtgggagccgtgaggctcaaccatgaatctgacagtacgggcgaaacccgacaggacttaaagatccccaccgtttccggcgggtcgctccctcttgcgctctcctgttccgaccctgccgtttaccggatacctgttccgcctttctcccttacgggaagtgtggcgctttctcatagctcacacactggtatctcggctcggtgtaggtcgttcgctccaagctgggctgtaagcaagaactccccgttcagcccgactgctgcgccttatccggtaactgttcacttgagtccaacccggaaaagcacggtaaaacgccactggcagcagccattggtaactgggagttcgcagaggatttgtttagctaaacacgcggttgctcttgaagtgtgcgccaaagtccggctacactggaaggacagatttggttgctgtgctctgcgaaagccagttaccacggttaagcagttccccaactgacttaaccttcgatcaaaccacctccccaggtggttttttcgtttacagggcaaaagattacgcgcagaaaaaaaggatctcaagaagatcctttgatcttttctactgaaccgctctagatttcagtgcaatttatctcttcaaatgtagcacctgaagtcagccccatacgatataagttgtaattctcatgttagtcatgccccgcgcccaccggaaggagctgactgggttgaaggctctcaagggcatcggtcgagatcccggtgcctaatgagtgagctaacttacattaattgcgttgcgctcactgcccgctttccagtcgggaaacctgtcgtgccagctgcattaatgaatcggccaacgcgcggggagaggcggtttgcgtattgggcgccagggtggtttttcttttcaccagtgagacgggcaacagctgattgcccttcaccgcctggccctgagagagttgcagcaagcggtccacgctggtttgccccagcaggcgaaaatcctgtttgatggtggttaacggcgggatataacatgagctgtcttcggtatcgtcgtatcccactaccgagatgtccgcaccaacgcgcagcccggactcggtaatggcgcgcattgcgcccagcgccatctgatcgttggcaaccagcatcgcagtgggaacgatgccctcattcagcatttgcatggtttgttgaaaaccggacatggcactccagtcgccttcccgttccgctatcggctgaatttgattgcgagtgagatatttatgccagccagccagacgcagacgcgccgagacagaacttaatgggcccgctaacagcgcgatttgctggtgacccaatgcgaccagatgctccacgcccagtcgcgtaccgtcttcatgggagaaaataatactgttgatgggtgtctggtcagagacatcaagaaataacgccggaacattagtgcaggcagcttccacagcaatggcatcctggtcatccagcggatagttaatgatcagcccactgacgcgttgcgcgagaagattgtgcaccgccgctttacaggcttcgacgccgcttcgttctaccatcgacaccaccacgctggcacccagttgatcggcgcgagatttaatcgccgcgacaatttgcgacggcgcgtgcagggccagactggaggtggcaacgccaatcagcaacgactgtttgcccgccagttgttgtgccacgcggttgggaatgtaattcagctccgccatcgccgcttccactttttcccgcgttttcgcagaaacgtggctggcctggttcaccacgcgggaaacggtctgataagagacaccggcatactctgcgacatcgtataacgttactggtttcac

SEQ ID NO: 396 - DNA, 6417 bp, Synthetic construct
  source 1..6417: mol_type = other DNA
cataagcggctatttaacgaccctgccctgaaccgacgacaagctgacgaccgggtctccgcaagtggcacttttcggggaaatgtgcgcggaacccctatttgtttatttttctaaatacattcaaatatgtatccgctcatgaattaattcttagaaaaactcatcgagcatcaaatgaaactgcaatttattcatatcaggattatcaataccatatttttgaaaaagccgtttctgtaatgaaggagaaaactcaccgaggcagttccataggatggcaagatcctggtatcggtctgcgattccgactcgtccaacatcaatacaacctattaatttcccctcgtcaaaaataaggttatcaagtgagaaatcaccatgagtgacgactgaatccggtgagaatggcaaaagtttatgcatttctttccagacttgttcaacaggccagccattacgctcgtcatcaaaatcactcgcatcaaccaaaccgttattcattcgtgattgcgcctgagcgagacgaaatacgcggtcgctgttaaaaggacaattacaaacaggaatcgaatgcaaccggcgcaggaacactgccagcgcatcaacaatattttcacctgaatcaggatattcttctaatacctggaatgctgttttcccggggatcgcagtggtgagtaaccatgcatcatcaggagtacggataaaatgcttgatggtcggaagaggcataaattccgtcagccagtttagtctgaccatctcatctgtaacatcattggcaacgctacctttgccatgtttcagaaacaactctggcgcatcgggcttcccatacaatcgatagattgtcgcacctgattgcccgacattatcgcgagcccatttatacccatataaatcagcatccatgttggaatttaatcgcggcctagagcaagacgtttcccgttgaatatggctcatactcttcctttttcaatattattgaagcatttatcagggttattgtctcatgagcggatacatatttgaatgtatttagaaaaataaacaaataggcatgctagcgcagaaacgtcctagaagatgccaggaggatacttagcagagagacaataaggccggagcgaagccgtttttccataggctccgcccccctgacgaacatcacgaaatctgacgctcaaatcagtggtggcgaaacccgacaggactataaagataccaggcgtttccccctgatggctccctcttgcgctctcctgttcccgtcctgcggcgtccgtgttgtggtggaggctttacccaaatcaccacgtcccgttccgtgtagacagttcgctccaagctgggctgtgtgcaagaaccccccgttcagcccgactgctgcgccttatccggtaactatcatcttgagtccaacccggaaagacacgacaaaacgccactggcagcagccattggtaactgagaattagtggatttagatatcgagagtcttgaagtggtggcctaacagaggctacactgaaaggacagtatttggtatctgcgctccactaaagccagttaccaggttaagcagttccccaactgacttaaccttcgatcaaaccgcctccccaggcggttttttcgtttacagagcaggagattacgacgatcgtaaaaggatctcaagaagatcctttacggattcccgacaccatcactctagatttcagtgcaatttatctcttcaaatgtagcacctgaagtcagccccatacgatataagttgtaattctcatgttagtcatgccccgcgcccaccggaaggagctgactgggttgaaggctctcaagggcatcggtcgagatcccggtgcctaatgagtgagctaacttacattaattgcgttgcgctcactgcccgctttccagtcgggaaacctgtcgtgccagctgcattaatgaatcggccaacgcgcggggagaggcggtttgcgtattgggcgccagggtggtttttcttttcaccagtgagacgggcaacagctgattgcccttcaccgcctggccctgagagagttgcagcaagcggtccacgctggtttgccccagcaggcgaaaatcctgtttgatggtggttaacggcgggatataacatgagctgtcttcggtatcgtcgtatcccactaccgagatgtccgcaccaacgcgcagcccggactcggtaatggcgcgcattgcgcccagcgccatctgatcgttggcaaccagcatcgcagtgggaacgatgccctcattcagcatttgcatggtttgttgaaaaccggacatggcactccagtcgccttcccgttccgctatcggctgaatttgattgcgagtgagatatttatgccagccagccagacgcagacgcgccgagacagaacttaatgggcccgctaacagcgcgatttgctggtgacccaatgcgaccagatgctccacgcccagtcgcgtaccgtcttcatgggagaaaataatactgttgatgggtgtctggtcagagacatcaagaaataacgccggaacattagtgcaggcagcttccacagcaatggcatcctggtcatccagcggatagttaatgatcagcccactgacgcgttgcgcgagaagattgtgcaccgccgctttacaggcttcgacgccgcttcgttctaccatcgacaccaccacgctggcacccagttgatcggcgcgagatttaatcgccgcgacaatttgcgacggcgcgtgcagggccagactggaggtggcaacgccaatcagcaacgactgtttgcccgccagttgttgtgccacgcggttgggaatgtaattcagctccgccatcgccgcttccactttttcccgcgttttcgcagaaacgtggctggcctggttcaccacgcgggaaacggtctgataagagacaccggcatactctgcgacatcgtataacgttactggtttcacattcaccaccctgaattgactctcttccgggcgctatcatgccataccgcgaaaggttttgcgccattcgatggtgtccgggatctcgacgctctcccttatgcgactcctgcattaggaaattaatacgactcactataggggaattgtgagcggataacaattcccctgtagaaataattttgtttaactttaataaggagatataccatgggcctggatgatcctgataagggcaatcaagagccagaaacgcatgagatagtgactgagctatcactagatgagcagcatttgctggaaatgattcagaaactaatagaaccgtgcgatcgtatcacctatggagaaagacaaagggaagttgcaggaaaactaggcaagtctgtacggacagtaaggcgtttggtgaaaaaatgggaacaggagggtttaactgcacttcaaactgcgacaagaactgataaaggaacacatcgaatagattcggattggcaggacttcattatcaagacatataaggaaaataataaagatggaaaacgaatgtctcccaaacaagtggcgctcagagttcaaacaaaggctgaggaattaggtcaacaaaaatatcccagttatagaactgtgtatcgagttttacaacctatcatcgaacagaaagaacaaaaagagggtattagacatcggggttggcatggttctcgattatcagttaaaactcgcgatggcaaagacttatttgtggaacacagcaatcatgtttggcagtgtgatcacactcgtgtagacctattactggtagatcagcacggtgaacttttgagtcgtccttggttgacaatagttgtagatacttactcccgttgcattatggggataaatttgggttttgatgccccaagttcccaggtaatagcattggcactgcgtcatgcaattttgcctaagcgatatggatcagaatatggactccatgaagaatggggaacctatggtaaaccagaacatttttatactgatggcggtaaagattttcgctccaaccatttgcaacagataggtgtgcagttggggtttgtttgtcatttacgcgatcgccccagtgaaggtggtattgttgagcgtccttttggaacttttaacactgatttattttcaaccttgccaggatacacaggttcaaatgtacaggaacgccctgagcaagctgagaaagaggcttgtattactttgagggaattagaacgtctgctagtacgttacatcgtggataaatacaaccaaagtattgatgctcgattaggcgaccaaactcgttatcaacgttgggaagcaggattaattgttgcgcctaatttaatttcagaagaagaattacgtatctgcctgatgaagcaaactcgacgctcaatttacaggggtgggtatgtgcaatttgaaaatctgacttatcggggagaaaatttggcaggttatgcaggtgaaaatgttgtactgcgttatgaccccaaagacatcaccactttgttggtttaccgccagaaaggtaatcaagaagaatttctagctcgtgcttatgctcaagatttggagacagaggaattgtctgtggatgaagcaaaagctatgagtcgccggattcggcaagcaggtaaggctattagcaatcgttctattttggcagaggtgcgcgatcgcgaaaccttcgtgaaccaaaagaaaaccaaaaaggaacgccaaaaggcagaacagaccatagttcaaaaggctaaaaaacctgtgcctgttgaaccagaggaagaaattgaagtggcatctgttgacagtgaaccagaataccagatgccggaagtctttgattacgaacaaatgcgtgaagattacgggtggtagtaaaggaggtaaataatgacttcaaaacaggctcaagctgttgcccaacagttgggagatattccggtaaatgacgaaaaaatacaagcggaaattcaacgattgaaccggaagagttttattcccttggaacaagtacaaatgcttcatgattggttagatggaaagcgacaatcacggcagtctggtcgagtggtgggggagtcaagaacaggcaaaactatgggttgtgatgcctacagattacgccataaaccaaagcaagaaccaggacgacctccaactgttcctgttgcttatattcaaatcccgcaagaatgcggtgcaaaggaattgtttggagtcctccttgaacatttgaagtatcaaatgacaaagggaacagtagccgaaatcagggacagaacgctacgagttcttaaagggtgtggagtggaaatgcttattattgatgaggctgaccgcttgaaacccaaaacttttgctgaggtgccggacatttttgacaaattagaaatagcagtgattttggtaggaactgaccgcttagatgcagtaattaagcgggacgaacaagtttacaaccgttttcgggcttgtcatcgatttggtaagttttctggggatgaatttaagaagatagtagacatttgggaaaagaaggttttgcagttgccagttgcttccaatctttccagtaagactatgctgaaaactttaggtgagacaacggggggttatattggtttgctcgacatgattctgagagaatctgctatccgggcattgaagaaaggattacggaaggtggatttggcaaccctgaaggaagtgacagaagagtacaaataatagaggaggatataaatggaagttccacagattcaaccttggctgtttcaaatagaaccgttagagggagaaagtttgagtcactttttaggacgttttcgacgtgcaaatgatttaacacctactggtttaggtaaagctgctggacttggaggtgcgatcgctcgttgggaaaagtttcgatttaatcccccaccgtctcgccagcagttggaggctttggctaatgttgtcggggttgatgccgataggttagcgcaaatgttaccatctgctggggtggggatgaaaatggagccaattcggttatgtgctgcttgttatgccgagtcgccatgtcacaagattgaatggcaatttaaggtaacgcgagggtgcgcgaggcacaaaataactttattgtcagaatgtcctaactgcaaggcaagatttaaggttccagcattatgggtggatggttggtgtaatcgttgctttttacggtttgaggagatggctaagtatcagaaagggttgtagtaacctaggctgctgccaccgctgagcaataactagcataaccccttggggcctctaaacgggtcttgaggggttttttgctgaaacctcaggcatttgagaagcacacggtcacactgcttccggtagtcaataaaccggtaaaccagcaataga

SEQ ID NO: 397 - DNA, 6384 bp, Synthetic construct
  source 1..6384: mol_type = other DNA
gttttgattcttggatattaatgcttgatccttatcaaggagaaagcatcagtcattttctaggaagatttagacgtgagaatagtcttaccgttaataatttagggaaagcaaccgaactttatggagcgatcgcccgttgggaaaagtttcgttttaatcctcctccttcctctgaacagttgaaaaagttaagtgcgatcgtacaagtagaagtagcaaccttacaaacaatgtttccttccgccccgatgaaaatgactcccattcgcctttgttcggcttgttatggagaaaagccctatcataagatggaatggcagtataaggagatttacaagtgcgatcgacatcaactgaaacttttatcagaatgtcctaactgtggggcaagattcaagtttcctagtctatgggtggatggttggtgtcacagatgttttactccttttgcagagatgaaacaacaaaaagattagtaacctaggctgctgccaccgctgagcaataactagcataaccccttggggcctctaaacgggtcttgaggggttttttgctgaaacctcaggcatttgagaagcacacggtcacactgcttccggtagtcaataaaccggtaaaccagcaatagacataagcggctatttaacgaccctgccctgaaccgacgacaagctgacgaccgggtctccgcaagtggcacttttcggggaaatgtgcgcggaacccctatttgtttatttttctaaatacattcaaatatgtatccgctcatgaattaattcttagaaaaactcatcgagcatcaaatgaaactgcaatttattcatatcaggattatcaataccatatttttgaaaaagccgtttctgtaatgaaggagaaaactcaccgaggcagttccataggatggcaagatcctggtatcggtctgcgattccgactcgtccaacatcaatacaacctattaatttcccctcgtcaaaaataaggttatcaagtgagaaatcaccatgagtgacgactgaatccggtgagaatggcaaaagtttatgcatttctttccagacttgttcaacaggccagccattacgctcgtcatcaaaatcactcgcatcaaccaaaccgttattcattcgtgattgcgcctgagcgagacgaaatacgcggtcgctgttaaaaggacaattacaaacaggaatcgaatgcaaccggcgcaggaacactgccagcgcatcaacaatattttcacctgaatcaggatattcttctaatacctggaatgctgttttcccggggatcgcagtggtgagtaaccatgcatcatcaggagtacggataaaatgcttgatggtcggaagaggcataaattccgtcagccagtttagtctgaccatctcatctgtaacatcattggcaacgctacctttgccatgtttcagaaacaactctggcgcatcgggcttcccatacaatcgatagattgtcgcacctgattgcccgacattatcgcgagcccatttatacccatataaatcagcatccatgttggaatttaatcgcggcctagagcaagacgtttcccgttgaatatggctcatactcttcctttttcaatattattgaagcatttatcagggttattgtctcatgagcggatacatatttgaatgtatttagaaaaataaacaaataggcatgctagcgcagaaacgtcctagaagatgccaggaggatacttagcagagagacaataaggccggagcgaagccgtttttccataggctccgcccccctgacgaacatcacgaaatctgacgctcaaatcagtggtggcgaaacccgacaggactataaagataccaggcgtttccccctgatggctccctcttgcgctctcctgttcccgtcctgcggcgtccgtgttgtggtggaggctttacccaaatcaccacgtcccgttccgtgtagacagttcgctccaagctgggctgtgtgcaagaaccccccgttcagcccgactgctgcgccttatccggtaactatcatcttgagtccaacccggaaagacacgacaaaacgccactggcagcagccattggtaactgagaattagtggatttagatatcgagagtcttgaagtggtggcctaacagaggctacactgaaaggacagtatttggtatctgcgctccactaaagccagttaccaggttaagcagttccccaactgacttaaccttcgatcaaaccgcctccccaggcggttttttcgtttacagagcaggagattacgacgatcgtaaaaggatctcaagaagatcctttacggattcccgacaccatcactctagatttcagtgcaatttatctcttcaaatgtagcacctgaagtcagccccatacgatataagttgtaattctcatgttagtcatgccccgcgcccaccggaaggagctgactgggttgaaggctctcaagggcatcggtcgagatcccggtgcctaatgagtgagctaacttacattaattgcgttgcgctcactgcccgctttccagtcgggaaacctgtcgtgccagctgcattaatgaatcggccaacgcgcggggagaggcggtttgcgtattgggcgccagggtggtttttcttttcaccagtgagacgggcaacagctgattgcccttcaccgcctggccctgagagagttgcagcaagcggtccacgctggtttgccccagcaggcgaaaatcctgtttgatggtggttaacggcgggatataacatgagctgtcttcggtatcgtcgtatcccactaccgagatgtccgcaccaacgcgcagcccggactcggtaatggcgcgcattgcgcccagcgccatctgatcgttggcaaccagcatcgcagtgggaacgatgccctcattcagcatttgcatggtttgttgaaaaccggacatggcactccagtcgccttcccgttccgctatcggctgaatttgattgcgagtgagatatttatgccagccagccagacgcagacgcgccgagacagaacttaatgggcccgctaacagcgcgatttgctggtgacccaatgcgaccagatgctccacgcccagtcgcgtaccgtcttcatgggagaaaataatactgttgatgggtgtctggtcagagacatcaagaaataacgccggaacattagtgcaggcagcttccacagcaatggcatcctggtcatccagcggatagttaatgatcagcccactgacgcgttgcgcgagaagattgtgcaccgccgctttacaggcttcgacgccgcttcgttctaccatcgacaccaccacgctggcacccagttgatcggcgcgagatttaatcgccgcgacaatttgcgacggcgcgtgcagggccagactggaggtggcaacgccaatcagcaacgactgtttgcccgccagttgttgtgccacgcggttgggaatgtaattcagctccgccatcgccgcttccactttttcccgcgttttcgcagaaacgtggctggcctggttcaccacgcgggaaacggtctgataagagacaccggcatactctgcgacatcgtataacgttactggtttcacattcaccaccctgaattgactctcttccgggcgctatcatgccataccgcgaaaggttttgcgccattcgatggtgtccgggatctcgacgctctcccttatgcgactcctgcattaggaaattaatacgactcactataggggaattgtgagcggataacaattcccctgtagaaataattttgtttaactttaataaggagatataccatgggcaccatcgataatcaattttctgattctccagaattgatctctcaactttctcccgaggaccaaaaaatcgctgatgttattgaaaatttacttcaaccttgtgacaagaaaacttatggaaaaaagttaaaacaagcatcagatcagttgaagaagtcggttagaactattcaaagatacgttaagcagtgggaagaaaatggtttagtcggtattcttcaaaataatcgagccgataaaggctcttatcgtattgacccccgcttacaggatttcattcttaaaacctatcgtgaaggaaacaaaggtagtaaacgaatgacgcctaaacaggtttatttacgagcagttgtccaagcagaaaattgggggatcaaacctccctctcacatgactatttatcggattttgaatcctattattgcggaaaaagaaaataagaaaaggattagaagttctgggtggagaggttctcagttagttctttctactcgctcaggtacagaaatcgatgtacagtatagtaaccatgtttggcaatgtgatcatactcgtgcagatattcttttggtagatcaatttggtgaattattgggcagaccttggataacgatagtggtagatacttattctcgctgtattatgggtattaatcttggttttgatgctcccagttcccaagtggtcactcttgctttacgtcatgccattttgcctaagagttacagttctgattatgaactacatgaggaatggggaacttatggtaaaccagagtacttttacactgatgggggtaaggattttcgttctaatcatcttcaacaaattagcttacaactgggttttacttgtcatctaaggagtcgccccagtgaagggggagtagtagagcgtctttttaaaactttgaacacggaggttttttctactctaccaggatatacaggagcaaatgtacaagaacgtccagaagatgcagaaaaagaagcctgtctcactcttaaagagctagaaatacttatagttcgctatatcgttgataactacaaccaacgtattgatgctcgtatgggagagcaaactcgctttcagcgttgggagtcaggattgctttctactcctcatatcatacctgaacgtgaattagatatttgtttgatgaaacagtcacgcagaaaagttcaaaagggtggtcatcttcaatttgaaaacttgatctataagggtcagtatttagcaggttatgaaggagagacagttattcttcgttatgatccaagggatattacgggtattttgatttatcgtgttgagaataataaagaaatttttcttactcgtgcttatgccacggatttagaaggggactgtttatccttaacggatgcgaaatctagtgttaagagaattagagagaagtctaaaaatgttcataataagtcaattttaatggaaattcaacaacgtcatttattttcagaaaagaaaaccaagaagcaaattcagcaagaagaacaaaaacaaattaaaccaaatacttctctatctatcttcaaaccagaaactgagatggatacgcaggttgaatcatcacaggagctatcagaggaggacttggatattgaaatgattgactacggtaatttacaacaatactaatagaggaggatataaatggaagcgaaagaaattgctcaacagttgggagaggttgaacagccaaatcagtctttgcagaatgaactggatcgactatcaaaaaaacaatttctgtttttagatcaggtaaaaatctatcaccaatggttgaatgaaagattattcatgaaacattgttgccgagttgtgggggattcacacacgggcaaaacctcgtcatctcaagcctactgtctaagatataaatctactcaagagtcggggaaaaatcctatttttcccgtgttatatgtttctgtccccgaaaatgcaacttcaaaagtcttttttgagacatcaattaagagtttcggttatcgaatcagtaagggtacgatttccgatttaagagaacgaatgctgacattactgtccagatgtcaggttaaaatgatgattattgatgaggctgaccgatgtaaacctgaaactctgagttatatacgagatatattcgatcatctcaacatttgtattgttttggtgggtacagatcgacttaatacggtacttaaaagggatgagcaagtctataatcgttttttaccgtgttatcgctatggtcttttagataaagaatcccttattaaaacaataaaaatttgggaaattaaaattttaaaacttcctgtagcatctaatttaagtcagggcaaaaagtttaacattatttattctacttctaaaggatgtttaggaacaatggataaattgttgagaacatctgcttctatggctttaattagaggtttatcgaagattgaattgaatatattggaagaagcagcgcacttgttcaaagataagtgataaaggaggtaaataatgattacaaata

SEQ ID NO: 398 - DNA, 6762 bp, Synthetic construct
  source 1..6762: mol_type = other DNA
cgggatctcgacgctctcccttatgcgactcctgcattaggaaattaatacgactcactataggggaattgtgagcggataacaattcccctgtagaaataattttgtttaactttaataaggagatataccatgggctctacagacgctacctcggcaacttgctccccttctcaggattcgggtttggaacaggggcagcaggggcaaccccccatgcttctcaatgaggtttcgccggaggtgcaacagaaaattgatttaattgatgctatctttcaaactcctgacaagaaagctcgacgtgaagcgattctacatgccgcaaagacattgggcaaaacgactcgaaccatccggctcatgatggaaaaggtcaagaatgacggagttgccacgctggcagtcggtcgtaaggatgaaggacagttccgcatctctgagcagtggtctaactttattaaagtgatttatgaatggggacagcgagacggttcgcggatcaatatcaatggagtatatacccatttggtcgctcttgcctctcaaggagaagcattgcgggataaaaagtacgccgatcgctttaagggttatccccaggtacttgaggatctagttgcaggaaaacatccctctcatgtcactgtttataaagttgttaatttttatcttgagcgaaaaaacaaaaaggttcgccatccgggttcacctgccgaaggacaagttatccaaaccacggaagggatcatagagctaactcacagtaatcaggtttggcaatgtgaccacactaaacttgatattttgctggtggatggtgatggggaagtaattttacaatgggatgaccaaaagcaagagattgttggtcgcccttatctaacattgatcatggatagttattccggctgtgtcgcagggtttcacctgggctttgaggcagcaggttcgcatgaagtgggtttagctttgcgccatgcgatgttacccaaacagtatggctccgagtacaaacttaaagcggagtggaatgtttttggcgtgccagagtattggctgaccgatcgggcgaaggagttcaagtccaatcatttgaagcaagtctcaatgcaagtaggcttcaagcgtagattgcgggcttttccatccgcagggggactcattgaatccattttcgacaagattaataaagaagtcttgtcccactttggaggctacacaggctcgaacattacaaaacgccctaaagaagcggaaaagcatgcatgtctgacgttggatgagctagagaagagactggtgatatactttgttgatcattacaacggacatgattacccaaaggtagccaatcaaaagcgatcgaaccgctggaaggcaaacctactgacagagccagaggtgctggatgaacgtgagcttgacatctgcctgatgaaagttgcccatcgcaaagttgaaaagtacggttgcattcggtttgagggacttgtgtatcagggagactgtctcgtagagtatgagggggatgaggtgtctctgaggtacgatgagcgcaacattcttgcgcttttggcttacgaacgacctcagcgcgatcgaccaggcaagttcattggtgaagttcgtgcaagagacgcaaaagaggagcaactttccctggaagaattgaggtggctcaagcgaaaactgaaagaacgcgggaaggaagtggacaacaattccatctgggctgaacgactaggcttgtatcagttcattgatgagaagcgaaaatccaagcgacaacgccgcaagaaggcgcagcagcggcgcagtcaaaagacaaataaatcgcaagtagtcgagttatttcctcaaaatgctgttcctgagaaccagcctgaagttcaggagtcagagactaaagaaagtacactccccactactgaccaacctcagcctgatattgtaaagtctaaagacacaccagcaagtcaaccgatcgcatccaatgtcgttgcgtacgattggaaccagcttttagaggacaactggtagtaaaggaggtaaataatggcgacatctaacgcagttccacaaccactagatgatgattcgcaatcagtaactgcacctcagccagatgcggcacctcagccagcaccgctccgcccgcttgctgaaccggaacgatcgcctgaagttcaggcagaagtcgagcgcattcgtagcagcgaagcatacaaggacatttctcgtgattcagccctgtttttctggctcagccttcagcgagattctcgatcgaacggctacgtctttggggctaattttgcagatttaaggaaggcttgccagttctacaggatgcaatacgtccagcgtcgggggactctctacaagattccgatgcctgttacctatgtggatgttgaacagtatggttctcctattgatctactcgttgctattcttgaatcgcttggtagcccctttgcaaaaatcggtttgctcagagatatgagatcgcgcacttttggtacgctcaactcttttggggtcaaacttcttataattggctatgcagaatgcttatcctacgaggcttataacgagcttctcaggttgacccggcagttaaaaatttcggtaattcttgcaggttcaatggaactaagggagatcttgggcaattttgtaaaccgtcgaagtaagcgttatggagagatttacaacaattttctggactttcacgaatacagagcttttgagaaaagtgatattgaaacgttgctcgaaagctgggagaaccaggtgttgagttcttgggatcagaaattagctctgaaagatattcctgatgttccggcttttctttatcaacgctgtgaagggcatgctgaaactctgtacgaaattctccgcaaaatagcaattttcaagctagataatccttctcatcaactgagcaaagctgatattgagaatatggtgtcgcgacgtacgataccaaaacgctcctaatagaggaggatataaatggacaacgaagcgtttgatctgccgcgctggtgccctgaaccctatgaaggagagagcattgccagttatctcgtgcggtttcgctctcaggaagtcgcccaaatttctacgcccagcagcttcagcaaggcgatcggcttggggattgcacttacacggtgggagaagtttcgcttcaatccttttcccagtgaggaggagatacagaagttttgtggtgtggtgggtttagagttagagcggtttaaggcgatgctgccaccggaaggggagcgaatgaagttggaaccgattcggttgtgtgcggcttgctatgcagaagccccttatcatcggttgaagtggcagtttcagtcaacggagggctgtagtaagcataagctacgtctgctctctaaatgccctggttgtgaaagaccttttacgattcctggtttggctgtggaagggaaatgtccgtgtgggatgttttataagaggatggcaaagagtcaaaagccttattagtaacctaggctgctgccaccgctgagcaataactagcataaccccttggggcctctaaacgggtcttgaggggttttttgctgaaacctcaggcatttgagaagcacacggtcacactgcttccggtagtcaataaaccggtaaaccagcaatagacataagcggctatttaacgaccctgccctgaaccgacgacaagctgacgaccgggtctccgcaagtggcacttttcggggaaatgtgcgcggaacccctatttgtttatttttctaaatacattcaaatatgtatccgctcatgaattaattcttagaaaaactcatcgagcatcaaatgaaactgcaatttattcatatcaggattatcaataccatatttttgaaaaagccgtttctgtaatgaaggagaaaactcaccgaggcagttccataggatggcaagatcctggtatcggtctgcgattccgactcgtccaacatcaatacaacctattaatttcccctcgtcaaaaataaggttatcaagtgagaaatcaccatgagtgacgactgaatccggtgagaatggcaaaagtttatgcatttctttccagacttgttcaacaggccagccattacgctcgtcatcaaaatcactcgcatcaaccaaaccgttattcattcgtgattgcgcctgagcgagacgaaatacgcggtcgctgttaaaaggacaattacaaacaggaatcgaatgcaaccggcgcaggaacactgccagcgcatcaacaatattttcacctgaatcaggatattcttctaatacctggaatgctgttttcccggggatcgcagtggtgagtaaccatgcatcatcaggagtacggataaaatgcttgatggtcggaagaggcataaattccgtcagccagtttagtctgaccatctcatctgtaacatcattggcaacgctacctttgccatgtttcagaaacaactctggcgcatcgggcttcccatacaatcgatagattgtcgcacctgattgcccgacattatcgcgagcccatttatacccatataaatcagcatccatgttggaatttaatcgcggcctagagcaagacgtttcccgttgaatatggctcatactcttcctttttcaatattattgaagcatttatcagggttattgtctcatgagcggatacatatttgaatgtatttagaaaaataaacaaataggcatgctagcgcagaaacgtcctagaagatgccaggaggatacttagcagagagacaataaggccggagcgaagccgtttttccataggctccgcccccctgacgaacatcacgaaatctgacgctcaaatcagtggtggcgaaacccgacaggactataaagataccaggcgtttccccctgatggctccctcttgcgctctcctgttcccgtcctgcggcgtccgtgttgtggtggaggctttacccaaatcaccacgtcccgttccgtgtagacagttcgctccaagctgggctgtgtgcaagaaccccccgttcagcccgactgctgcgccttatccggtaactatcatcttgagtccaacccggaaagacacgacaaaacgccactggcagcagccattggtaactgagaattagtggatttagatatcgagagtcttgaagtggtggcctaacagaggctacactgaaaggacagtatttggtatctgcgctccactaaagccagttaccaggttaagcagttccccaactgacttaaccttcgatcaaaccgcctccccaggcggttttttcgtttacagagcaggagattacgacgatcgtaaaaggatctcaagaagatcctttacggattcccgacaccatcactctagatttcagtgcaatttatctcttcaaatgtagcacctgaagtcagccccatacgatataagttgtaattctcatgttagtcatgccccgcgcccaccggaaggagctgactgggttgaaggctctcaagggcatcggtcgagatcccggtgcctaatgagtgagctaacttacattaattgcgttgcgctcactgcccgctttccagtcgggaaacctgtcgtgccagctgcattaatgaatcggccaacgcgcggggagaggcggtttgcgtattgggcgccagggtggtttttcttttcaccagtgagacgggcaacagctgattgcccttcaccgcctggccctgagagagttgcagcaagcggtccacgctggtttgccccagcaggcgaaaatcctgtttgatggtggttaacggcgggatataacatgagctgtcttcggtatcgtcgtatcccactaccgagatgtccgcaccaacgcgcagcccggactcggtaatggcgcgcattgcgcccagcgccatctgatcgttggcaaccagcatcgcagtgggaacgatgccctcattcagcatttgcatggtttgttgaaaaccggacatggcactccagtcgccttcccgttccgctatcggctgaatttgattgcgagtgagatatttatgccagccagccagacgcagacgcgccgagacagaacttaatgggcccgctaacagcgcgatttgctggtgacccaatgcgaccagatgctccacgcccagtcgcgtaccgtcttcatgggagaaaataatactgttgatgggtgtctggtcagagacatcaagaaataacgccggaacattagtgcaggcagcttccacagcaatggcatcctggtcatccagcggatagttaatgatcagcccactgacgcgttgcgcgagaagattgtgcaccgccgctttacaggcttcgacgccgcttcgttctaccatcgacaccaccacgctggcacccagttgatcggcgcgagatttaatcgccgcgacaatttgcgacggcgcgtgcagggccagactggaggtggcaacgccaatcagcaacgactgtttgcccgccagttgttgtgccacgcggttgggaatgtaattcagctccgccatcgccgcttccactttttcccgcgttttcgcagaaacgtggctggcctggttcaccacgcgggaaacggtctgataagagacaccggcatactctgcgacatcgtataacgttactggtttcacattcaccaccctgaattgactctcttccgggcgctatcatgccataccgcgaaaggttttgcgccattcgatggtgtc

SEQ ID NO: 399 - DNA, 7392 bp, Synthetic construct
  source 1..7392: mol_type = other DNA
gatgtgctgcaaggcgattaagttgggtaacgccagggttttcccagtcacgacgttgtaaaacgacggccagtgaattggcccatgggcaacagtcagcaaaatcctgatttagctgttcatccctcggcaattcctatagaaggcttactaggagaaagcgatataactcttgagaagaatgtaattgccacacaactctcagaggaagcccaactcaagctagaggtaatccaaagtttactagaaccctgcgatcgcacaacctatggacaaaagttgcgggaagcagcagagaaactaggtgtatcgttacgaacggtacaaaggttggtgaaaaactgggaacacgatggcttagtcggactcactcaaacaggtagggctgataaaggaaaacatcgcattggtgagttttgggaaaaattcattaccaaaacctacaacgagggtaacaagggtagtaaacgtatgacccctaaacaagttgctctcagagtcgaggctaaagcccgtgagttaaaggactctaagccacccaattacaaaaccgtgttacgggtattagcgcccatattagaaaagcaagaaaaagccaagagtattcgtagccctggatggagaggaactacgctttcagttaaaacccgtgaagggaaagatttatcagttgattacagtaaccatgtttggcaatgtgaccatacccgcgtagatgtgttgctcgtggatcaacatggtgaattactaagtcgtccctggctaacaacagtaattgatacttactctcgttgcattatgggtatcaacttgggctttgatgcacctagttctggggtagtagcattagcgttacgccatgcaattctacccaaacagtacggtttcgagtacaaactgcattgtgagtggggaacctatggtaagccagaacatttttatactgatggcggtaaagactttcgctctaaccacttgagtcagattggagcgcaattaggatttgtctgccatttacgcgatcgcccttctgaaggtggagtagtagaacgtcctttcaaaacattgaatgaccaactattttcaacgcttcctgggtacaccggatctaatgtgcaggaacgcccaaaagatgcggaaaaagacgcaaggctcactctaagggaactagaacagctacttatacgctatatcgttgaccgttacaaccaaagtattgatgctcggatgggcgatcaaactcgctttgagcgttgggaagcaggattgcccacagtaccagtaccaataccagaacgagatttggacatctgtttaatgaagcagtcacggcgtactgtacaaagaggtggttgcttgcagttccagaatttgatgtatcgaggagaatatctggcaggttatgcaggggaaactgtcaacttgagatttgaccccagagacattacaacaattttggtttatcgccaggaaaacaatcaggaagtatttctcacccgcgctcacgctcaaggtttggagacagagcaactggcattagatgaggctgaggcagcaagtcgcagactccgtaacgcaggcaaaactatcagtaaccaatcattattgcaagaagttgttgaccgcgatgctcttgtcgcaaccaagaaaagccgtaaggagcgtcaaaaattggaacaggcggttttgcgatctgctggggttgacgaaagtaaaactgaatccttgtcctcccaagtagttgaaccagatgaagtggaatctacagaaacggttcactcccaatacgaggacatggaagtgtgggactatgaacaacttcgtgaagaatacgggttttaatagaggaggatataaatgacagaagctcaagcgatcgccaagcagttgggtggggtaaaaccagatgatgagtggttgcaagctgaaattgctcgtctcaagggtaagagtattgtgcctttacagcaggtaaaaactctccatgattggttggatggcaagcgtaaagcacggcaatcttgtcgagtcgttggggaatcacggactggcaagacggttgcctgtgatgcctataggtacaggcaaaagccacagcaagaagttgggcgacccccgattgtgcctgtagtttatattcagcctccgcaaaaatgcggctctaaggatttattcaaggagatgattgagtatcttaaatttcgagcaacaaagggaactgtttctgattttcgtgggagggcgatggaggtactcaaggggtgtggggtagaaatgctgattattgatgaagctgatcgcctcaaacctgagacgtttgctgaggtgcgagatatttatgacaagttaggaattgctgtggtattggtgggaacagaccgcttggaggcagtaatcaagcgagatgaacaagtctataaccgctttcgggcttgtcatcgcttcggcaagttatcggggaaagattttcaagatactgtgcaagcctgggaagatagagttttgaaactgcctgtttcttctaatttaactagcaaggatatgctgcggattctcacatcagcaactgaaggttacattggccgcctggatgagattctcagggaaacagcgattcgttctttatctaagggatttaagaagattgataaggctgttttacaggaagtggcgaaagagtacaagtgataaaggaggtaaataatgacaacaccagatgttaagccttggctttttattatagaaccctatccaggggaaagcctaagtcattttctaggtcggtttagacgtgctaaccatttatctcctgctgggttgggtggtttagctgggattggtgctgtagtggcacggtgggaaagatttcattttaaccctcgccctagtcaaaaagagttggaagcgatcgcatctgtagtagaagtggatgcccaaaggttagcccagatgttaccacctgctggagtgggaatgcagcatgagccaattcgcttgtgtggggcttgttatgctgaagcgccttgtcacagaattgagtggcagtataagtcggtgtggaagtgcgatcgccatcaactcaaaattttagcgaagtgtccaaattgtcaagcaccttttaaaatgcctgccctgtgggaagatgggtgttgtcatagatgtaggactctgtttgcggaaatggcaaagcaacagaagagttaataacctaggttaattaagtttaaacgagtattctatagtctcacctaaatagcttggcgtaatcatggtcatagctgtttcctgtgtgaaattgttatccgctcacaattccacacaacatacgagccggaagcataaagtgtaaagcctggggtgcctaatgagtgagctaactcacattaattgcgttgcgctcactgcccgctttccagtcgggaaacctgtcgtgccagctgcattaatgaatcggccaacgcgaaccccttgcggccgcccgggccgtcgaccaattctcatgtttgacagcttatcatcgaatttctgccattcatccgcttattatcacttattcaggcgtagcaaccaggcgtttaagggcaccaataactgccttaaaaaaattacgccccgccctgccactcatcgcagtactgttgtaattcattaagcattctgccgacatggaagccatcacaaacggcatgatgaacctgaatcgccagcggcatcagcaccttgtcgccttgcgtataatatttgcccatggtgaaaacgggggcgaagaagttgtccatattggccacgtttaaatcaaaactggtgaaactcacccagggattggctgagacgaaaaacatattctcaataaaccctttagggaaataggccaggttttcaccgtaacacgccacatcttgcgaatatatgtgtagaaactgccggaaatcgtcgtggtattcactccagagcgatgaaaacgtttcagtttgctcatggaaaacggtgtaacaagggtgaacactatcccatatcaccagctcaccgtctttcattgccatacgaaattccggatgagcattcatcaggcgggcaagaatgtgaataaaggccggataaaacttgtgcttatttttctttacggtctttaaaaaggccgtaatatccagctgaacggtctggttataggtacattgagcaactgactgaaatgcctcaaaatgttctttacgatgccattgggatatatcaacggtggtatatccagtgatttttttctccattttagcttccttagctcctgaaaatctcgataactcaaaaaatacgcccggtagtgatcttatttcattatggtgaaagttggaacctcttacgtgccgatcaacgtctcattttcgccaaaagttggcccagggcttcccggtatcaacagggacaccaggatttatttattctgcgaagtgatcttccgtcacaggtatttattcgcgataagctcatggagcggcgtaaccgtcgcacaggaaggacagagaaagcgcggatctgggaagtgacggacagaacggtcaggacctggattggggaggcggttgccgccgctgctgctgacggtgtgacgttctctgttccggtcacaccacatacgttccgccattcctatgcgatgcacatgctgtatgccggtataccgctgaaagttctgcaaagcctgatgggacataagtccatcagttcaacggaagtctacacgaaggtttttgcgctggatgtggctgcccggcaccgggtgcagtttgcgatgccggagtctgatgcggttgcgatgctgaaacaattatcctgagaataaatgccttggcctttatatggaaatgtggaactgagtggatatgctgtttttgtctgttaaacagagaagctggctgttatccactgagaagcgaacgaaacagtcgggaaaatctcccattatcgtagagatccgcattattaatctcaggagcctgtgtagcgtttataggaagtagtgttctgtcatgatgcctgcaagcggtaacgaaaacgatttgaatatgccttcaggaacaatagaaatcttcgtgcggtgttacgttgaagtggagcggattatgtcagcaatggacagaacaacctaatgaacacagaaccatgatgtggtctgtccttttacagccagtagtgctcgccgcagtcgagcgacagggcgaagccctcggctggttgccctcgccgctgggctggcggccgtctatggccctgcaaacgcgccagaaacgccgtcgaagccgtgtgcgagacaccgcggccggccgccggcgttgtggatacctcgcggaaaacttggccctcactgacagatgaggggcggacgttgacacttgaggggccgactcacccggcgcggcgttgacagatgaggggcaggctcgatttcggccggcgacgtggagctggccagcctcgcaaatcggcgaaaacgcctgattttacgcgagtttcccacagatgatgtggacaagcctggggataagtgccctgcggtattgacacttgaggggcgcgactactgacagatgaggggcgcgatccttgacacttgaggggcagagtgctgacagatgaggggcgcacctattgacatttgaggggctgtccacaggcagaaaatccagcatttgcaagggtttccgcccgtttttcggccaccgctaacctgtcttttaacctgcttttaaaccaatatttataaaccttgtttttaaccagggctgcgccctgtgcgcgtgaccgcgcacgccgaaggggggtgcccccccttctcgaaccctcccggtcgagtgagcgaggaagcaccagggaacagcacttatatattctgcttacacacgatgcctgaaaaaacttcccttggggttatccacttatccacggggatatttttataattattttttttatagtttttagatcttcttttttagagcgccttgtaggcctttatccatgctggttctagagaaggtgttgtgacaaattgccctttcagtgtgacaaatcaccctcaaatgacagtcctgtctgtgacaaattgcccttaaccctgtgacaaattgccctcagaagaagctgttttttcacaaagttatccctgcttattgactcttttttatttagtgtgacaatctaaaaacttgtcacacttcacatggatctgtcatggcggaaacagcggttatcaatcacaagaaacgtaaaaatagcccgcgaatcgtccagtcaaacgacctcactgaggcggcatatagtctctcccgggatcaaaaacgtatgctgtatctgttcgttgaccagatcagaaaatctgatggcaccctacaggaacatgacggtatctgcgagatccatgttgctaaatatgctgaaatattcggattgacctctgcggaagccagtaaggatatacggcaggcattgaagagtttcgcggggaaggaagtggttttttatcgccctgaagaggatgccggcgatgaaaaaggctatgaatcttttccttggtttatcaaacgtgcgcacagtccatccagagggctttacagtgtacatatcaacccatatctcattcccttctttatcgggttacagaaccggtttacgcagtttcggcttagtgaaacaaaagaaatcaccaatccgtatgccatgcgtttatacgaatccctgtgtcagtatcgtaagccggatggctcaggcatcgtctctctgaaaatcgactggatcatagagcgttaccagctgcctcaaagttaccagcgtatgcctgacttccgccgccgcttcctgcaggtctgtgttaatgagatcaacagcagaactccaatgcgcctctcatacattgagaaaaagaaaggccgccagacgactcatatcgtattttccttccgcgatatcacttccatgacgacaggatagtctgagggttatctgtcacagatttgagggtggttcgtcacatttgttctgacctactgagggtaatttgtcacagttttgctgtttccttcagcctgcatggattttctcatactttttgaactgtaatttttaaggaagccaaatttgagggcagtttgtcacagttgatttccttctctttcccttcgtcatgtgacctgatatcgggggttagttcgtcatcattgatgagggttgattatcacagtttattactctgaattggctatccgcgtgtgtacctctacctggagtttttcccacggtggatatttcttcttgcgctgagcgtaagagctatctgacagaacagttcttctttgcttcctcgccagttcgctcgctatgctcggttacacggctgcggcg

SEQ ID NO: 400 - DNA, 6630 bp, Synthetic construct
  source 1..6630: mol_type = other DNA
ctgaattgactctcttccgggcgctatcatgccataccgcgaaaggttttgcgccattcgatggtgtccgggatctcgacgctctcccttatgcgactcctgcattaggaaattaatacgactcactataggggaattgtgagcggataacaattcccctgtagaaataattttgtttaactttaataaggagatataccatgggcttagacgaagaatttgagttcactgaggaattgacgcaagctccagatgttattgtgcttgacaagagtcattttgtggtagacccatcccaaattattctgcaaacatcggataagcataaactgagatttaatcttatcaagtggttcgctgaatcccccaacattactattaaatctcagagaaaacaggcagtcgtagatacccttggtgtttctactcggcaggtggagcgtctcctcaagcaatatcataatggtgagttatcagagacagcgggagtacaacgctcagataaggggaaacttcgcatcagccaatactgggaagattatattaaaacaacttatgaaaaaagtctgaaagataaacatccaatgttgccagcagctgtcgtgcgggaagtgaagcgacacgcgatcgttgacctcggactgaaaccaggagattatccccatccagccaccatctatagaaatttagctcctttaatcgagcaacacacgcggaagaaaaaagttagaaatccgggttcgggatcttggctgaccgttgtcacgcgagatggtcagctactgaaggctgactttagtaaccaaattatccaatgcgaccataccgagctggatattcatatagttgatagtcatggcagtttattgtctgaccgtccttggctaactactgttgtcgatacttattcaagttgcattcttggttttcatttatggatcaaacaaccaggttctacggaggtagctcttgccttgagacacgccattctacccaaaaattatccagaggactacaaacttggcaaagtttgggaaatatatggacctccttttcagtatttttttactgatggtggaaaagattttaattcaaagcatctaaaagccattggtaagaaattaggatttcagtgcgaactacgcaatcgcccgccccaaggtggaattgtagaacgtctttttaaaaccattaatactcaagttcttaaagagcttcccggttacacgggggcaaacgttcaagaacgcccgaaaaatgcagagaaagaagcctgtttaacaatacaggatttggataaaattctagccagcttcttttgtgatatttataaccacgaaccctatcccaaggagcctcgcaacacgagatttgaacgctggtttaaaggtatggggggaaaattacccgaacctttggacgagcgagaattggatatttgtttgatgaaagaagcacaacgagttgttcaagctcatggtagcatacagtttgaaaacctaatttatcgaggagaagctctgaaggcatatagaggtgaatacgtcaccctaagatacgatcccgaccatgtcctgactttatatgtctatagttgcgaagctgatgataatgcagaagagttcttgggctatgctcacgctataaacatggatactcatgacttgagtatagaagaattgaaaactctcaataaagaacgaagtaaagctcgtagcgatcattacaactatgatgctttattagcattgggtaaacgcaaagaacttgtagaagaaagaaaacaagacaagaaagcaaaaaggcaatcagagcaaaaacgtctccgcactgcttccaagaaaaactcaaatgttattgaactacgcaaaagtagagcttcgagttcttcaagtaaagatgaccgacaggaaattttaccagagagagtttctagggacgaactaaagccggagaaaacagaactgaaatatgaggaaaatctgttagcacagaccgatactcaaaaacaggagagacataagttagttgtctctgaccgtaaaaaaaatttaaagaacatttggtgataaaggaggtaaataatggccatatctcaactggcaacccaaccatttgtcgaagtcttacctccagagttagatagcaaagctcaaattgctaaaactattgatattgaggagcttttcagaattaattttatcacaaccgatcggtcatcagaatgtttcagatggttagatgagctgcgtatcctgaaacaatgcggtcggatcattggaccaagaaatgtaggcaaaagccgagcagtgcttcactatcgtaatgaggataaaaaacgagtttcttatgtaaaggcttggtcggcatcgagttctaaacgtctattttcacaaatcttaaaggatattaaccatgctgcatcaacaggtaaacgacaggatttacgtccaagattagctggtagtcttgaactatttggattagaattggtcattgttgataatgctgaaaatcttcaaaaagaggcgctcttagatttaaagcaactttttgaagaatgccatgttcctattgtcttagttggaggtaaggagttagatgatattttagaagattttgatttgttgactaactttccaacgttatatgagtttgaacgattggaacatgatgattttataaaaacattaaagacaatcgaattggatattttatctcttccagaagcgtctaagttaagtgagggtaacatatttgcaattttagctgagagtacaggtgggaaaataggaattttagtcaagatactaactaaagcagttttacattctcttaaaaagggatttggtaaagttgatgaaagcattttagaaaaaatcgcaagtcgttatggaacaaaatacgttcccattgaaaacaaaaatagaaacgattaatagaggaggatataaatgattgaagatgatgaaattcgtctaaggttgggctatgttgaaccacacccaggtgaaagcatcagtcattatttgggacggcttcgtcgatttaaggctaacagccttccttcaggatatgctctaggaaaaattgcgggtcttgggtctgttctgactcgatgggaaaagttgtacttcaacccatttcccactcaacaagaactagaggcattagcacaagtgattcaagtggaggttgagaaattaagagagatgctacccactaaaggtgtcacaatgatgcctcgacccattcgattatgtgcggcttgctatgcagagtcaccttatcaccggatcgagtggcagtttaaggacaaaatgaagtgcgatcgccatcagttgcgcttattaacaaaatgcacaaactgtcagacaccattccccattcctgctgattgggaaaaaggagaatgctcgcattgttttttgtcttttgctaagatggtgaagtgtcaaaagcgtcgttagtaacctaggctgctgccaccgctgagcaataactagcataaccccttggggcctctaaacgggtcttgaggggttttttgctgaaacctcaggcatttgagaagcacacggtcacactgcttccggtagtcaataaaccggtaaaccagcaatagacataagcggctatttaacgaccctgccctgaaccgacgacaagctgacgaccgggtctccgcaagtggcacttttcggggaaatgtgcgcggaacccctatttgtttatttttctaaatacattcaaatatgtatccgctcatgaattaattcttagaaaaactcatcgagcatcaaatgaaactgcaatttattcatatcaggattatcaataccatatttttgaaaaagccgtttctgtaatgaaggagaaaactcaccgaggcagttccataggatggcaagatcctggtatcggtctgcgattccgactcgtccaacatcaatacaacctattaatttcccctcgtcaaaaataaggttatcaagtgagaaatcaccatgagtgacgactgaatccggtgagaatggcaaaagtttatgcatttctttccagacttgttcaacaggccagccattacgctcgtcatcaaaatcactcgcatcaaccaaaccgttattcattcgtgattgcgcctgagcgagacgaaatacgcggtcgctgttaaaaggacaattacaaacaggaatcgaatgcaaccggcgcaggaacactgccagcgcatcaacaatattttcacctgaatcaggatattcttctaatacctggaatgctgttttcccggggatcgcagtggtgagtaaccatgcatcatcaggagtacggataaaatgcttgatggtcggaagaggcataaattccgtcagccagtttagtctgaccatctcatctgtaacatcattggcaacgctacctttgccatgtttcagaaacaactctggcgcatcgggcttcccatacaatcgatagattgtcgcacctgattgcccgacattatcgcgagcccatttatacccatataaatcagcatccatgttggaatttaatcgcggcctagagcaagacgtttcccgttgaatatggctcatactcttcctttttcaatattattgaagcatttatcagggttattgtctcatgagcggatacatatttgaatgtatttagaaaaataaacaaataggcatgctagcgcagaaacgtcctagaagatgccaggaggatacttagcagagagacaataaggccggagcgaagccgtttttccataggctccgcccccctgacgaacatcacgaaatctgacgctcaaatcagtggtggcgaaacccgacaggactataaagataccaggcgtttccccctgatggctccctcttgcgctctcctgttcccgtcctgcggcgtccgtgttgtggtggaggctttacccaaatcaccacgtcccgttccgtgtagacagttcgctccaagctgggctgtgtgcaagaaccccccgttcagcccgactgctgcgccttatccggtaactatcatcttgagtccaacccggaaagacacgacaaaacgccactggcagcagccattggtaactgagaattagtggatttagatatcgagagtcttgaagtggtggcctaacagaggctacactgaaaggacagtatttggtatctgcgctccactaaagccagttaccaggttaagcagttccccaactgacttaaccttcgatcaaaccgcctccccaggcggttttttcgtttacagagcaggagattacgacgatcgtaaaaggatctcaagaagatcctttacggattcccgacaccatcactctagatttcagtgcaatttatctcttcaaatgtagcacctgaagtcagccccatacgatataagttgtaattctcatgttagtcatgccccgcgcccaccggaaggagctgactgggttgaaggctctcaagggcatcggtcgagatcccggtgcctaatgagtgagctaacttacattaattgcgttgcgctcactgcccgctttccagtcgggaaacctgtcgtgccagctgcattaatgaatcggccaacgcgcggggagaggcggtttgcgtattgggcgccagggtggtttttcttttcaccagtgagacgggcaacagctgattgcccttcaccgcctggccctgagagagttgcagcaagcggtccacgctggtttgccccagcaggcgaaaatcctgtttgatggtggttaacggcgggatataacatgagctgtcttcggtatcgtcgtatcccactaccgagatgtccgcaccaacgcgcagcccggactcggtaatggcgcgcattgcgcccagcgccatctgatcgttggcaaccagcatcgcagtgggaacgatgccctcattcagcatttgcatggtttgttgaaaaccggacatggcactccagtcgccttcccgttccgctatcggctgaatttgattgcgagtgagatatttatgccagccagccagacgcagacgcgccgagacagaacttaatgggcccgctaacagcgcgatttgctggtgacccaatgcgaccagatgctccacgcccagtcgcgtaccgtcttcatgggagaaaataatactgttgatgggtgtctggtcagagacatcaagaaataacgccggaacattagtgcaggcagcttccacagcaatggcatcctggtcatccagcggatagttaatgatcagcccactgacgcgttgcgcgagaagattgtgcaccgccgctttacaggcttcgacgccgcttcgttctaccatcgacaccaccacgctggcacccagttgatcggcgcgagatttaatcgccgcgacaatttgcgacggcgcgtgcagggccagactggaggtggcaacgccaatcagcaacgactgtttgcccgccagttgttgtgccacgcggttgggaatgtaattcagctccgccatcgccgcttccactttttcccgcgttttcgcagaaacgtggctggcctggttcaccacgcgggaaacggtctgataagagacaccggcatactctgcgacatcgtataacgttactggtttcacattcaccacc

SEQ ID NO: 401 - DNA, 5643 bp, Synthetic construct
  source 1..5643: mol_type = other DNA
ggttcgagatggcgctcgatgacgccaactacctctgatagttgagtcgatacttcggcgatcaccgcttccctcatactcttcctttttcaatattattgaagcatttatcagggttattgtctcatgagcggatacatatttgaatgtatttagaaaaataaacaaatagctagctcactcggtcgctacgctccgggcgtgagactgcggcgggcgctgcggacacatacaaagttacccacagattccgtggataagcaggggactaacatgtgaggcaaaacagcagggccgcgccggtggcgtttttccataggctccgccctcctgccagagttcacataaacagacgcttttccggtgcatctgtgggagccgtgaggctcaaccatgaatctgacagtacgggcgaaacccgacaggacttaaagatccccaccgtttccggcgggtcgctccctcttgcgctctcctgttccgaccctgccgtttaccggatacctgttccgcctttctcccttacgggaagtgtggcgctttctcatagctcacacactggtatctcggctcggtgtaggtcgttcgctccaagctgggctgtaagcaagaactccccgttcagcccgactgctgcgccttatccggtaactgttcacttgagtccaacccggaaaagcacggtaaaacgccactggcagcagccattggtaactgggagttcgcagaggatttgtttagctaaacacgcggttgctcttgaagtgtgcgccaaagtccggctacactggaaggacagatttggttgctgtgctctgcgaaagccagttaccacggttaagcagttccccaactgacttaaccttcgatcaaaccacctccccaggtggttttttcgtttacagggcaaaagattacgcgcagaaaaaaaggatctcaagaagatcctttgatcttttctactgaaccgctctagatttcagtgcaatttatctcttcaaatgtagcacctgaagtcagccccatacgatataagttgtaattctcatgttagtcatgccccgcgcccaccggaaggagctgactgggttgaaggctctcaagggcatcggtcgagatcccggtgcctaatgagtgagctaacttacattaattgcgttgcgctcactgcccgctttccagtcgggaaacctgtcgtgccagctgcattaatgaatcggccaacgcgcggggagaggcggtttgcgtattgggcgccagggtggtttttcttttcaccagtgagacgggcaacagctgattgcccttcaccgcctggccctgagagagttgcagcaagcggtccacgctggtttgccccagcaggcgaaaatcctgtttgatggtggttaacggcgggatataacatgagctgtcttcggtatcgtcgtatcccactaccgagatgtccgcaccaacgcgcagcccggactcggtaatggcgcgcattgcgcccagcgccatctgatcgttggcaaccagcatcgcagtgggaacgatgccctcattcagcatttgcatggtttgttgaaaaccggacatggcactccagtcgccttcccgttccgctatcggctgaatttgattgcgagtgagatatttatgccagccagccagacgcagacgcgccgagacagaacttaatgggcccgctaacagcgcgatttgctggtgacccaatgcgaccagatgctccacgcccagtcgcgtaccgtcttcatgggagaaaataatactgttgatgggtgtctggtcagagacatcaagaaataacgccggaacattagtgcaggcagcttccacagcaatggcatcctggtcatccagcggatagttaatgatcagcccactgacgcgttgcgcgagaagattgtgcaccgccgctttacaggcttcgacgccgcttcgttctaccatcgacaccaccacgctggcacccagttgatcggcgcgagatttaatcgccgcgacaatttgcgacggcgcgtgcagggccagactggaggtggcaacgccaatcagcaacgactgtttgcccgccagttgttgtgccacgcggttgggaatgtaattcagctccgccatcgccgcttccactttttcccgcgttttcgcagaaacgtggctggcctggttcaccacgcgggaaacggtctgataagagacaccggcatactctgcgacatcgtataacgttactggtttcacattcaccaccctgaattgactctcttccgggcgctatcatgccataccgcgaaaggttttgcgccattcgatggtgtccgggatctcgacgctctcccttatgcgactcctgcattaggaaattaatacgactcactataggggaattgtgagcggataacaattcccctgtagaaataattttgtttaactttaataaggagatataccatgggtttcaacacccctcccgaagtggggcgggttgaaagcgagacctcaattggtctccgtttcaacacccctcccgaagtggggcgggttgaaagggatccgaattcgagctcggcgcgcctgcaggtcgacaagcttgcggccgcataatgcttaagtcgaacagaaagtaatcgtattgtacacggccgcataatcgaaattaatacgactcactataggggaattgtgagcggataacaattccccatcttagtatattagttaagtataagaaggagatatacatatgagccaaatcactattcagtgtcgtcttgtagcttctgagccatcacgtcatcaactatggaagttgatggtagatttaaatacgccactgattaatgaattattggttcaggtagcccaacaccctgaatttgaaacttggcgacaaaagggcaaacacccagccaaaattgtcaaagaattatgcgagcctttgagaactgatcctcgcttcatcggtcaacctggacgtttttacacaagtgcgatcgccacagtaaattacatctacaaatcttggtttgcattgatgaagcgatcgcaatcccaactagaaggtaaaatgcgctggtgggaaatgcttaaaagcgatgccgaattagtagaagttagtggagttactttagagagccttcgtactaaagctgctgaaatactgtctcaatttgctccccagccagatacagttgaagcacaaccagcgaaaggaaagaaacgtaagaaaaccaaaaaatcagatggcgattgcgcggagcgcacgctacgcgaacgtagtatttctgattatttgtttgaagcctaccgcgacacagaagaaatcttgacacgttgtgcaattaactatttactgaaaaatggttgcaaaatcagcaataaagaggaaaatgctgaaaaattcgctaaacgccgccgcaaactggagattcaaattgaacgcctaagagaaaaactagaggcacgaatccccaaaggtcgagacttaacggatgccaaatggttagaaactcttttgctggccactcttaatgttcctgaaaatgaagcggaggcgaaatcttggcaagacagtctgctaaaaaaatctatcacagtacctttcccagtcgcttatgaaaccaacgaggacatgacttggtttaaaaacgaaaggggacgtatctgtgtaaaatttagcggactgagtgagcatacttttcaagtctattgcgattctcgccaactccaatggtttcaacgttttttagaggaccagcaaatcaaacggaacagtaaaaaccaacactctagcagcctattcactctccgtagtggacgtattgcatggcaagagggggaaggtaaaagtgaaccttggaaagtcaaccgcttaatcctttactgttctgtagatactcgcctgtggacggctgaaggaacaaacctagtccgagaagaaaaagcagaagaaattgctaaagctatcgcccaaacaaaagccaaaggcaaactcaacgataaacaacaagctcatataaaacggaaaaactcttctctagccagaattaataacctctttccccgccccagcaagcccttatataaaggtcaatctcatattcttgttggtgttagccttggtttagagaaacctacaacactagcagtggttgatggctctataggtaaagtgcttacttaccgcaacattaaacaacttctgggcgataattacagacttttaaatagacaacgacaacaaaaacacaccttatcccatcaacgccaagtagctcaaatcctggcttcaccgaatcaacttggggaatcagagttgggacagtatgtagacagattactagctaaagaaattgtagcgatcacccaaacatataaagctggctctattgtcctgcctaaattgggcgatatgcgagaacaggtgcaaagtgagattcaagctaaagccgaacagaaatcagacttaatagaagttcaacaaaaatactccaaacagtaccgagttagcgtccatcagtggagctatggtcgattgattgcaagtattcgctcgtcagcagctaaagttggaattgtgattgaggaatcgaaacaaccgattcgaggtagtccacaggagaaagcgagagaattagcgatcgctgcttataattctcgccgacgtacctgataacctaggctgctgccaccgctgagcaataactagcataaccccttggggcctctaaacgggtcttgaggggttttttgctgaaacctcaggcatttgagaagcacacggtcacactgcttccggtagtcaataaaccggtaaaccagcaatagacataagcggctatttaacgaccctgccctgaaccgacgaccgggtcatcgtggccggatcttgcggcccctcggcttgaacgaattgttagacattatttgccgactaccttggtgatctcgcctttcacgtagtggacaaattcttccaactgatctgcgcgcgaggccaagcgatcttcttcttgtccaagataagcctgtctagcttcaagtatgacgggctgatactgggccggcaggcgctccattgcccagtcggcagcgacatccttcggcgcgattttgccggttactgcgctgtaccaaatgcgggacaacgtaagcactacatttcgctcatcgccagcccagtcgggcggcgagttccatagcgttaaggtttcatttagcgcctcaaatagatcctgttcaggaaccggatcaaagagttcctccgccgctggacctaccaaggcaacgctatgttctcttgcttttgtcagcaagatagccagatcaatgtcgatcgtggctggctcgaagatacctgcaagaatgtcattgcgctgccattctccaaattgcagttcgcgcttagctggataacgccacggaatgatgtcgtcgtgcacaacaatggtgacttctacagcgcggagaatctcgctctctccaggggaagccgaagtttccaaaaggtcgttgatcaaagctcgccgcgttgtttcatcaagccttacggtcaccgtaaccagcaaatcaatatcactgtgtggcttcaggccgccatccactgcggagccgtacaaatgtacggccagcaacgtc

SEQ ID NO: 402 - DNA, 5586 bp, Synthetic construct
  source 1..5586: mol_type = other DNA
acctctgatagttgagtcgatacttcggcgatcaccgcttccctcatactcttcctttttcaatattattgaagcatttatcagggttattgtctcatgagcggatacatatttgaatgtatttagaaaaataaacaaatagctagctcactcggtcgctacgctccgggcgtgagactgcggcgggcgctgcggacacatacaaagttacccacagattccgtggataagcaggggactaacatgtgaggcaaaacagcagggccgcgccggtggcgtttttccataggctccgccctcctgccagagttcacataaacagacgcttttccggtgcatctgtgggagccgtgaggctcaaccatgaatctgacagtacgggcgaaacccgacaggacttaaagatccccaccgtttccggcgggtcgctccctcttgcgctctcctgttccgaccctgccgtttaccggatacctgttccgcctttctcccttacgggaagtgtggcgctttctcatagctcacacactggtatctcggctcggtgtaggtcgttcgctccaagctgggctgtaagcaagaactccccgttcagcccgactgctgcgccttatccggtaactgttcacttgagtccaacccggaaaagcacggtaaaacgccactggcagcagccattggtaactgggagttcgcagaggatttgtttagctaaacacgcggttgctcttgaagtgtgcgccaaagtccggctacactggaaggacagatttggttgctgtgctctgcgaaagccagttaccacggttaagcagttccccaactgacttaaccttcgatcaaaccacctccccaggtggttttttcgtttacagggcaaaagattacgcgcagaaaaaaaggatctcaagaagatcctttgatcttttctactgaaccgctctagatttcagtgcaatttatctcttcaaatgtagcacctgaagtcagccccatacgatataagttgtaattctcatgttagtcatgccccgcgcccaccggaaggagctgactgggttgaaggctctcaagggcatcggtcgagatcccggtgcctaatgagtgagctaacttacattaattgcgttgcgctcactgcccgctttccagtcgggaaacctgtcgtgccagctgcattaatgaatcggccaacgcgcggggagaggcggtttgcgtattgggcgccagggtggtttttcttttcaccagtgagacgggcaacagctgattgcccttcaccgcctggccctgagagagttgcagcaagcggtccacgctggtttgccccagcaggcgaaaatcctgtttgatggtggttaacggcgggatataacatgagctgtcttcggtatcgtcgtatcccactaccgagatgtccgcaccaacgcgcagcccggactcggtaatggcgcgcattgcgcccagcgccatctgatcgttggcaaccagcatcgcagtgggaacgatgccctcattcagcatttgcatggtttgttgaaaaccggacatggcactccagtcgccttcccgttccgctatcggctgaatttgattgcgagtgagatatttatgccagccagccagacgcagacgcgccgagacagaacttaatgggcccgctaacagcgcgatttgctggtgacccaatgcgaccagatgctccacgcccagtcgcgtaccgtcttcatgggagaaaataatactgttgatgggtgtctggtcagagacatcaagaaataacgccggaacattagtgcaggcagcttccacagcaatggcatcctggtcatccagcggatagttaatgatcagcccactgacgcgttgcgcgagaagattgtgcaccgccgctttacaggcttcgacgccgcttcgttctaccatcgacaccaccacgctggcacccagttgatcggcgcgagatttaatcgccgcgacaatttgcgacggcgcgtgcagggccagactggaggtggcaacgccaatcagcaacgactgtttgcccgccagttgttgtgccacgcggttgggaatgtaattcagctccgccatcgccgcttccactttttcccgcgttttcgcagaaacgtggctggcctggttcaccacgcgggaaacggtctgataagagacaccggcatactctgcgacatcgtataacgttactggtttcacattcaccaccctgaattgactctcttccgggcgctatcatgccataccgcgaaaggttttgcgccattcgatggtgtccgggatctcgacgctctcccttatgcgactcctgcattaggaaattaatacgactcactataggggaattgtgagcggataacaattcccctgtagaaataattttgtttaactttaataaggagatataccatgggttgaaataagacaataccttctatagggattgaaagcgagacctcaattggtctccgttgaaataagacaataccttctatagggattgaaagggatccgaattcgagctcggcgcgcctgcaggtcgacaagcttgcggccgcataatgcttaagtcgaacagaaagtaatcgtattgtacacggccgcataatcgaaattaatacgactcactataggggaattgtgagcggataacaattccccatcttagtatattagttaagtataagaaggagatatacatatggttcaggtaactattcaatctcgtttaatcgcttctgctgatactcgtcaatctctctggttgttgatgagcaagaaaaatactcctttgatcaatgaaatccttacccgaattaaacatcatcccgattttcctcaatggcgagagaaaggcagactgccgaaaaactttattgctcaacaaattcaagagctaaaaaatgattctcgttttcaaggacaaccatctcggttttatgcttctgtcggtaaaatcatcgactacatatacaaatcttggttcaaagtgcaaaagagttacaaaatccaattagaaggtaatagccgttggttagaaatgttgaaacccgatagtttattaatagaatcctttgatggttcaatggaagcactgcaaaatcaggctcaacagattctcgataacattgaaacgacttctactcaagaaggtattgttgattatttatttcaaaaatatgagaaaatagaaaattgtcgaatgaaggatgcgatcgtttatctgatcaaaaatggtagtcgtattcctaagaacaacattgaaacaaccaagaaatataaacgtatcaaacgcaaattagaaatcaaaattcgtaaattgaaaagacaagtggaaatgtctattccttctggcagagatttagagggagaaaaatggttgcacactctcatccttgcttctaacacgatgccagtagatcaaagtgagagtgatagttggttttcagcactgaaacgaaattctccgtcaattccctatcctattgtttatgaaagcaatgaggatttaacatggtgtttgaataaccaaaaccgtatttgtattaaatttagtggtttgagtgaccatctttttcaaatctattgtgattctcgtcaactggcctattttcggcgtttttatgaggatcaggaattgaaaaaagccagtaaagatcagttttcgagtgctttatttactctgcgatcggctatgatcatttggaaagaagatgatggaaaaggagagtcgtgggataaacataaactctatttacattgtacttttgatacagattattggactgtggaaggtacacaagtcattgctcaaaaaaagcaggaggaagtgctaaatctcattgataggatgaaggaaaagacggatttaacagatactcaaaaggcatttattcaacggaaacaaacgactcttgcccgacttaataacatttttcctcgccctagtaagcctatttatcaaggtaatccgaatctttttctcggtgtagcaatgggtttacaagaaccagttacgatcgcacttgtggatgtcagcacaaataaagtgattctctatcgtaatatcaagcaattattgggagataattaccatctactccgtagacgtcgtaatgagaaacagaaattgaatcaccaaaaccataaagcaaggaaaagagctaattttcaacaaaagggggaatctaatctgggtgaatacctcgatcgcctcattgccaaatccattcttcaaatcgctaaagagtaccaagtatcaactattatcgttcctcgattaaatcagatgcgatcgattacggaggcagaaatacaagcaagggcggaggagagaataccagaatataaggaggggcaacgaaaatatgcacaggattatcgtgtacaggtgcatcaatggagttatggcagattgattgacaatatcaaagcgatttcttctaaattgggtattgtcgtagaggaaggcaaacaacccaaacaaggaacatttaccgataaggcatcacagttagcattgagtacccagaaaaataatcgccaaaataatcccaaaaagacaaattcttaataacctaggctgctgccaccgctgagcaataactagcataaccccttggggcctctaaacgggtcttgaggggttttttgctgaaacctcaggcatttgagaagcacacggtcacactgcttccggtagtcaataaaccggtaaaccagcaatagacataagcggctatttaacgaccctgccctgaaccgacgaccgggtcatcgtggccggatcttgcggcccctcggcttgaacgaattgttagacattatttgccgactaccttggtgatctcgcctttcacgtagtggacaaattcttccaactgatctgcgcgcgaggccaagcgatcttcttcttgtccaagataagcctgtctagcttcaagtatgacgggctgatactgggccggcaggcgctccattgcccagtcggcagcgacatccttcggcgcgattttgccggttactgcgctgtaccaaatgcgggacaacgtaagcactacatttcgctcatcgccagcccagtcgggcggcgagttccatagcgttaaggtttcatttagcgcctcaaatagatcctgttcaggaaccggatcaaagagttcctccgccgctggacctaccaaggcaacgctatgttctcttgcttttgtcagcaagatagccagatcaatgtcgatcgtggctggctcgaagatacctgcaagaatgtcattgcgctgccattctccaaattgcagttcgcgcttagctggataacgccacggaatgatgtcgtcgtgcacaacaatggtgacttctacagcgcggagaatctcgctctctccaggggaagccgaagtttccaaaaggtcgttgatcaaagctcgccgcgttgtttcatcaagccttacggtcaccgtaaccagcaaatcaatatcactgtgtggcttcaggccgccatccactgcggagccgtacaaatgtacggccagcaacgtcggttcgagatggcgctcgatgacgccaact

SEQ ID NO: 403 - DNA, 6051 bp, Synthetic construct
  source 1..6051: mol_type = other DNA
ctctccaggggaagccgaagtttccaaaaggtcgttgatcaaagctcgccgcgttgtttcatcaagccttacggtcaccgtaaccagcaaatcaatatcactgtgtggcttcaggccgccatccactgcggagccgtacaaatgtacggccagcaacgtcggttcgagatggcgctcgatgacgccaactacctctgatagttgagtcgatacttcggcgatcaccgcttccctcatactcttcctttttcaatattattgaagcatttatcagggttattgtctcatgagcggatacatatttgaatgtatttagaaaaataaacaaatagctagctcactcggtcgctacgctccgggcgtgagactgcggcgggcgctgcggacacatacaaagttacccacagattccgtggataagcaggggactaacatgtgaggcaaaacagcagggccgcgccggtggcgtttttccataggctccgccctcctgccagagttcacataaacagacgcttttccggtgcatctgtgggagccgtgaggctcaaccatgaatctgacagtacgggcgaaacccgacaggacttaaagatccccaccgtttccggcgggtcgctccctcttgcgctctcctgttccgaccctgccgtttaccggatacctgttccgcctttctcccttacgggaagtgtggcgctttctcatagctcacacactggtatctcggctcggtgtaggtcgttcgctccaagctgggctgtaagcaagaactccccgttcagcccgactgctgcgccttatccggtaactgttcacttgagtccaacccggaaaagcacggtaaaacgccactggcagcagccattggtaactgggagttcgcagaggatttgtttagctaaacacgcggttgctcttgaagtgtgcgccaaagtccggctacactggaaggacagatttggttgctgtgctctgcgaaagccagttaccacggttaagcagttccccaactgacttaaccttcgatcaaaccacctccccaggtggttttttcgtttacagggcaaaagattacgcgcagaaaaaaaggatctcaagaagatcctttgatcttttctactgaaccgctctagatttcagtgcaatttatctcttcaaatgtagcacctgaagtcagccccatacgatataagttgtaattctcatgttagtcatgccccgcgcccaccggaaggagctgactgggttgaaggctctcaagggcatcggtcgagatcccggtgcctaatgagtgagctaacttacattaattgcgttgcgctcactgcccgctttccagtcgggaaacctgtcgtgccagctgcattaatgaatcggccaacgcgcggggagaggcggtttgcgtattgggcgccagggtggtttttcttttcaccagtgagacgggcaacagctgattgcccttcaccgcctggccctgagagagttgcagcaagcggtccacgctggtttgccccagcaggcgaaaatcctgtttgatggtggttaacggcgggatataacatgagctgtcttcggtatcgtcgtatcccactaccgagatgtccgcaccaacgcgcagcccggactcggtaatggcgcgcattgcgcccagcgccatctgatcgttggcaaccagcatcgcagtgggaacgatgccctcattcagcatttgcatggtttgttgaaaaccggacatggcactccagtcgccttcccgttccgctatcggctgaatttgattgcgagtgagatatttatgccagccagccagacgcagacgcgccgagacagaacttaatgggcccgctaacagcgcgatttgctggtgacccaatgcgaccagatgctccacgcccagtcgcgtaccgtcttcatgggagaaaataatactgttgatgggtgtctggtcagagacatcaagaaataacgccggaacattagtgcaggcagcttccacagcaatggcatcctggtcatccagcggatagttaatgatcagcccactgacgcgttgcgcgagaagattgtgcaccgccgctttacaggcttcgacgccgcttcgttctaccatcgacaccaccacgctggcacccagttgatcggcgcgagatttaatcgccgcgacaatttgcgacggcgcgtgcagggccagactggaggtggcaacgccaatcagcaacgactgtttgcccgccagttgttgtgccacgcggttgggaatgtaattcagctccgccatcgccgcttccactttttcccgcgttttcgcagaaacgtggctggcctggttcaccacgcgggaaacggtctgataagagacaccggcatactctgcgacatcgtataacgttactggtttcacattcaccaccctgaattgactctcttccgggcgctatcatgccataccgcgaaaggttttgcgccattcgatggtgtccgggatctcgacgctctcccttatgcgactcctgcattaggaaattaatacgactcactataggggaattgtgagcggataacaattcccctgtagaaataattttgtttaactttaataaggagatataccatgggttgcattcgccctcccgatgttgggtgggttgaaagcgagacctcaattggtctccgttgcattcgccctcccgatgttgggtgggttgaaagggatccgaattcgagctcggcgcgcctgcaggtcgacaagcttgcggccgcataatgcttaagtcgaacagaaagtaatcgtattgtacacggccgcataatcgaaattaatacgactcactataggggaattgtgagcggataacaattccccatcttagtatattagttaagtataagaaggagatatacatatgcagttgagagtaatttgttgctgtctaagtgccgatgaagcgacccgccagttcttttgggaggcaatggttaaatatacgcttctggtcaaccgcctgctagaacaagttgggcagttgtctgagtttaagcagtggcaagaaaagggcagtatctcgaaagagcctgtcaagcagttatgtgatgcccttaaaaaacaccatgcagagtttcaggggttgccacaccgcttctacatctcagccaaacttatggtgacttataccttcgagtcttggctggcgttacaacaacgtcgccggcgtaaaattgatggcaaacgacgctggttaaaccgagttgaagatgatattgaacttgcaaaagtgacggactttagcccagaaatgattcagaatcgggctaggaaaatcctagcagagatacatccatctaaccctgttgaacctgaacctgagacatcttcagacaatgaaataaatgaaggagagaactgccaggaagaggaagagatgaatcaacccaaatctcttctttcctgcttgtttgatttgtacgacagtacggaagatgcgcttactctccgggcgatcgttcatttgctcaaaaataatggtgaagtgaatgaggaggacgaagatcctaaaaaacttgaactgcgtttagccgccaagcgcgaggaaattcagaggttagagaaacaactgcaaggacgtttaccaaaaggacgcgatccaacgggtgaaactaccactcgttttttagaagaggctattaagctacctgaacacccaaccgcctatccaccccggtttcttctcaacgccttttattgctacgccttactgccaatgccgtacatccagtacggagtctatctcctcaatgccattttggatgaagccaggatcgttgagtctgacttcatcacctggagagatacgatcgcagaacatctggtgaacgcggctaaacgacccaactccttgccctatccgcttatctttggcagtactagcgatctggtttgggaatcagaatcgaaaagaaaaggtcccaacgctcctgatacagagggagcattggagcaatcaggagccaaatcatcaagaaagcgtccatctaagcgaaagcggacaaggctcaaaacacaatcagatgagagaatcaccgtacgctttcatggcatgagccagtatcgcttcaaaatctactgcgatcgacgccagcttccgatatttcgccagtttctgactgactactgtacgcataaggcacttgacgaagagaataagttttctatgggcttgtttgccctccgttcagccagcttaatctggaaaaaagacaaacaacgtcctcacaaacgtaactcttcggagccagttgaaccgttgtcgccttggcaaactcatcgactttatttgcactgttccatcgattctcgcttgttgaccgctgaaggaacggaacaagttcgcttccagaagatcctccagactaaacggaaattagaaggggcaaagaataaagaacaagaaattctcagacaaaaatctgaacgtcaacataccgagtcggaacaagacttagacgataaactgaagaaacagcggcagaatgttgcacggaatcaaaccagtttaaattgcctgtataatcctacaccgccacgccctagtcgagttcgctatcaaggaaatcctaacattgctataggggtcagcttttgtcgtcaacaacttgttggagtgggagtaattgatctgcaaacgcaacaagtgcaggaatactacagtatccgcagattactgatcaatcgtaaagttactcaagtaaaacgtggtcgcagcgttcttcagttaaagctaaaaaaatatcggttagtcaaccaattatgtatgtggaagaagaagaacattactcaacgaacccaacaacaaaagcaaggactgtgcattcaaaacaccactgaatctaatctaagacagtatctggaacgattagttgcagaccgaattgtggaagtggcactgaagcaccaagccggaagtattgtcacaccgcaactgggagagatccgcgagagtattgaaagtgccgttcaagcaatagccaagcaactcttcgagaatcaccgagaggcgcaacaggcgtacgcgaagcagtttcgcatggattttcatcggtggagttacggtcgattaaccgactgtattcatagccgtgctcgtcaggagggcattctagttcaagctggacgacaacctgtcgagggcaatcttgttggtaaagccctcacaatcgccttatcagggcgaaatttggtctagtaacctaggctgctgccaccgctgagcaataactagcataaccccttggggcctctaaacgggtcttgaggggttttttgctgaaacctcaggcatttgagaagcacacggtcacactgcttccggtagtcaataaaccggtaaaccagcaatagacataagcggctatttaacgaccctgccctgaaccgacgaccgggtcatcgtggccggatcttgcggcccctcggcttgaacgaattgttagacattatttgccgactaccttggtgatctcgcctttcacgtagtggacaaattcttccaactgatctgcgcgcgaggccaagcgatcttcttcttgtccaagataagcctgtctagcttcaagtatgacgggctgatactgggccggcaggcgctccattgcccagtcggcagcgacatccttcggcgcgattttgccggttactgcgctgtaccaaatgcgggacaacgtaagcactacatttcgctcatcgccagcccagtcgggcggcgagttccatagcgttaaggtttcatttagcgcctcaaatagatcctgttcaggaaccggatcaaagagttcctccgccgctggacctaccaaggcaacgctatgttctcttgcttttgtcagcaagatagccagatcaatgtcgatcgtggctggctcgaagatacctgcaagaatgtcattgcgctgccattctccaaattgcagttcgcgcttagctggataacgccacggaatgatgtcgtcgtgcacaacaatggtgacttctacagcgcggagaatctcgct

SEQ ID NO: 404 - DNA, 5652 bp, Synthetic construct
  source 1..5652: mol_type = other DNA
ggtgatctcgcctttcacgtagtggacaaattcttccaactgatctgcgcgcgaggccaagcgatcttcttcttgtccaagataagcctgtctagcttcaagtatgacgggctgatactgggccggcaggcgctccattgcccagtcggcagcgacatccttcggcgcgattttgccggttactgcgctgtaccaaatgcgggacaacgtaagcactacatttcgctcatcgccagcccagtcgggcggcgagttccatagcgttaaggtttcatttagcgcctcaaatagatcctgttcaggaaccggatcaaagagttcctccgccgctggacctaccaaggcaacgctatgttctcttgcttttgtcagcaagatagccagatcaatgtcgatcgtggctggctcgaagatacctgcaagaatgtcattgcgctgccattctccaaattgcagttcgcgcttagctggataacgccacggaatgatgtcgtcgtgcacaacaatggtgacttctacagcgcggagaatctcgctctctccaggggaagccgaagtttccaaaaggtcgttgatcaaagctcgccgcgttgtttcatcaagccttacggtcaccgtaaccagcaaatcaatatcactgtgtggcttcaggccgccatccactgcggagccgtacaaatgtacggccagcaacgtcggttcgagatggcgctcgatgacgccaactacctctgatagttgagtcgatacttcggcgatcaccgcttccctcatactcttcctttttcaatattattgaagcatttatcagggttattgtctcatgagcggatacatatttgaatgtatttagaaaaataaacaaatagctagctcactcggtcgctacgctccgggcgtgagactgcggcgggcgctgcggacacatacaaagttacccacagattccgtggataagcaggggactaacatgtgaggcaaaacagcagggccgcgccggtggcgtttttccataggctccgccctcctgccagagttcacataaacagacgcttttccggtgcatctgtgggagccgtgaggctcaaccatgaatctgacagtacgggcgaaacccgacaggacttaaagatccccaccgtttccggcgggtcgctccctcttgcgctctcctgttccgaccctgccgtttaccggatacctgttccgcctttctcccttacgggaagtgtggcgctttctcatagctcacacactggtatctcggctcggtgtaggtcgttcgctccaagctgggctgtaagcaagaactccccgttcagcccgactgctgcgccttatccggtaactgttcacttgagtccaacccggaaaagcacggtaaaacgccactggcagcagccattggtaactgggagttcgcagaggatttgtttagctaaacacgcggttgctcttgaagtgtgcgccaaagtccggctacactggaaggacagatttggttgctgtgctctgcgaaagccagttaccacggttaagcagttccccaactgacttaaccttcgatcaaaccacctccccaggtggttttttcgtttacagggcaaaagattacgcgcagaaaaaaaggatctcaagaagatcctttgatcttttctactgaaccgctctagatttcagtgcaatttatctcttcaaatgtagcacctgaagtcagccccatacgatataagttgtaattctcatgttagtcatgccccgcgcccaccggaaggagctgactgggttgaaggctctcaagggcatcggtcgagatcccggtgcctaatgagtgagctaacttacattaattgcgttgcgctcactgcccgctttccagtcgggaaacctgtcgtgccagctgcattaatgaatcggccaacgcgcggggagaggcggtttgcgtattgggcgccagggtggtttttcttttcaccagtgagacgggcaacagctgattgcccttcaccgcctggccctgagagagttgcagcaagcggtccacgctggtttgccccagcaggcgaaaatcctgtttgatggtggttaacggcgggatataacatgagctgtcttcggtatcgtcgtatcccactaccgagatgtccgcaccaacgcgcagcccggactcggtaatggcgcgcattgcgcccagcgccatctgatcgttggcaaccagcatcgcagtgggaacgatgccctcattcagcatttgcatggtttgttgaaaaccggacatggcactccagtcgccttcccgttccgctatcggctgaatttgattgcgagtgagatatttatgccagccagccagacgcagacgcgccgagacagaacttaatgggcccgctaacagcgcgatttgctggtgacccaatgcgaccagatgctccacgcccagtcgcgtaccgtcttcatgggagaaaataatactgttgatgggtgtctggtcagagacatcaagaaataacgccggaacattagtgcaggcagcttccacagcaatggcatcctggtcatccagcggatagttaatgatcagcccactgacgcgttgcgcgagaagattgtgcaccgccgctttacaggcttcgacgccgcttcgttctaccatcgacaccaccacgctggcacccagttgatcggcgcgagatttaatcgccgcgacaatttgcgacggcgcgtgcagggccagactggaggtggcaacgccaatcagcaacgactgtttgcccgccagttgttgtgccacgcggttgggaatgtaattcagctccgccatcgccgcttccactttttcccgcgttttcgcagaaacgtggctggcctggttcaccacgcgggaaacggtctgataagagacaccggcatactctgcgacatcgtataacgttactggtttcacattcaccaccctgaattgactctcttccgggcgctatcatgccataccgcgaaaggttttgcgccattcgatggtgtccgggatctcgacgctctcccttatgcgactcctgcattaggaaattaatacgactcactataggggaattgtgagcggataacaattcccctgtagaaataattttgtttaactttaataaggagatataccatgggtttcaacaaccatcccggctaggggtgggttgaaagcgagacctcaattggtctccgtttcaacaaccatcccggctaggggtgggttgaaagggatccgaattcgagctcggcgcgcctgcaggtcgacaagcttgcggccgcataatgcttaagtcgaacagaaagtaatcgtattgtacacggccgcataatcgaaattaatacgactcactataggggaattgtgagcggataacaattccccatcttagtatattagttaagtataagaaggagatatacatatgagcacaatcacgattcaatgccgcctagttgcagaagaagcgaccctgcgctacttttgggaacttatggctgagaagaatacgccactcattaatgaattgttggagcagttaggacaacatccagattttgatacttgggtacaagcaggcaagatgcctgaaaagacagttgagaacttgtgcaagtccctagaagatcgagaaccttttgcaaatcagcccggtcgttttcgtacttcggcagttgctctggtaaagtacatttacaaatcctggtttgcgttacaaaaacgtcgggcggacagactagaaggtaaagagcgctggttaaagatgctcaaaagtgatgtggaactggaacgagaaagcaactgtagtttggatattattcgagctaaagctggggaaattcttgctaaagttactgaggggtgcgctccgagcaatcaaacatcctctaagagaaaaaagaagaaaactaaaaaaagccaagcgacaaaagatctccctacgcttttcgagattatattaaaggcttacgaacaagctgaagaaagcctgacacgagctgcccttgcttatctccttaaaaatgactgtgaagtcagtgaagttgatgaagattcagagaaatttaaaaagcgtcggcgtaaaaaggaaatagaaattgaacgtttaagaaatcaactgaaaagtcggatacctaaaggtcgcgatttaaccggagataagtggttgaaaacgctagaagaagccacccgaaatgttcctgaaaatgaggatgaggcaaaggcttggcaagcccaactcttgagagaagctagttctgttccttttcctgtagcttatgaaactagtgaagatatgacttggtttaccaacgagcaaggtcgaatctttgtttactttaatggttcagccaaacataaatttcaagtttattgcgatcgccgtcaacttcattggtttcaacgttttgtagaggactttcaaatcaagaaaaatggtgataaaaaaggtagcgaaaaggagtaccctgctgggttattgacgctttgttccactcgtctgagatggaaagaaagcgcggaaaaaggagatccttggaatgttcatcgcctaattctttcttgcactatcgatacacgcttatggacacttgaaggaacggaacaggtgcgagctgaaaagatcgctcaggttgaaaaaactattagcaagcgggagcaagaagttaatctgagtaagactcaacttgagcgtttacaagccaagcacagtgagagggagagattgaacaacatttttcccaaccgccctagcaagcccagttaccggggtaaatctcatattgcgatcggtgtaagtttcagtttggaaaacccagccactgttgccgtcgtagatgttgcaaccaagaaagtccttacttaccgcagtttcaaacaattactcggagataactacaaccttgcaaaccggctgcggcaacaaaagcaacgtctttctcacgaacgtcacaaagctcagaaacaaggcgcaccaaattcatttggagactcagagttagggcagtatgtagacagattgcttgcaaaatcgattgtcgcgatcgcaaaaacttatcaagctagtagtattgtcttgcctaaacttcgctatatgagggaaatcatacataatgaagttcaagctaaagccgaaaaaaagattccaggatataaagaaggtcaaaaacaatatgccaaacagtatcggataagcgttcatcaatggagttataatagattatcacagattcttgaaagccaagctacaaaagctggaatttctattgaacgtggatcgcaagtaatccaaggtagctcccaagaacaagcacgagatttagctttatttgcctataacgaacgccaacttagtctgggttagtaacctaggctgctgccaccgctgagcaataactagcataaccccttggggcctctaaacgggtcttgaggggttttttgctgaaacctcaggcatttgagaagcacacggtcacactgcttccggtagtcaataaaccggtaaaccagcaatagacataagcggctatttaacgaccctgccctgaaccgacgaccgggtcatcgtggccggatcttgcggcccctcggcttgaacgaattgttagacattatttgccgactacctt

SEQ ID NO: 405 - DNA, 3797 bp, Synthetic construct
  source 1..3797: mol_type = other DNA
gctcggcccttccggctggctggtttattgctgataaatctggagccggtgagcgtgggtctcgcggtatcattgcagcactggggccagatggtaagccctcccgtatcgtagttatctacacgacggggagtcaggcaactatggatgaacgaaatagacagatcgctgagataggtgcctcactgattaagcattggtaactgtcagaccaagtttactcatatatactttagattgatttaaaacttcatttttaatttaaaaggatctaggtgaagatcctttttgataatctcatgaccaaaatcccttaacgtgagttttcgttccactgagcgtcagaccccgtagaaaagatcaaaggatcttcttgagatcctttttttctgcgcgtaatctgctgcttgcaaacaaaaaaaccaccgctaccagcggtggtttgtttgccggatcaagagctaccaactctttttccgaaggtaactggcttcagcagagcgcagataccaaatactgttcttctagtgtagccgtagttaggccaccacttcaagaactctgtagcaccgcctacatacctcgctctgctaatcctgttaccagtggctgctgccagtggcgataagtcgtgtcttaccgggttggactcaagacgatagttaccggataaggcgcagcggtcgggctgaacggggggttcgtgcacacagcccagcttggagcgaacgacctacaccgaactgagatacctacagcgtgagctatgagaaagcgccacgcttcccgaagggagaaaggcggacaggtatccggtaagcggcagggtcggaacaggagagcgcacgagggagcttccagggggaaacgcctggtatctttatagtcctgtcgggtttcgccacctctgacttgagcgtcgatttttgtgatgctcgtcaggggggcggagcctatggaaaaacgccagcaacgcggcctttttacggttcctggccttttgctggccttttgctcacatgttctttcctgcgttatcccctgattctgtggataaccgtattaccgcctttgagtgagctgataccgctcgccgcagccgaacgaccgagcgcagcgagtcagtgagcgaggaagcggaagagcgcccaatacgcaaaccgcctctccccgcgcgttggccgattcattaatgcagctggcacgacaggtttcccgactggaaagcgggcagtgagcgcaacgcaattaatgtgagttagctcactcattaggcaccccaggctttacactttatgcttccggctcgtatgttgtgtggaattgtgagcggataacaatttcacacaggaaacagctatgaccatgattacgccaagcttgcatgcctgcagattgttgtcgattgccaaattctttgtctgcgttgacaaattgttgtccgtattgccaagttgttgtccgcgttgccaaattacttagtcatcaaggtgtattggcattagaagctgttattataatagctttgatttattggtactgtttcggtcagggatccatggagaaaaaaatcactggatataccaccgttgatatatcccaatggcatcgtaaagaacattttgaggcatttcagtcagttgctcaatgtacctataaccagaccgttcagctggatattacggcctttttaaagaccgtaaagaaaaataagcacaagttttatccggcctttattcacattcttgcccgcctgatgaatgctcatccggagttccgtatggcaatgaaagacggtgagctggtgatatgggatagtgttcacccttgttacaccgttttccatgagcaaactgaaacgttttcatcgctctggagtgaataccacgacgatttccggcagtttctacacatatattcgcaagatgtggcgtgttacggtgaaaacctggcctatttccctaaagggtttattgagaatatgtttttcgtctcagccaatccctgggtgagtttcaccagttttgatttaaacgtggccaatatggacaacttcttcgcccccgttttcactatgggcaaatattatacgcaaggcgacaaggtgctgatgccgctggcgattcaggttcatcatgccgtttgtgatggcttccatgtcggcagaatgcttaatgaattacaacagtactgcgatgagtggcagggcggggcgtaatttttttaaggcagttattggtgcccttctagaatttacataaatgttcaataaaaacgtagttgtattgtactacttggaggacatttattttgtcaatttctgtaaaaatcttccctcaagtcccttttcaagcaaggacagatatttcgtcaacttttcaaaagaggacagctattttggcaataagtttctgggtattttgagcctaaaataacaaaacccttgcttggcaagggttttgaggataatattttgaatgacattaacttgtcaagtggtcatataatttggcaatcgacaattgtggtaccgagctcgaattcactggccgtcgttttacaacgtcgtgactgggaaaaccctggcgttacccaacttaatcgccttgcagcacatccccctttcgccagctggcgtaatagcgaagaggcccgcaccgatcgcccttcccaacagttgcgcagcctgaatggcgaatggcgcctgatgcggtattttctccttacgcatctgtgcggtatttcacaccgcatatggtgcactctcagtacaatctgctctgatgccgcatagttaagccagccccgacacccgccaacacccgctgacgcgccctgacgggcttgtctgctcccggcatccgcttacagacaagctgtgaccgtctccgggagctgcatgtgtcagaggttttcaccgtcatcaccgaaacgcgcgagacgaaagggcctcgtgatacgcctatttttataggttaatgtcatgataataatggtttcttagacgtcaggtggcacttttcggggaaatgtgcgcggaacccctatttgtttatttttctaaatacattcaaatatgtatccgctcatgagacaataaccctgataaatgcttcaataatattgaaaaaggaagagtatgagtattcaacatttccgtgtcgcccttattcccttttttgcggcattttgccttcctgtttttgctcacccagaaacgctggtgaaagtaaaagatgctgaagatcagttgggtgcacgagtgggttacatcgaactggatctcaacagcggtaagatccttgagagttttcgccccgaagaacgttttccaatgatgagcacttttaaagttctgctatgtggcgcggtattatcccgtattgacgccgggcaagagcaactcggtcgccgcatacactattctcagaatgacttggttgagtactcaccagtcacagaaaagcatcttacggatggcatgacagtaagagaattatgcagtgctgccataaccatgagtgataacactgcggccaacttacttctgacaacgatcggaggaccgaaggagctaaccgcttttttgcacaacatgggggatcatgtaactcgccttgatcgttgggaaccggagctgaatgaagccataccaaacgacgagcgtgacaccacgatgcctgtagcaatggcaacaacgttgcgcaaactattaactggcgaactacttactctagcttcccggcaacaattaatagactggatggaggcggataaagttgcaggaccacttctgc

SEQ ID NO: 406 - DNA, 3810 bp, Synthetic construct
  source 1..3810: mol_type = other DNA
gcgcccaatacgcaaaccgcctctccccgcgcgttggccgattcattaatgcagctggcacgacaggtttcccgactggaaagcgggcagtgagcgcaacgcaattaatgtgagttagctcactcattaggcaccccaggctttacactttatgcttccggctcgtatgttgtgtggaattgtgagcggataacaatttcacacaggaaacagctatgaccatgattacgccaagcttgcatgcctgcagagagctgtacagtaacaaattatttgtcatcggtaacagattaatgtcgtcttaacaaattaaatgacgtgatcacaaattaatgtcgccaattcaatgactaggacgtggagggactcgctttcaattctcaaagagaattcttccttgctcggaagtgattggatccatggagaaaaaaatcactggatataccaccgttgatatatcccaatggcatcgtaaagaacattttgaggcatttcagtcagttgctcaatgtacctataaccagaccgttcagctggatattacggcctttttaaagaccgtaaagaaaaataagcacaagttttatccggcctttattcacattcttgcccgcctgatgaatgctcatccggagttccgtatggcaatgaaagacggtgagctggtgatatgggatagtgttcacccttgttacaccgttttccatgagcaaactgaaacgttttcatcgctctggagtgaataccacgacgatttccggcagtttctacacatatattcgcaagatgtggcgtgttacggtgaaaacctggcctatttccctaaagggtttattgagaatatgtttttcgtctcagccaatccctgggtgagtttcaccagttttgatttaaacgtggccaatatggacaacttcttcgcccccgttttcactatgggcaaatattatacgcaaggcgacaaggtgctgatgccgctggcgattcaggttcatcatgccgtttgtgatggcttccatgtcggcagaatgcttaatgaattacaacagtactgcgatgagtggcagggcggggcgtaatttttttaaggcagttattggtgcccttctagatagctgtttaataaaatcataatggttttatactaatcttaggacatctaatttgttaatgacaacccctaaaacaaaaaatcgccttttagaaagacgacatttaatttgttatttttctggaagatgacacttaatttgttaatcccatttgaggtgcgatcgctccttgttttaggggaagaattagttataattattgatatgcaaagatttgaagagtcttatttttagataacactaatttgttatcacgtcatttaatttgttactgtacaagagcggtaccgagctcgaattcactggccgtcgttttacaacgtcgtgactgggaaaaccctggcgttacccaacttaatcgccttgcagcacatccccctttcgccagctggcgtaatagcgaagaggcccgcaccgatcgcccttcccaacagttgcgcagcctgaatggcgaatggcgcctgatgcggtattttctccttacgcatctgtgcggtatttcacaccgcatatggtgcactctcagtacaatctgctctgatgccgcatagttaagccagccccgacacccgccaacacccgctgacgcgccctgacgggcttgtctgctcccggcatccgcttacagacaagctgtgaccgtctccgggagctgcatgtgtcagaggttttcaccgtcatcaccgaaacgcgcgagacgaaagggcctcgtgatacgcctatttttataggttaatgtcatgataataatggtttcttagacgtcaggtggcacttttcggggaaatgtgcgcggaacccctatttgtttatttttctaaatacattcaaatatgtatccgctcatgagacaataaccctgataaatgcttcaataatattgaaaaaggaagagtatgagtattcaacatttccgtgtcgcccttattcccttttttgcggcattttgccttcctgtttttgctcacccagaaacgctggtgaaagtaaaagatgctgaagatcagttgggtgcacgagtgggttacatcgaactggatctcaacagcggtaagatccttgagagttttcgccccgaagaacgttttccaatgatgagcacttttaaagttctgctatgtggcgcggtattatcccgtattgacgccgggcaagagcaactcggtcgccgcatacactattctcagaatgacttggttgagtactcaccagtcacagaaaagcatcttacggatggcatgacagtaagagaattatgcagtgctgccataaccatgagtgataacactgcggccaacttacttctgacaacgatcggaggaccgaaggagctaaccgcttttttgcacaacatgggggatcatgtaactcgccttgatcgttgggaaccggagctgaatgaagccataccaaacgacgagcgtgacaccacgatgcctgtagcaatggcaacaacgttgcgcaaactattaactggcgaactacttactctagcttcccggcaacaattaatagactggatggaggcggataaagttgcaggaccacttctgcgctcggcccttccggctggctggtttattgctgataaatctggagccggtgagcgtgggtctcgcggtatcattgcagcactggggccagatggtaagccctcccgtatcgtagttatctacacgacggggagtcaggcaactatggatgaacgaaatagacagatcgctgagataggtgcctcactgattaagcattggtaactgtcagaccaagtttactcatatatactttagattgatttaaaacttcatttttaatttaaaaggatctaggtgaagatcctttttgataatctcatgaccaaaatcccttaacgtgagttttcgttccactgagcgtcagaccccgtagaaaagatcaaaggatcttcttgagatcctttttttctgcgcgtaatctgctgcttgcaaacaaaaaaaccaccgctaccagcggtggtttgtttgccggatcaagagctaccaactctttttccgaaggtaactggcttcagcagagcgcagataccaaatactgttcttctagtgtagccgtagttaggccaccacttcaagaactctgtagcaccgcctacatacctcgctctgctaatcctgttaccagtggctgctgccagtggcgataagtcgtgtcttaccgggttggactcaagacgatagttaccggataaggcgcagcggtcgggctgaacggggggttcgtgcacacagcccagcttggagcgaacgacctacaccgaactgagatacctacagcgtgagctatgagaaagcgccacgcttcccgaagggagaaaggcggacaggtatccggtaagcggcagggtcggaacaggagagcgcacgagggagcttccagggggaaacgcctggtatctttatagtcctgtcgggtttcgccacctctgacttgagcgtcgatttttgtgatgctcgtcaggggggcggagcctatggaaaaacgccagcaacgcggcctttttacggttcctggccttttgctggccttttgctcacatgttctttcctgcgttatcccctgattctgtggataaccgtattaccgcctttgagtgagctgataccgctcgccgcagccgaacgaccgagcgcagcgagtcagtgagcgaggaagcggaaga

SEQ ID NO: 407 - DNA, 3810 bp, Synthetic construct
  source 1..3810: mol_type = other DNA
gcgcccaatacgcaaaccgcctctccccgcgcgttggccgattcattaatgcagctggcacgacaggtttcccgactggaaagcgggcagtgagcgcaacgcaattaatgtgagttagctcactcattaggcaccccaggctttacactttatgcttccggctcgtatgttgtgtggaattgtgagcggataacaatttcacacaggaaacagctatgaccatgattacgccaagcttgcatgcctgcagttacttgtccattaaataattaatcgtcagttttaaagaattaatttcacttttttctgagaaagcctgacaaatcaagcttttaggggcttgaaacagaatatgaggctcactttgaacttgaaacttcagttttaaagaattaatttcaaaaaacttggttttttttcctcggtactcaatgaggtattgctaaataacgatatattttcacctgtatcggatccatggagaaaaaaatcactggatataccaccgttgatatatcccaatggcatcgtaaagaacattttgaggcatttcagtcagttgctcaatgtacctataaccagaccgttcagctggatattacggcctttttaaagaccgtaaagaaaaataagcacaagttttatccggcctttattcacattcttgcccgcctgatgaatgctcatccggagttccgtatggcaatgaaagacggtgagctggtgatatgggatagtgttcacccttgttacaccgttttccatgagcaaactgaaacgttttcatcgctctggagtgaataccacgacgatttccggcagtttctacacatatattcgcaagatgtggcgtgttacggtgaaaacctggcctatttccctaaagggtttattgagaatatgtttttcgtctcagccaatccctgggtgagtttcaccagttttgatttaaacgtggccaatatggacaacttcttcgcccccgttttcactatgggcaaatattatacgcaaggcgacaaggtgctgatgccgctggcgattcaggttcatcatgccgtttgtgatggcttccatgtcggcagaatgcttaatgaattacaacagtactgcgatgagtggcagggcggggcgtaatttttttaaggcagttattggtgcccttctagaagggttctttcaggtaggctgaaaaaagggaagtagttcaatttaaagaatatagtgtcacctaggaattagtgaagtagtttgatttagaagcctgaagagaataattcagcaaaaaataggctgtaacctctatccagtaaaggattcagccatttttgaggtaagtgtagaaagtgaaattatttctttaaattggaaattaattatttaatggacattactggtaccgagctcgaattcactggccgtcgttttacaacgtcgtgactgggaaaaccctggcgttacccaacttaatcgccttgcagcacatccccctttcgccagctggcgtaatagcgaagaggcccgcaccgatcgcccttcccaacagttgcgcagcctgaatggcgaatggcgcctgatgcggtattttctccttacgcatctgtgcggtatttcacaccgcatatggtgcactctcagtacaatctgctctgatgccgcatagttaagccagccccgacacccgccaacacccgctgacgcgccctgacgggcttgtctgctcccggcatccgcttacagacaagctgtgaccgtctccgggagctgcatgtgtcagaggttttcaccgtcatcaccgaaacgcgcgagacgaaagggcctcgtgatacgcctatttttataggttaatgtcatgataataatggtttcttagacgtcaggtggcacttttcggggaaatgtgcgcggaacccctatttgtttatttttctaaatacattcaaatatgtatccgctcatgagacaataaccctgataaatgcttcaataatattgaaaaaggaagagtatgagtattcaacatttccgtgtcgcccttattcccttttttgcggcattttgccttcctgtttttgctcacccagaaacgctggtgaaagtaaaagatgctgaagatcagttgggtgcacgagtgggttacatcgaactggatctcaacagcggtaagatccttgagagttttcgccccgaagaacgttttccaatgatgagcacttttaaagttctgctatgtggcgcggtattatcccgtattgacgccgggcaagagcaactcggtcgccgcatacactattctcagaatgacttggttgagtactcaccagtcacagaaaagcatcttacggatggcatgacagtaagagaattatgcagtgctgccataaccatgagtgataacactgcggccaacttacttctgacaacgatcggaggaccgaaggagctaaccgcttttttgcacaacatgggggatcatgtaactcgccttgatcgttgggaaccggagctgaatgaagccataccaaacgacgagcgtgacaccacgatgcctgtagcaatggcaacaacgttgcgcaaactattaactggcgaactacttactctagcttcccggcaacaattaatagactggatggaggcggataaagttgcaggaccacttctgcgctcggcccttccggctggctggtttattgctgataaatctggagccggtgagcgtgggtctcgcggtatcattgcagcactggggccagatggtaagccctcccgtatcgtagttatctacacgacggggagtcaggcaactatggatgaacgaaatagacagatcgctgagataggtgcctcactgattaagcattggtaactgtcagaccaagtttactcatatatactttagattgatttaaaacttcatttttaatttaaaaggatctaggtgaagatcctttttgataatctcatgaccaaaatcccttaacgtgagttttcgttccactgagcgtcagaccccgtagaaaagatcaaaggatcttcttgagatcctttttttctgcgcgtaatctgctgcttgcaaacaaaaaaaccaccgctaccagcggtggtttgtttgccggatcaagagctaccaactctttttccgaaggtaactggcttcagcagagcgcagataccaaatactgttcttctagtgtagccgtagttaggccaccacttcaagaactctgtagcaccgcctacatacctcgctctgctaatcctgttaccagtggctgctgccagtggcgataagtcgtgtcttaccgggttggactcaagacgatagttaccggataaggcgcagcggtcgggctgaacggggggttcgtgcacacagcccagcttggagcgaacgacctacaccgaactgagatacctacagcgtgagctatgagaaagcgccacgcttcccgaagggagaaaggcggacaggtatccggtaagcggcagggtcggaacaggagagcgcacgagggagcttccagggggaaacgcctggtatctttatagtcctgtcgggtttcgccacctctgacttgagcgtcgatttttgtgatgctcgtcaggggggcggagcctatggaaaaacgccagcaacgcggcctttttacggttcctggccttttgctggccttttgctcacatgttctttcctgcgttatcccctgattctgtggataaccgtattaccgcctttgagtgagctgataccgctcgccgcagccgaacgaccgagcgcagcgagtcagtgagcgaggaagcggaaga

SEQ ID NO: 408 - DNA, 3809 bp, Synthetic construct
  source 1..3809: mol_type = other DNA
gcgcccaatacgcaaaccgcctctccccgcgcgttggccgattcattaatgcagctggcacgacaggtttcccgactggaaagcgggcagtgagcgcaacgcaattaatgtgagttagctcactcattaggcaccccaggctttacactttatgcttccggctcgtatgttgtgtggaattgtgagcggataacaatttcacacaggaaacagctatgaccatgattacgccaagcttgcatgcctgcagttttttgtacagtgactaattatttgtcgtcggtgacagattaatgtcgttgggactaattaactgtcgtcgggacgaattgatgtcgtttaggtgccagtgacagattaatgtcatttatttacagagactatagcgataatgtcaacgtagcgctctctttcaaccctccctaataaaaattggatccatggagaaaaaaatcactggatataccaccgttgatatatcccaatggcatcgtaaagaacattttgaggcatttcagtcagttgctcaatgtacctataaccagaccgttcagctggatattacggcctttttaaagaccgtaaagaaaaataagcacaagttttatccggcctttattcacattcttgcccgcctgatgaatgctcatccggagttccgtatggcaatgaaagacggtgagctggtgatatgggatagtgttcacccttgttacaccgttttccatgagcaaactgaaacgttttcatcgctctggagtgaataccacgacgatttccggcagtttctacacatatattcgcaagatgtggcgtgttacggtgaaaacctggcctatttccctaaagggtttattgagaatatgtttttcgtctcagccaatccctgggtgagtttcaccagttttgatttaaacgtggccaatatggacaacttcttcgcccccgttttcactatgggcaaatattatacgcaaggcgacaaggtgctgatgccgctggcgattcaggttcatcatgccgtttgtgatggcttccatgtcggcagaatgcttaatgaattacaacagtactgcgatgagtggcagggcggggcgtaatttttttaaggcagttattggtgcccttctagatttgtcattatgaaaatacacaaaagcttttttatctctgatgaagcgacagctaatttgtcactattacccaaaatgacagctaatctgtcactgtcaagatgttatcctaatactactaaaacgctgtaacctataccgagcaagattttaatggatgacattaatttgtctcgacgacatataattagtcactgtacatttttgtacaatgacaaataattagttaatgtacaataatttttgcatacttaaaaacagggtaccgagctcgaattcactggccgtcgttttacaacgtcgtgactgggaaaaccctggcgttacccaacttaatcgccttgcagcacatccccctttcgccagctggcgtaatagcgaagaggcccgcaccgatcgcccttcccaacagttgcgcagcctgaatggcgaatggcgcctgatgcggtattttctccttacgcatctgtgcggtatttcacaccgcatatggtgcactctcagtacaatctgctctgatgccgcatagttaagccagccccgacacccgccaacacccgctgacgcgccctgacgggcttgtctgctcccggcatccgcttacagacaagctgtgaccgtctccgggagctgcatgtgtcagaggttttcaccgtcatcaccgaaacgcgcgagacgaaagggcctcgtgatacgcctatttttataggttaatgtcatgataataatggtttcttagacgtcaggtggcacttttcggggaaatgtgcgcggaacccctatttgtttatttttctaaatacattcaaatatgtatccgctcatgagacaataaccctgataaatgcttcaataatattgaaaaaggaagagtatgagtattcaacatttccgtgtcgcccttattcccttttttgcggcattttgccttcctgtttttgctcacccagaaacgctggtgaaagtaaaagatgctgaagatcagttgggtgcacgagtgggttacatcgaactggatctcaacagcggtaagatccttgagagttttcgccccgaagaacgttttccaatgatgagcacttttaaagttctgctatgtggcgcggtattatcccgtattgacgccgggcaagagcaactcggtcgccgcatacactattctcagaatgacttggttgagtactcaccagtcacagaaaagcatcttacggatggcatgacagtaagagaattatgcagtgctgccataaccatgagtgataacactgcggccaacttacttctgacaacgatcggaggaccgaaggagctaaccgcttttttgcacaacatgggggatcatgtaactcgccttgatcgttgggaaccggagctgaatgaagccataccaaacgacgagcgtgacaccacgatgcctgtagcaatggcaacaacgttgcgcaaactattaactggcgaactacttactctagcttcccggcaacaattaatagactggatggaggcggataaagttgcaggaccacttctgcgctcggcccttccggctggctggtttattgctgataaatctggagccggtgagcgtgggtctcgcggtatcattgcagcactggggccagatggtaagccctcccgtatcgtagttatctacacgacggggagtcaggcaactatggatgaacgaaatagacagatcgctgagataggtgcctcactgattaagcattggtaactgtcagaccaagtttactcatatatactttagattgatttaaaacttcatttttaatttaaaaggatctaggtgaagatcctttttgataatctcatgaccaaaatcccttaacgtgagttttcgttccactgagcgtcagaccccgtagaaaagatcaaaggatcttcttgagatcctttttttctgcgcgtaatctgctgcttgcaaacaaaaaaaccaccgctaccagcggtggtttgtttgccggatcaagagctaccaactctttttccgaaggtaactggcttcagcagagcgcagataccaaatactgttcttctagtgtagccgtagttaggccaccacttcaagaactctgtagcaccgcctacatacctcgctctgctaatcctgttaccagtggctgctgccagtggcgataagtcgtgtcttaccgggttggactcaagacgatagttaccggataaggcgcagcggtcgggctgaacggggggttcgtgcacacagcccagcttggagcgaacgacctacaccgaactgagatacctacagcgtgagctatgagaaagcgccacgcttcccgaagggagaaaggcggacaggtatccggtaagcggcagggtcggaacaggagagcgcacgagggagcttccagggggaaacgcctggtatctttatagtcctgtcgggtttcgccacctctgacttgagcgtcgatttttgtgatgctcgtcaggggggcggagcctatggaaaaacgccagcaacgcggcctttttacggttcctggccttttgctggccttttgctcacatgttctttcctgcgttatcccctgattctgtggataaccgtattaccgcctttgagtgagctgataccgctcgccgcagccgaacgaccgagcgcagcgagtcagtgagcgaggaagcggaaga

SEQ ID NO: 409 - DNA, 3910 bp, Synthetic construct
  source 1..3910: mol_type = other DNA
gcgcccaatacgcaaaccgcctctccccgcgcgttggccgattcattaatgcagctggcacgacaggtttcccgactggaaagcgggcagtgagcgcaacgcaattaatgtgagttagctcactcattaggcaccccaggctttacactttatgcttccggctcgtatgttgtgtggaattgtgagcggataacaatttcacacaggaaacagctatgaccatgattacgccaagcttgcatgcctgcagcaaagactacctacttaaatgaaccgcaaatgtacattcgcaaattaaatgtcgtaattcgcaaatttgtgtcgtttttcgcaaattaatgtcgtttagaatagtttgtctcatcaattcaattataggaacttttcgcaaattaatgtcgtcctgtttctccatttagtgtcgattaacaaattaatgtcgctgttaacgaattaatgtcgtcgaattagttccaactaacgttaacaaattaatgtcgtctaacataatgtcttgctaggatccatggagaaaaaaatcactggatataccaccgttgatatatcccaatggcatcgtaaagaacattttgaggcatttcagtcagttgctcaatgtacctataaccagaccgttcagctggatattacggcctttttaaagaccgtaaagaaaaataagcacaagttttatccggcctttattcacattcttgcccgcctgatgaatgctcatccggagttccgtatggcaatgaaagacggtgagctggtgatatgggatagtgttcacccttgttacaccgttttccatgagcaaactgaaacgttttcatcgctctggagtgaataccacgacgatttccggcagtttctacacatatattcgcaagatgtggcgtgttacggtgaaaacctggcctatttccctaaagggtttattgagaatatgtttttcgtctcagccaatccctgggtgagtttcaccagttttgatttaaacgtggccaatatggacaacttcttcgcccccgttttcactatgggcaaatattatacgcaaggcgacaaggtgctgatgccgctggcgattcaggttcatcatgccgtttgtgatggcttccatgtcggcagaatgcttaatgaattacaacagtactgcgatgagtggcagggcggggcgtaatttttttaaggcagttattggtgcccttctagaaaaaccactgattaacactttaggtactaaagtaccactaatgtggcaaaaatgcgacatctaatttgcgaaacaggcaaatcttaataaacgacatttaatttgcgaaaataggatttgcgacatctaatttgcgaaacaggcaaattactcagttttatggataaatagcttgtaagtcctacgcaataaagatctcagctattagaagtaattgcgacactaatttgcgaattgcgacatataatttgcgaatgtacaccaaccccaagcattggtaccgagctcgaattcactggccgtcgttttacaacgtcgtgactgggaaaaccctggcgttacccaacttaatcgccttgcagcacatccccctttcgccagctggcgtaatagcgaagaggcccgcaccgatcgcccttcccaacagttgcgcagcctgaatggcgaatggcgcctgatgcggtattttctccttacgcatctgtgcggtatttcacaccgcatatggtgcactctcagtacaatctgctctgatgccgcatagttaagccagccccgacacccgccaacacccgctgacgcgccctgacgggcttgtctgctcccggcatccgcttacagacaagctgtgaccgtctccgggagctgcatgtgtcagaggttttcaccgtcatcaccgaaacgcgcgagacgaaagggcctcgtgatacgcctatttttataggttaatgtcatgataataatggtttcttagacgtcaggtggcacttttcggggaaatgtgcgcggaacccctatttgtttatttttctaaatacattcaaatatgtatccgctcatgagacaataaccctgataaatgcttcaataatattgaaaaaggaagagtatgagtattcaacatttccgtgtcgcccttattcccttttttgcggcattttgccttcctgtttttgctcacccagaaacgctggtgaaagtaaaagatgctgaagatcagttgggtgcacgagtgggttacatcgaactggatctcaacagcggtaagatccttgagagttttcgccccgaagaacgttttccaatgatgagcacttttaaagttctgctatgtggcgcggtattatcccgtattgacgccgggcaagagcaactcggtcgccgcatacactattctcagaatgacttggttgagtactcaccagtcacagaaaagcatcttacggatggcatgacagtaagagaattatgcagtgctgccataaccatgagtgataacactgcggccaacttacttctgacaacgatcggaggaccgaaggagctaaccgcttttttgcacaacatgggggatcatgtaactcgccttgatcgttgggaaccggagctgaatgaagccataccaaacgacgagcgtgacaccacgatgcctgtagcaatggcaacaacgttgcgcaaactattaactggcgaactacttactctagcttcccggcaacaattaatagactggatggaggcggataaagttgcaggaccacttctgcgctcggcccttccggctggctggtttattgctgataaatctggagccggtgagcgtgggtctcgcggtatcattgcagcactggggccagatggtaagccctcccgtatcgtagttatctacacgacggggagtcaggcaactatggatgaacgaaatagacagatcgctgagataggtgcctcactgattaagcattggtaactgtcagaccaagtttactcatatatactttagattgatttaaaacttcatttttaatttaaaaggatctaggtgaagatcctttttgataatctcatgaccaaaatcccttaacgtgagttttcgttccactgagcgtcagaccccgtagaaaagatcaaaggatcttcttgagatcctttttttctgcgcgtaatctgctgcttgcaaacaaaaaaaccaccgctaccagcggtggtttgtttgccggatcaagagctaccaactctttttccgaaggtaactggcttcagcagagcgcagataccaaatactgttcttctagtgtagccgtagttaggccaccacttcaagaactctgtagcaccgcctacatacctcgctctgctaatcctgttaccagtggctgctgccagtggcgataagtcgtgtcttaccgggttggactcaagacgatagttaccggataaggcgcagcggtcgggctgaacggggggttcgtgcacacagcccagcttggagcgaacgacctacaccgaactgagatacctacagcgtgagctatgagaaagcgccacgcttcccgaagggagaaaggcggacaggtatccggtaagcggcagggtcggaacaggagagcgcacgagggagcttccagggggaaacgcctggtatctttatagtcctgtcgggtttcgccacctctgacttgagcgtcgatttttgtgatgctcgtcaggggggcggagcctatggaaaaacgccagcaacgcggcctttttacggttcctggccttttgctggccttttgctcacatgttctttcctgcgttatcccctgattctgtggataaccgtattaccgcctttgagtgagctgataccgctcgccgcagccgaacgaccgagcgcagcgagtcagtgagcgaggaagcggaaga

SEQ ID NO: 410 - DNA, 1683 bp, Anabaena variabilis
  source 1..1683: mol_type = genomic DNA
atgctggatgatcctgataagggcaatcaagagccagaaacgcatgagatagtgactgagctatcactagatgagcagcatttgctggaaatgattcagaaactaatagaaccgtgcgatcgtatcacctatggagaaagacaaagggaagttgcaggaaaactaggcaagtctgtacggacagtaaggcgattggtgaaaaaatgggaacaggagggtttaactgcacttcaaactgcgacaagaactgataaaggaacacatcgaatagattcggattggcaggacttcattatcaagacatataaggaaaataataaagatggaaaacgaatgtctcccaaacaagtggcgctcagagttcaaacaaaggctgaggaattaggtcaacaaaaatatcccagttatagaactgtgtatcgagttttacaacctatcatcgaacagaaagaacaaaaagagggtattagacatcggggttggcatggttctcgattatcagttaaaactcgcgatggcaaagacttatttgtggaacacagcaatcatgtttggcagtgtgatcacactcgtgtagacctattactggtagatcagcacggtgaacttttgagtcgtccttggttaacaatagttgtagatacttactcccgttgcattatggggataaatttgggttttgatgccccaagttcccaggtaatagcattggcactgcgtcatgcaattttgcctaagcgatatggatcagaatatggactccatgaagaatggggaacctatggtaaaccagaacatttttatactgatggcggtaaagattttcgctccaaccatttgcaacagataggtgtgcagttggggtttgtttgtcatttacgcgatcgccccagtgaaggtggtattgttgagcgtccttttggaacttttaacactgatttattttcaaccttgccaggatacacaggttcaaatgtacaggaacgccctgagcaagctgagaaagaagcttgtattactttgagggaattagaacgtctgctagtacgttacatcgtggataaatacaaccaaagtattgatgctcgattaggcgaccaaactcgttatcaacgttgggaagcaggattaattgttgcgcctaatttaatttcagaagaagaattacgtatctgcctgatgaagcaaactcgacgctcaatttacaggggtgggtatgtgcaatttgaaaatctgacttatcggggagaaaatttggcaggttatgcaggtgaaaatgttgtactgcgttatgaccccaaagatatcaccactttgttggtttaccgccagaaaggtaatcaagaagaatttctagctcgtgcttatgctcaagatttggagacagaggaattgtctgtggatgaagcaaaagctatgagtcgccggattcggcaagcaggtaaggctattagcaatcgttctattttggcagaggtgcgcgatcgcgaaaccttcgtgaaccaaaagaaaaccaaaaaggaacgccaaaaggcagaacagaccatagttcaaaaggctaaaaaacctgtgcctgttgaaccagaggaagaaattgaagtggcatctgttgacagtgaaccagaataccagatgccggaagtctttgattacgaacaaatgcgtgaagattacgggtggtag

SEQ ID NO: 411 - DNA, 837 bp, Anabaena variabilis
  source 1..837: mol_type = genomic DNA
atgacttcaaaacaggctcaagctgttgcccaacaattgggagatattccggtaaatgacgaaaaaatacaagcggaaattcaacgattgaaccggaagagttttattcccttggaacaagtacaaatgcttcatgattggttagatggaaagcgacaatcacggcagtctggtcgagtggtgggggagtcaagaacaggcaaaactatgggttgtgatgcctacagattacgccataaaccaaagcaagaaccaggacgacctccaactgttcctgttgcttatattcaaatcccgcaagaatgcggtgcaaaggaattgtttggagtcctccttgaacatttgaagtatcaaatgacaaagggaacagtagccgaaatcagggacagaacgctacgagttcttaaggggtgtggagtggaaatgcttattattgatgaggctgaccgcttgaaacccaaaacttttgctgaggtgccggacatttttgacaaattagaaatagcagtgattttggtaggaactgaccgcttagatgcagtaattaagcgggacgaacaagtttacaaccgttttcgggcttgtcatcgatttggtaagttttctggggatgaatttaagaagatagtagacatttgggaaaagaaggttttgcagttgccagttgcttccaatctttccagtaagactatgctgaagactttaggtgagacaacggggggttatattggtttgctcgacatgattctgagagaatctgctatccgggcattgaagaaaggattacggaaggtggatttggcaaccctgaaggaagtgacagaagagtacaaataa

SEQ ID NO: 412 - DNA, 504 bp, Anabaena variabilis
  source 1..504: mol_type = genomic DNA
atggaagttccacagattcaaccttggctgtttcaaatagaaccgttagagggagaaagtttgagtcactttttaggacgttttcgacgggcaaatgatttaacacctactggtttaggtaaagctgctggacttggaggtgcgatcgctcgttgggaaaagtttcgatttaatcccccaccgtctcgccagcagttggaggctttggctaatgttgtcggggttgatgccgataggttagcgcaaatgttaccatctgctggggtggggatgaaaatggagccaattcggttatgtgctgcttgttatgccgagtcgccatgtcacaagattgaatggcaatttaaggtaacgcgagggtgcgcgaggcacaaaataactttattgtcagaatgtcctaactgcaaggcaagatttaaggttccagcattatgggtggatggttggtgtaatcgttgctttttacggtttgaggagatggctaagtatcagaaagggttgtag

SEQ ID NO: 413 - DNA, 1665 bp, Cyanobacterium aponinum
  source 1..1665: mol_type = genomic DNA
atgaccatcgataatcaattttctgattctccagaattgatctctcaactttctcccgaagaccaaaaaatcgctgatgttattgaaaatttacttcaaccttgtgacaagaaaacttatggaaaaaagttaaaacaagcatcagatcagttgaagaagtcggttagaactattcaaagatacgttaagcagtgggaagaaaatggtttagtcggtattcttcaaaataatcgagccgataaaggctcttatcgtattgacccccgcttacaggatttcattcttaaaacctatcgtgaaggaaacaaaggtagtaaacgaatgacgcctaaacaggtttatttacgagcagttgtccaagcagaaaattgggggatcaaacctccctctcacatgactatttatcggattttgaatcctattattgcggaaaaagaaaataagaaaaggattagaagttctgggtggagaggttctcagttagttctttctactcgctcaggtacagaaatcgatgtacagtatagtaaccatgtttggcaatgtgatcatactcgtgcagatattcttttggtagatcaatttggtgaattattgggcagaccttggataacgatagtggtagatacttattctcgctgtattatgggtattaatcttggttttgatgctcccagttcccaagtggtcactcttgctttacgtcatgccattttgcctaagagttacagttctgattatgaactacatgaggaatggggaacttatggtaaaccagagtacttttacactgatgggggtaaggattttcgttctaatcatcttcaacaaattagcttacaactgggttttacttgtcatctaaggagtcgccccagtgaagggggagtagtagagcgtctttttaaaactttgaacacggaggttttttctactctaccaggatatacaggagcaaatgtacaagaacgtccagaagatgcagaaaaagaagcctgtctcactcttaaggagctagaaatacttatagttcgctatatcgttgataactacaaccaacgtattgatgctcgtatgggagagcaaactcgctttcagcgttgggagtcaggattgctttctactcctcatatcatacctgaacgtgaattagatatttgtttgatgaaacagtcacgcagaaaagttcaaaagggtggtcatcttcaatttgaaaacttgatctataagggtcagtatttagcaggttatgaaggagagacagttattcttcgttatgatcctagggatattacgggtattttgatttatcgtgttgagaataataaagaaatttttcttactcgtgcttatgccacggatttagaaggggactgtttatccttaacggatgcgaaatctagtgttaagagaattagagagaagtctaaaaatgttcataataagtcaattttaatggaaattcaacaacgtcatttattttcagaaaagaaaaccaagaagcaaattcagcaagaagaacaaaaacaaattaaaccaaatacttctctatctatcttcaaaccagaaactgagatggatacgcaggttgaatcatcacaggagctatcagaggaagacttggatattgaaatgattgactacggtaatttacaacaatattaa

SEQ ID NO: 414 - DNA, 834 bp, Cyanobacterium aponinum
  source 1..834: mol_type = genomic DNA
atggaagcgaaagaaattgctcaacaattgggagaggttgaacagccaaatcagtctttgcagaatgaactggatcgactatcaaaaaaacaatttctgtttttagatcaggtaaaaatctatcaccaatggttgaatgaaagattattcatgaaacattgttgccgagttgtgggggattcacacacgggcaaaacctcgtcttctcaagcctactgtctaagatataaatctactcaagagtcggggaaaaatcctatttttcccgtgttatatgtttctgtccccgaaaatgcaacttcaaaagtcttttttgagacatcaattaagagtttcggttatcgaatcagtaagggtacgatttccgatttaagagaacgaatgctgacattactgtccagatgtcaggttaaaatgatgattattgatgaggctgaccgatgtaaacctgaaactctgagttatatacgagatatattcgatcatctcaatatttgtattgttttggtgggtacagatcgacttaatacggtacttaaaagggatgagcaagtctataatcgttttttaccgtgttatcgctatggtcttttagataaagaatcccttattaaaacaataaaaatttgggaaattaaaattttaaaacttcctgtagcatctaatttaagtcagggcaaaaagtttaatattatttattctacttctaaaggatgtttaggaacaatggataaattgttgagaacatctgcttctatggctttaattagaggtttatcgaagattgaattgaatatattggaagaagcagcgcacttgttcaaagataaatga

SEQ ID NO: 415 - DNA, 492 bp, Cyanobacterium aponinum
  source 1..492: mol_type = genomic DNA
atgattacaaatagttttgattcttggatattaatgcttgatccttatcaaggagaaagcatcagtcattttctaggaagatttagaagggagaatagtcttaccgttaataatttagggaaagcaaccgaactttatggagcgatcgcccgttgggaaaagtttcgttttaatcctcctccttcctctgaacagttgaaaaagttaagtgcgatcgtacaagtagaagtagcaaccttacaaacaatgtttccttccgccccgatgaaaatgactcccattcgcctttgttcggcttgttatggagaaaagccctatcataagatggaatggcagtataaggagatttacaagtgcgatcgacatcaactgaaacttttatcagaatgtcctaactgtggggcaagattcaagtttcctagtctatgggtggatggttggtgtcacagatgttttactccttttgcagagatgaaacaacaaaaagattag

SEQ ID NO: 416 - DNA, 1908 bp, unidentified
  source 1..1908: mol_type = genomic DNA
atgtctacagacgctacctcggcaacttgctccccttctcaggattcgggtttggaacaggggcagcaggggcaaccccccatgcttctcaatgaggtttcgccggaggtgcaacagaaaattgatttaattgatgctatctttcaaactcctgacaagaaagctcgaagggaagcgattctacatgccgcaaagacattgggcaaaacgactcgaaccatccggctcatgatggaaaaggtcaagaatgacggagttgccacgctggcagtcggtcgtaaggatgaaggacagttccgcatctctgagcagtggtctaactttattaaagtgatttatgaatggggacagcgagacggttcgcggatcaatatcaatggagtatatacccatttggtcgctcttgcctctcaaggagaagcattgcgggataaaaagtacgccgatcgctttaagggttatccccaggtacttgaggatctagttgcaggaaaacatccctctcatgtcactgtttataaagttgttaatttttatcttgagcgaaaaaacaaaaaggttcgccatccgggttcacctgccgaaggacaagttatccaaaccacggaagggatcatagagctaactcacagtaatcaggtttggcaatgtgaccacactaagcttgatattttgctggtggatggtgatggggaagtaattttacaatgggatgaccaaaagcaagagattgttggtcgcccttatctaacattgatcatggatagttattccggctgtgtcgcagggtttcacctgggctttgaggcagcaggttcgcatgaagtgggtttagctttgcgccatgcgatgttacccaaacagtatggctccgagtacaaacttaaggcggagtggaatgtttttggcgtgccagagtattggctgaccgatcgggcgaaggaattcaagtccaatcatttgaagcaagtctcaatgcaagtaggcttcaagcgtagattgcgggcttttccatccgcagggggactcattgaatccattttcgacaagattaataaagaagtcttgtcccactttggaggctacacaggctcgaacattacaaaacgccctaaagaagcggaaaagcatgcatgtctgacgttggatgagctagagaagagactggtgatatactttgttgatcattacaacggacatgattacccaaaggtagccaatcaaaagcgatcgaaccggtggaaggcaaacctactgacagagccagaggtgctggatgaacgtgagcttgacatctgcctgatgaaagttgcccatcgcaaagttgaaaagtacggttgcattcggtttgagggacttgtgtatcagggagactgtctcgtagagtatgagggggatgaggtgtctctgaggtacgatgagcgcaatattcttgcgcttttggcttacgaacgacctcagcgcgatcgaccaggcaagttcattggtgaagttcgtgcaagagacgcaaaagaggagcaactttccctggaagaattgaggtggctcaagcgaaaactgaaagaacgcgggaaggaagtggacaacaattccatctgggctgaacgactaggcttgtatcagttcattgatgagaagcgaaaatccaagcgacaacgccgcaagaaggcgcagcagcggcgcagtcaaaagacaaataaatcgcaagtagtcgagttatttcctcaaaatgctgttcctgagaaccagcctgaagttcaggagtcagagactaaagaaagtacactccccactactgaccaacctcagcctgatattgtaaagtctaaagacacaccagcaagtcaaccgatcgcatccaatgtcgttgcgtacgattggaaccagcttttagaggacaactggtag

SEQ ID NO: 417 - DNA, 951 bp, unidentified
  source 1..951: mol_type = genomic DNA
atggcgacatctaacgcagttccacaaccactagatgatgattcgcaatcagtaactgcacctcagccagatgcggcacctcagccagcaccgctccgcccgcttgctgaaccggaacgatcgcctgaagttcaggcagaagtcgagcgcattcgtagcagcgaagcatacaaggacatttctcgtgattcagccctgtttttctggctcagtcttcagcgagattctcgatcgaacggctacgtctttggggctaattttgcagatttaaggaaagcttgccagttctacaggatgcaatacgtccagcgacgggggactctctacaagattccgatgcctgttacctatgtggatgttgaacagtatggttctcctattgatctactcgttgctattcttgaatcgcttggtagcccctttgcaaaaatcggtttgctcagagatatgagatcgcgcacttttggtacgctcaactcttttggggtcaagcttcttataattggctatgcagaatgcttatcctacgaagcttataacgagcttctcaggttgacccggcagttaaaaatttcggtaattcttgcaggttcaatggaactaagggagatcttgggcaattttgtaaaccgtcgaagtaagcgttatggagagatttacaacaattttctggactttcacgaatacagagcttttgagaaaagtgatattgaaacgttgctcgaaagctgggagaaccaggtgttgagttcttgggatcagaaattagctctgaaagatattcctgatgttccggcttttctttatcaacgctgtgaagggcatgctgaaactctgtacgaaattctccgcaaaatagcaattttcaagctagataatccttctcatcaactgagcaaagctgatattgagaatatggtgtcgcgaaggacgataccaaaacgctcctaa

SEQ ID NO: 418 - DNA, 510 bp, unidentified
  source 1..510: mol_type = genomic DNA
atggacaacgaagcgtttgatctgccgcgctggtgccctgaaccctatgaaggagagagcattgccagttatctcgtgcggtttcgctctcaggaagtcgcccaaatttctacgcccagcagcttcagcaaggcgatcggcttggggattgcacttacacggtgggagaagtttcgcttcaatccttttcccagtgaggaggagatacagaagttttgtggtgtggtgggtttagagttagagcggtttaaggcgatgctgccaccggaaggggagcgaatgaagttggaaccgattcggttgtgtgcggcttgctatgcagaagccccttatcatcggttgaagtggcagtttcagtcaacggagggctgtagtaagcataagctacgtcttctctctaaatgccctggttgtgaaagaccttttacgattcctggtttggctgtggaagggaaatgtccgtgtgggatgttttataagaggatggcaaagagtcaaaagccttattag

SEQ ID NO: 419 - DNA, 1755 bp, Nostoc punctiforme
  source 1..1755: mol_type = genomic DNA
atgaacagtcagcaaaatcctgatttagctgttcatccctcggcaattcctatagaaggcttactaggagaaagcgatataactcttgagaagaatgtaattgccacacaactctcagaggaagcccaactcaagctagaggtaatccaaagtttactagaaccctgcgatcgcacaacctatggacaaaagttgcgggaagcagcagagaaactaggtgtatcgttacgaacggtacaaaggttggtgaaaaactgggaacacgatggcttagtcggactcactcaaacaggtagggctgataaaggaaaacatcgcattggtgagttttgggaaaaattcattaccaaaacctacaacgagggtaacaagggtagtaaacgtatgacccctaaacaagttgctctcagagtcgaggctaaagcccgtgagttaaaggactctaagccacccaattacaaaaccgtgttacgggtattagcgcccatattagaaaagcaagaaaaagccaagagtattcgtagccctggatggagaggaactacgctttcagttaaaacccgtgaagggaaagatttatcagttgattacagtaaccatgtttggcaatgtgaccatacccgcgtagatgtgttgctcgtggatcaacatggtgaattactaagtcgtccctggctaacaacagtaattgatacttactctcgttgcattatgggtatcaacttgggctttgatgcacctagttctggggtagtagcattagcgttacgccatgcaattctacccaaacagtacggtttcgagtacaaactgcattgtgagtggggaacctatggtaagccagaacatttttatactgatggcggtaaagactttcgctctaaccacttgagtcagattggagcgcaattaggatttgtctgccatttacgcgatcgcccttctgaaggtggagtagtagaacgtcctttcaaaacattgaatgaccaactattttcaacgcttcctgggtacaccggatctaatgtgcaggaacgcccaaaagatgcggaaaaagacgcaaggctcactctaagggaactagaacagctacttatacgctatatcgttgaccgttacaaccaaagtattgatgctcggatgggcgatcaaactcgctttgagcgttgggaagcaggattgcccacagtaccagtaccaataccagaacgagatttggatatctgtttaatgaagcagtcacggcgtactgtacaaagaggtggttgcttgcagttccagaatttgatgtatcgaggagaatatctggcaggttatgcaggggaaactgtcaacttaagatttgaccccagagacattacaacaattttggtttatcgccaggaaaacaatcaggaagtatttctcacccgcgctcacgctcaaggtttggagacagagcaactggcattagatgaggctgaggcagcaagtcgcagactccgtaacgcaggcaaaactatcagtaaccaatcattattgcaagaagttgttgaccgcgatgctcttgtcgcaaccaagaaaagccgtaaggagcgtcaaaaattggaacaggcggttttgcgatctgctggggttgacgaaagtaaaactgaatccttgtcttcccaagtagttgaaccagatgaagtggaatctacagaaacggttcactcccaatacgaagacatggaagtgtgggactatgaacaacttcgtgaagaatacgggttttaa

SEQ ID NO: 420 - DNA, 831 bp, Nostoc punctiforme
  source 1..831: mol_type = genomic DNA
atgacagaagctcaagcgatcgccaagcagttgggtggggtaaaaccagatgatgagtggttgcaagctgaaattgctcgtctcaagggtaagagtattgtgcctttacagcaggtaaaaactctccatgattggttggatggcaagcgtaaagcacggcaatcttgtcgagtcgttggggaatcacggactggcaagacggttgcctgtgatgcctataggtacaggcaaaagccacagcaagaagttgggcgacccccgattgtgcctgtagtttatattcagcctccgcaaaaatgcggctctaaggatttattcaaggagatgattgagtatcttaagtttcgagcaacaaagggaactgtttctgattttcgtgggagggcgatggaggtactcaaggggtgtggggtagaaatgctgattattgatgaagctgatcgcctcaaacctgagacgtttgctgaggtgcgagatatttatgacaagttaggaattgctgtggtattggtgggaacagaccgcttggaggcagtaatcaagcgagatgaacaagtctataaccgctttcgggcttgtcatcgcttcggcaagttatcggggaaagattttcaagatactgtgcaagcctgggaagatagagttttgaaactgcctgtttcttctaatttaactagcaaggatatgctgcggattctcacatcagcaactgaaggttacattggccgcctggatgagattctcagggaaacagcgattcgttctttatctaagggatttaagaagattgataaggctgttttacaggaagtggcgaaagagtacaagtga

SEQ ID NO: 421 - DNA, 501 bp, Nostoc punctiforme
  source 1..501: mol_type = genomic DNA
atgacaacaccagatgttaagccttggctttttattatagaaccctatccaggggaaagcctaagtcattttctaggtcggtttagacgtgctaaccatttatctcctgctgggttgggtggtttagctgggattggtgctgtagtggcacggtgggaaagatttcattttaaccctcgccctagtcaaaaagagttggaagcgatcgcatctgtagtagaagtggatgcccaaaggttagcccagatgttaccacctgctggagtgggaatgcagcatgagccaattcgcttgtgtggggcttgttatgctgaagcgccttgtcacagaattgagtggcagtataagtcggtgtggaagtgcgatcgccatcaactcaaaattttagcgaagtgtccaaattgtcaagcaccttttaaaatgcctgccctgtgggaagatgggtgttgtcatagatgtaggactctgtttgcggaaatggcaaagcaacagaagagttaa

SEQ ID NO: 422 - DNA, 1866 bp, Scytonema hofmannii
  source 1..1866: mol_type = genomic DNA
atgttagacgaagaatttgagttcactgaggaattgacgcaagctccagatgttattgtgcttgacaagagtcattttgtggtagacccatcccaaattattctgcaaacatcggataagcataaactgagatttaatcttatcaagtggttcgctgaatcccccaacattactattaaatctcagagaaaacaggcagtcgtagatacccttggtgtttctactcggcaggtggagcgtctcctcaagcaatatcataatggtgagttatcagagacagcgggagtacaacgctcagataaggggaaacttcgcatcagccaatattgggaagattatattaaaacaacttatgaaaaaagtctgaaagataaacatccaatgttgccagcagctgtcgtgcgggaagtgaagcgacacgcgatcgttgacctcggactgaaaccaggagattatccccatccagccaccatctatagaaatttagctcctttaatcgagcaacacacgcggaagaaaaaagttagaaatccgggttcgggatcttggctgaccgttgtcacgcgagatggtcagctactgaaggctgactttagtaaccaaattatccaatgcgaccataccgagctggatattcatatagttgatagtcatggcagtttattgtctgaccgtccttggctaactactgttgtcgatacttattcaagttgcattcttggttttcatttatggatcaaacaaccaggttctacggaggtagctcttgccttaagacacgccattctacccaaaaattatcctgaggactacaaacttggcaaagtttgggaaatatatggacctccttttcaatatttttttactgatggtggaaaagattttaattcaaagcatctaaaagccattggtaagaaattaggatttcagtgcgaactacgcaatcgcccgccccaaggtggaattgtagaacgtctttttaaaaccattaatactcaagttcttaaagagcttcccggttacacgggggcaaacgttcaagaacgcccgaaaaatgcagagaaagaagcctgtttaacaatacaggatttggataaaattctagctagcttcttttgtgatatttataaccacgaaccctatcccaaggagcctcgcaacacgagatttgaacgctggtttaaaggtatggggggaaaattacccgaacctttggacgagcgagaattggatatttgtttgatgaaagaagcacaacgagttgttcaagctcatggtagcatacagtttgaaaacctaatttatcgaggagaagctcttaaggcatatagaggtgaatacgtcaccctaagatacgatcccgaccatgtcctgactttatatgtctatagttgcgaagctgatgataatgcagaagagttcttgggctatgctcacgctataaacatggatactcatgacttgagtatagaagaattgaaaactctcaataaagaacgaagtaaagctcgtagcgatcattacaactatgatgctttattagcattgggtaaacgcaaagaacttgtagaagaaagaaaacaagacaagaaagcaaaaaggcaatcagagcaaaaacgtctccgcactgcttccaagaaaaactcaaatgttattgaactacgcaaaagtagagcttcgagttcttcaagtaaagatgaccgacaggaaattttaccagagagagtttctagggacgaactaaagccggagaagacagaactgaaatatgaggaaaatctgttagcacagaccgatactcaaaaacaggagagacataagttagttgtctctgaccgtaaaaaaaatttaaagaatatttggtga

SEQ ID NO: 423 - DNA, 855 bp, Scytonema hofmannii
  source 1..855: mol_type = genomic DNA
atggcgatatctcaactggcaacccaaccatttgtcgaagtcttacctccagagttagatagcaaagctcaaattgctaaaactattgatattgaggagcttttcagaattaattttatcacaaccgatcggtcttcagaatgtttcagatggttagatgagctgcgtatcctgaaacaatgcggtcggatcattggaccaagaaatgtaggcaaaagccgagcagtgcttcactatcgtaatgaggataaaaaacgagtttcttatgtaaaggcttggtcggcatcgagttctaaacgtctattttcacaaatcttaaaggatattaaccatgctgcatcaacaggtaaacgacaggatttacgtccaagattagctggtagtcttgaactatttggattagaattggtcattgttgataatgctgaaaatcttcaaaaagaggcgctcttagatttaaagcaactttttgaagaatgccatgttcctattgtcttagttggaggtaaggagttagatgatattttagaagattttgatttgttgactaactttccaacgttatatgagtttgaacgattggaacatgatgattttataaaaacattaaagacaattgaattggatattttatctcttccagaagcgtctaagttaagtgagggtaacatatttgcaattttagctgagagtacaggtgggaaaataggaattttagtcaagatactaactaaagcagttttacattctcttaaaaagggatttggtaaagttgatgaaagcattttagaaaaaatcgcaagtcgttatggaacaaaatacgttcccattgaaaacaaaaatagaaatgattga

SEQ ID NO: 424 - DNA, 516 bp, Scytonema hofmannii
  source 1..516: mol_type = genomic DNA
atgattgaagatgatgaaattcgtctaaggttgggctatgttgaaccacacccaggtgaaagcatcagtcattatttgggacggcttcgtcgatttaaggctaacagccttccttcaggatatgctctaggaaaaattgcgggtcttgggtctgttctgactcgatgggaaaagttgtacttcaacccatttcccactcaacaagaactagaggcattagcacaagtgattcaagtggaggttgagaaattaagagagatgctacccactaaaggtgtcacaatgatgcctcgacccattcgattatgtgcggcttgctatgcagagtcaccttatcaccggatcgagtggcagtttaaggacaaaatgaagtgcgatcgccatcagttgcgcttattaacaaaatgcacaaactgtcagacaccattccccattcctgctgattgggaaaaaggagaatgctcgcattgttttttgtcttttgctaagatggtgaagtgtcaaaagcgtcgttag

SEQ ID NO: 425 - protein, 560 aa, Anabaena variabilis
MLDDPDKGNQEPETHEIVTELSLDEQHLLEMIQKLIEPCDRITYGERQREVAGKLGKSVRTVRRLVKKWEQEGLTALQTATRTDKGTHRIDSDWQDFIIKTYKENNKDGKRMSPKQVALRVQTKAEELGQQKYPSYRTVYRVLQPIIEQKEQKEGIRHRGWHGSRLSVKTRDGKDLFVEHSNHVWQCDHTRVDLLLVDQHGELLSRPWLTIVVDTYSRCIMGINLGFDAPSSQVIALALRHAILPKRYGSEYGLHEEWGTYGKPEHFYTDGGKDFRSNHLQQIGVQLGFVCHLRDRPSEGGIVERPFGTFNTDLFSTLPGYTGSNVQERPEQAEKEACITLRELERLLVRYIVDKYNQSIDARLGDQTRYQRWEAGLIVAPNLISEEELRICLMKQTRRSIYRGGYVQFENLTYRGENLAGYAGENVVLRYDPKDITTLLVYRQKGNQEEFLARAYAQDLETEELSVDEAKAMSRRIRQAGKAISNRSILAEVRDRETFVNQKKTKKERQKAEQTIVQKAKKPVPVEPEEEIEVASVDSEPEYQMPEVFDYEQMREDYGW

SEQ ID NO: 426 - protein, 278 aa, Anabaena variabilis
MTSKQAQAVAQQLGDIPVNDEKIQAEIQRLNRKSFIPLEQVQMLHDWLDGKRQSRQSGRVVGESRTGKTMGCDAYRLRHKPKQEPGRPPTVPVAYIQIPQECGAKELFGVLLEHLKYQMTKGTVAEIRDRTLRVLKGCGVEMLIIDEADRLKPKTFAEVPDIFDKLEIAVILVGTDRLDAVIKRDEQVYNRFRACHRFGKFSGDEFKKIVDIWEKKVLQLPVASNLSSKTMLKTLGETTGGYIGLLDMILRESAIRALKKGLRKVDLATLKEVTEEYK

SEQ ID NO: 427 - protein, 167 aa, Anabaena variabilis
MEVPQIQPWLFQIEPLEGESLSHFLGRFRRANDLTPTGLGKAAGLGGAIARWEKFRFNPPPSRQQLEALANVVGVDADRLAQMLPSAGVGMKMEPIRLCAACYAESPCHKIEWQFKVTRGCARHKITLLSECPNCKARFKVPALWVDGWCNRCFLRFEEMAKYQKGL

SEQ ID NO: 428 - protein, 554 aa, Cyanobacterium aponinum
MTIDNQFSDSPELISQLSPEDQKIADVIENLLQPCDKKTYGKKLKQASDQLKKSVRTIQRYVKQWEENGLVGILQNNRADKGSYRIDPRLQDFILKTYREGNKGSKRMTPKQVYLRAVVQAENWGIKPPSHMTIYRILNPIIAEKENKKRIRSSGWRGSQLVLSTRSGTEIDVQYSNHVWQCDHTRADILLVDQFGELLGRPWITIVVDTYSRCIMGINLGFDAPSSQVVTLALRHAILPKSYSSDYELHEEWGTYGKPEYFYTDGGKDFRSNHLQQISLQLGFTCHLRSRPSEGGVVERLFKTLNTEVFSTLPGYTGANVQERPEDAEKEACLTLKELEILIVRYIVDNYNQRIDARMGEQTRFQRWESGLLSTPHIIPERELDICLMKQSRRKVQKGGHLQFENLIYKGQYLAGYEGETVILRYDPRDITGILIYRVENNKEIFLTRAYATDLEGDCLSLTDAKSSVKRIREKSKNVHNKSILMEIQQRHLFSEKKTKKQIQQEEQKQIKPNTSLSIFKPETEMDTQVESSQELSEEDLDIEMIDYGNLQQY

SEQ ID NO: 429 - protein, 277 aa, Cyanobacterium aponinum
MEAKEIAQQLGEVEQPNQSLQNELDRLSKKQFLFLDQVKIYHQWLNERLFMKHCCRVVGDSHTGKTSSSQAYCLRYKSTQESGKNPIFPVLYVSVPENATSKVFFETSIKSFGYRISKGTISDLRERMLTLLSRCQVKMMIIDEADRCKPETLSYIRDIFDHLNICIVLVGTDRLNTVLKRDEQVYNRFLPCYRYGLLDKESLIKTIKIWEIKILKLPVASNLSQGKKFNIIYSTSKGCLGTMDKLLRTSASMALIRGLSKIELNILEEAAHLFKDK

SEQ ID NO: 430 - protein, 163 aa, Cyanobacterium aponinum
MITNSFDSWILMLDPYQGESISHFLGRFRRENSLTVNNLGKATELYGAIARWEKFRFNPPPSSEQLKKLSAIVQVEVATLQTMFPSAPMKMTPIRLCSACYGEKPYHKMEWQYKEIYKCDRHQLKLLSECPNCGARFKFPSLWVDGWCHRCFTPFAEMKQQKD

SEQ ID NO: 431 - protein, 635 aa, unidentified
MSTDATSATCSPSQDSGLEQGQQGQPPMLLNEVSPEVQQKIDLIDAIFQTPDKKARREAILHAAKTLGKTTRTIRLMMEKVKNDGVATLAVGRKDEGQFRISEQWSNFIKVIYEWGQRDGSRININGVYTHLVALASQGEALRDKKYADRFKGYPQVLEDLVAGKHPSHVTVYKVVNFYLERKNKKVRHPGSPAEGQVIQTTEGIIELTHSNQVWQCDHTKLDILLVDGDGEVILQWDDQKQEIVGRPYLTLIMDSYSGCVAGFHLGFEAAGSHEVGLALRHAMLPKQYGSEYKLKAEWNVFGVPEYWLTDRAKEFKSNHLKQVSMQVGFKRRLRAFPSAGGLIESIFDKINKEVLSHFGGYTGSNITKRPKEAEKHACLTLDELEKRLVIYFVDHYNGHDYPKVANQKRSNRWKANLLTEPEVLDERELDICLMKVAHRKVEKYGCIRFEGLVYQGDCLVEYEGDEVSLRYDERNILALLAYERPQRDRPGKFIGEVRARDAKEEQLSLEELRWLKRKLKERGKEVDNNSIWAERLGLYQFIDEKRKSKRQRRKKAQQRRSQKTNKSQVVELFPQNAVPENQPEVQESETKESTLPTTDQPQPDIVKSKDTPASQPIASNVVAYDWNQLLEDNW

SEQ ID NO: 432 - protein, 316 aa, unidentified
MATSNAVPQPLDDDSQSVTAPQPDAAPQPAPLRPLAEPERSPEVQAEVERIRSSEAYKDISRDSALFFWLSLQRDSRSNGYVFGANFADLRKACQFYRMQYVQRRGTLYKIPMPVTYVDVEQYGSPIDLLVAILESLGSPFAKIGLLRDMRSRTFGTLNSFGVKLLIIGYAECLSYEAYNELLRLTRQLKISVILAGSMELREILGNFVNRRSKRYGEIYNNFLDFHEYRAFEKSDIETLLESWENQVLSSWDQKLALKDIPDVPAFLYQRCEGHAETLYEILRKIAIFKLDNPSHQLSKADIENMVSRRTIPKRS

SEQ ID NO: 433 - protein, 169 aa, unidentified
MDNEAFDLPRWCPEPYEGESIASYLVRFRSQEVAQISTPSSFSKAIGLGIALTRWEKFRFNPFPSEEEIQKFCGVVGLELERFKAMLPPEGERMKLEPIRLCAACYAEAPYHRLKWQFQSTEGCSKHKLRLLSKCPGCERPFTIPGLAVEGKCPCGMFYKRMAKSQKPY

SEQ ID NO: 434 - protein, 584 aa, Nostoc punctiforme
MNSQQNPDLAVHPSAIPIEGLLGESDITLEKNVIATQLSEEAQLKLEVIQSLLEPCDRTTYGQKLREAAEKLGVSLRTVQRLVKNWEHDGLVGLTQTGRADKGKHRIGEFWEKFITKTYNEGNKGSKRMTPKQVALRVEAKARELKDSKPPNYKTVLRVLAPILEKQEKAKSIRSPGWRGTTLSVKTREGKDLSVDYSNHVWQCDHTRVDVLLVDQHGELLSRPWLTTVIDTYSRCIMGINLGFDAPSSGVVALALRHAILPKQYGFEYKLHCEWGTYGKPEHFYTDGGKDFRSNHLSQIGAQLGFVCHLRDRPSEGGVVERPFKTLNDQLFSTLPGYTGSNVQERPKDAEKDARLTLRELEQLLIRYIVDRYNQSIDARMGDQTRFERWEAGLPTVPVPIPERDLDICLMKQSRRTVQRGGCLQFQNLMYRGEYLAGYAGETVNLRFDPRDITTILVYRQENNQEVFLTRAHAQGLETEQLALDEAEAASRRLRNAGKTISNQSLLQEVVDRDALVATKKSRKERQKLEQAVLRSAGVDESKTESLSSQVVEPDEVESTETVHSQYEDMEVWDYEQLREEYGF

SEQ ID NO: 435 - protein, 276 aa, Nostoc punctiforme
MTEAQAIAKQLGGVKPDDEWLQAEIARLKGKSIVPLQQVKTLHDWLDGKRKARQSCRVVGESRTGKTVACDAYRYRQKPQQEVGRPPIVPVVYIQPPQKCGSKDLFKEMIEYLKFRATKGTVSDFRGRAMEVLKGCGVEMLIIDEADRLKPETFAEVRDIYDKLGIAVVLVGTDRLEAVIKRDEQVYNRFRACHRFGKLSGKDFQDTVQAWEDRVLKLPVSSNLTSKDMLRILTSATEGYIGRLDEILRETAIRSLSKGFKKIDKAVLQEVAKEYK

SEQ ID NO: 436 - protein, 166 aa, Nostoc punctiforme
MTTPDVKPWLFIIEPYPGESLSHFLGRFRRANHLSPAGLGGLAGIGAVVARWERFHFNPRPSQKELEAIASVVEVDAQRLAQMLPPAGVGMQHEPIRLCGACYAEAPCHRIEWQYKSVWKCDRHQLKILAKCPNCQAPFKMPALWEDGCCHRCRTLFAEMAKQQKS

SEQ ID NO: 437 - protein, 621 aa, Scytonema hofmannii
MLDEEFEFTEELTQAPDVIVLDKSHFVVDPSQIILQTSDKHKLRFNLIKWFAESPNITIKSQRKQAVVDTLGVSTRQVERLLKQYHNGELSETAGVQRSDKGKLRISQYWEDYIKTTYEKSLKDKHPMLPAAVVREVKRHAIVDLGLKPGDYPHPATIYRNLAPLIEQHTRKKKVRNPGSGSWLTVVTRDGQLLKADFSNQIIQCDHTELDIHIVDSHGSLLSDRPWLTTVVDTYSSCILGFHLWIKQPGSTEVALALRHAILPKNYPEDYKLGKVWEIYGPPFQYFFTDGGKDFNSKHLKAIGKKLGFQCELRNRPPQGGIVERLFKTINTQVLKELPGYTGANVQERPKNAEKEACLTIQDLDKILASFFCDIYNHEPYPKEPRNTRFERWFKGMGGKLPEPLDERELDICLMKEAQRVVQAHGSIQFENLIYRGEALKAYRGEYVTLRYDPDHVLTLYVYSCEADDNAEEFLGYAHAINMDTHDLSIEELKTLNKERSKARSDHYNYDALLALGKRKELVEERKQDKKAKRQSEQKRLRTASKKNSNVIELRKSRASSSSSKDDRQEILPERVSRDELKPEKTELKYEENLLAQTDTQKQERHKLVVSDRKKNLKNIW

SEQ ID NO: 438 - protein, 284 aa, Scytonema hofmannii
MAISQLATQPFVEVLPPELDSKAQIAKTIDIEELFRINFITTDRSSECFRWLDELRILKQCGRIIGPRNVGKSRAVLHYRNEDKKRVSYVKAWSASSSKRLFSQILKDINHAASTGKRQDLRPRLAGSLELFGLELVIVDNAENLQKEALLDLKQLFEECHVPIVLVGGKELDDILEDFDLLTNFPTLYEFERLEHDDFIKTLKTIELDILSLPEASKLSEGNIFAILAESTGGKIGILVKILTKAVLHSLKKGFGKVDESILEKIASRYGTKYVPIENKNRND

SEQ ID NO: 439 - protein, 171 aa, Scytonema hofmannii
MIEDDEIRLRLGYVEPHPGESISHYLGRLRRFKANSLPSGYALGKIAGLGSVLTRWEKLYFNPFPTQQELEALAQVIQVEVEKLREMLPTKGVTMMPRPIRLCAACYAESPYHRIEWQFKDKMKCDRHQLRLLTKCTNCQTPFPIPADWEKGECSHCFLSFAKMVKCQKRR

SEQ ID NO: 440 - DNA, 1929 bp, Anabaena variabilis
  source 1..1929: mol_type = genomic DNA
atgagccaaatcactattcagtgtcgtcttgtagcttctgagccatcacgtcatcaactatggaagttgatggtagatttaaatacgccactgattaatgaattattggttcaggtagcccaacaccctgaatttgaaacttggcgacaaaagggcaaacacccagccaaaattgtcaaagaattatgcgagcctttgagaactgatcctcgcttcatcggtcaacctggacgtttttacacaagtgcgatcgccacagtaaattacatctacaaatcttggtttgcattgatgaagcgatcgcaatcccaactagaaggtaaaatgcgctggtgggaaatgcttaaaagcgatgccgaattagtagaagttagtggagttactttagagagtcttcgtactaaagctgctgaaatactgtctcaatttgctccccagccagatacagttgaagcacaaccagcgaaaggaaagaaacgtaagaaaaccaaaaaatcagatggcgattgcgcggagcgcacgctacgcgaacgtagtatttctgattatttgtttgaagcttaccgcgacacagaagaaatattgacacgttgtgcaattaactatttactgaaaaatggttgcaaaatcagcaataaagaggaaaatgctgaaaaattcgctaaacgccgccgcaaactggagattcaaattgaacgcctaagagaaaaactagaggcacgaatccccaaaggtcgagacttaacggatgccaaatggttagaaactcttttgctggccactcttaatgttcctgaaaatgaagcggaggcgaaatcttggcaagacagtctgctaaaaaaatctatcacagtacctttcccagtcgcttatgaaaccaacgaagacatgacttggtttaaaaacgaaaggggacgtatctgtgtaaaatttagcggactgagtgagcatacttttcaagtctattgcgattctcgccaactccaatggtttcaacgttttttagaagaccagcaaatcaaacggaacagtaaaaaccaacactctagcagcctattcactctccgtagtggacgtattgcatggcaagagggggaaggtaaaagtgaaccttggaaagttaaccgcttaatcctttactgttctgtagatactcgcctgtggacggctgaaggaacaaacctagtccgagaagaaaaagcagaagaaattgctaaagctatcgcccaaacaaaagccaaaggcaaactcaacgataaacaacaagctcatataaaacggaaaaactcttctctagccagaattaataacctctttccccgccccagcaagcccttatataaaggtcaatctcatattcttgttggtgttagccttggtttagagaaacctacaacactagcagtggttgatggctctataggtaaagtgcttacttaccgcaatattaaacaactactaggcgataattacagacttttaaatagacaacgacaacaaaaacacaccttatcccatcaacgccaagtagctcaaatcctggcttcaccgaatcaacttggggaatcagagttgggacagtatgtagacagattactagctaaagaaattgtagcgatcacccaaacatataaagctggctctattgtcctgcctaaattgggcgatatgcgagaacaggtgcaaagtgagattcaagctaaagccgaacagaaatcagacttaatagaagttcaacaaaaatattccaaacagtaccgagttagcgtccatcagtggagctatggtcgattgattgcaagtattcgctcgtcagcagctaaagttggaattgtgattgaggaatcgaaacaaccgattcgaggtagtccacaggagaaagcgagagaattagcgatcgctgcttataattctcgccgaagaacctga

SEQ ID NO: 441 - DNA, 1872 bp, Cyanobacterium aponinum
  source 1..1872: mol_type = genomic DNA
atggttcaggtaactattcaatctcgtttaatcgcttctgctgatactcgtcaatctctctggttgttgatgagcaagaaaaatactcctttgatcaatgaaatccttacccgaattaaacatcatcccgattttcctcaatggcgagagaaaggaagactgccgaaaaactttattgctcaacaaattcaagagctaaaaaatgattctcgttttcaaggacaaccatctcggttttatgcttctgtcggtaaaatcatcgactacatatacaaatcttggttcaaagtgcaaaagagttacaaaatccaattagaaggtaatagccgttggttagaaatgttgaaacccgatagtttattaatagaatcctttgatggttcaatggaagcactgcaaaatcaggctcaacagattctcgataatattgaaacgacttctactcaagaaggtattgttgattatttatttcaaaaatatgagaaaatagaaaattgtcgaatgaaggatgcgatcgtttatctgatcaaaaatggtagtcgtattcctaagaacaatattgaaacaaccaagaaatataaaagaatcaaaagaaaattagaaatcaaaattcgtaaattgaaaagacaagtggaaatgtctattccttctggcagagatttagagggagaaaaatggttgcacactctcatccttgcttctaacacgatgccagtagatcaaagtgagagtgatagttggttttcagcactgaaacgaaattctccgtcaattccctatcctattgtttatgaaagcaatgaggatttaacatggtgtttgaataaccaaaaccgtatttgtattaaatttagtggtttgagtgaccatctttttcaaatctattgtgattctcgtcaactggcctattttcggcgtttttatgaggatcaggaattgaaaaaagccagtaaagatcagttttcgagtgctttatttactctgcgatcggctatgatcatttggaaagaagatgatggaaaaggagagtcgtgggataaacataaactctatttacattgtacttttgatacagattattggactgtggaaggtacacaagtcattgctcaaaaaaagcaggaggaagtgctaaatctcattgataggatgaaggaaaagacggatttaacagatactcaaaaggcatttattcaacggaaacaaacgactcttgcccgacttaataatatttttcctcgccctagtaagcctatttatcaaggtaatccgaatctttttctcggtgtagcaatgggtttacaagaaccagttacgatcgcacttgtggatgtcagcacaaataaagtgattctctatcgtaatatcaagcaattattgggagataattaccatctactcaggaggagaagaaatgagaaacagaaattgaatcaccaaaaccataaagcaaggaaaagagctaattttcaacaaaagggggaatctaatctgggtgaatacctcgatcgcctcattgccaaatccattcttcaaatcgctaaagagtaccaagtatcaactattatcgttcctcgattaaatcagatgcgatcgattacggaggcagaaatacaagcaagggcggaggagagaataccagaatataaggaggggcaacgaaaatatgcacaggattatcgtgtacaggtgcatcaatggagttatggcagattgattgacaatatcaaagcgatttcttctaaattgggtattgtcgtagaggaaggcaaacaacccaaacaaggaacatttaccgataaggcatcacagttagcattgagtacccagaaaaataatcgccaaaataatcccaaaaagacaaattcttaa

SEQ ID NO: 442 - DNA, 2268 bp, unidentified
  source 1..2268: mol_type = genomic DNA
atggttaaatatacgcttctggtcaaccgcctgctagaacaagttgggcagttgtctgagtttaagcagtggcaagaaaagggcagtatctcgaaagagcctgtcaagcagttatgtgatgcccttaagaaacaccatgcagagtttcaggggttgccacaccgcttctacatctcagccaaacttatggtgacttataccttcgagtcttggctagcgttacaacaacgacgacggcgcaaaattgatggcaaacgacgctggttaaaccgagttgaagatgatattgaacttgcaaaagtgacggactttagcccagaaatgattcagaatcgggctaggaaaatcctagcagagatacatccatctaaccctgttgaacctgaacctgagacatcttcagacaatgaaataaatgaaggagagaactgccaggaagaggaagagatgaatcaacccaaatctcttctttcctgcttgtttgatttgtacgacagtacggaagatgcgcttactctccgggcgatcgttcatttgctcaaaaataatggtgaagtgaatgaggaagacgaagatcctaaaaagcttgaactgcgtttagccgccaagcgcgaggaaattcagaggttagagaaacaactgcaaggacgtttaccaaaaggacgcgatccaacgggtgaaactaccactcgttttttagaagaggctattaagctacctgaacacccaaccgcctatccaccccggtttcttctcaacgccttttattgctacgccttactgccaatgccgtacatccagtacggagtctatctcctcaatgccattttggatgaagccaggatcgttgagtctgacttcatcacctggagagatacgatcgcagaacatctggtgaacgcggctaaacgacccaactccttgccctatccgcttatctttggcagtactagcgatctggtttgggaatcagaatcgaaaagaaaaggtcccaacgctcctgatacagagggagcattggagcaatcaggagccaaatcatcaagaaagcgtccatctaagcgaaagcggacaaggctcaaaacacaatcagatgagagaatcaccgtacgctttcatggcatgagccagtatcgcttcaaaatctactgcgatcgacgccagcttccgatatttcgccagtttctgactgactactgtacgcataaggcacttgacgaagagaataagttttccatgggcttgtttgccctccgttcagctagcttaatctggaaaaaagacaaacaacgtcctcacaaacgtaactcttcggagccagttgaaccgttgtcgccttggcaaactcatcgactttatttgcactgttccatcgattctcgcttgttaaccgctgaaggaacggaacaagttcgcttccagaagatcctccagactaaacggaaattagaaggggcaaagaataaagaacaagaaattctcagacaaaaatctgaacgtcaacataccgagtcggaacaagacttagacgataaactgaagaaacagcggcagaatgttgcacggaatcaaaccagtttaaattgcctgtataatcctacaccgccacgccctagtcgagttcgctatcaaggaaatcctaacattgctataggggtcagcttttgtcgtcaacaacttgttggagtgggagtaattgatctgcaaacgcaacaagtgcaggaatactacagtatccggagattactgatcaatcgtaaagttactcaagtaaaacgtggtcgcagcgttcttcagttaaagctaaaaaaatatcggttagtcaaccaattatgtatgtggaagaagaagaacattactcaacgaacccaacaacaaaagcaaggactgtgcattcaaaacaccactgaatctaatctaagacagtatctggaacgattagttgcagaccgaattgtggaagtggcactgaagcaccaagccggaagtattgtcacaccgcaactgggagagatccgcgagagtattgaaagtgccgttcaagcaatagccaagcaactcttcgagaatcaccgagaggcgcaacaggcgtacgcgaagcagtttcgcatggattttcatcggtggagttacggtcgattaaccgactgtattcatagccgtgctcgtcaggagggaattctagttcaagctggacgacaacctgtcgagggcaatcttgttggtaaagccctcacaattgccttatcagggcgaaatttggtctag

SEQ ID NO: 443 - DNA, 1920 bp, Nostoc punctiforme
  source 1..1920: mol_type = genomic DNA
atgagtcagattactatccagtgccgtcttattgccagtgaatcaacccgccaaaaactgtggaaattgatggcaactttaaacacacccttaattaatgaactaattgaacaacttggtaaacacccagacttcgagaattggcgacaacaaggtaagcttccaacaactgttgttagtcaactgtgccaacctctcaagactgaccctcgctttgtaggtcaacctagccgtttatatatgtcggcgattcatattgtggactacatctacaagtcttggctggctatacaaaaacgtctacagcaacagctagacggcaaaatgcgctggctagaaatgctcaacagtgatgttgaacttgtggaaactagcggttctagtatgggggctattcgtaccaaagcctctgaaattttggcaaaagctatgccaacatctgactcagatagctctcaacccaaaacaaaaaagggcaaggaggctaaaaaatcctcgtcatctagttctgaccgcagtttatccaataaattatttgaagcttaccaagagacagaagacatccttagccgcagcgccatcagctacttattgaaaaatggctgcaaacttagcgataaagaagaagattcagaaaaatttgctaaacgtcgtcgtcaagttgaaatccaaattcaaaggcttaccgaaaagttaataagtcggatgcctaaaggtcgagatttgaccaatcgtaaatggttagagacactcttcactgctacaaccacctttcctgaagataacgccgaagccaagcgctggcaggatattctattaactcgaccaagttctcttccattcccccttgtttttgaaacgaacgaggatatggtttggtcaaagaatcaaaaaggtaggctgtgtgttcacttcaatggattgagcgatcttagctttgaggtatactgcgacaatcgccaacttcactggtttcaacgtttcctagaagatcaacaaactaaacgccaaagtaaaagccagtattctagtggcttattcactctcagaaatggtcacctagtttggcaagaaggagagggtaagagcgaaccttggaaccttaaccgattgaacctctactgctgtgttgacaatcgcctatggactgctgacggaacagaacaggttcgccaagagaaagcagaagaaattagcaaactcatcacgaagatgaaagaaaaaagtgacctaaaggatacacagaaagcttttattcaacgtaaagaatcaacgcttaatcgaatgaataatagctttgagcgtcctagtcaacccctttaccaaggtcaatcacacattttggttggagtaagcctgggactagaaaaacctgccaccgtagctgtagtagatgcgatcgcaggtaaagttctagcttaccggagtatccgccagttacttggcgacaattacgaacttctgaatcggcaaagacgacaacagcgatcatcatcccacgaacgccacaaagcacaaaaaagcttctctcccaatcaatttggtacatctgagttagggcagtatgtagacagattattggctaaagaaattattgcgatcgcacaaacctataaagctggcaatatagttttgcctaagctaggggatatgcgagagattgttcaaagtgaaattcaagctatagccgaagcaaaatgtccaggctccgtagaagttcagcaaaaatacgccaaacaataccgagttaatgttcacaagtggagctatggcagattaatacagagtattcaaagtaaaggtagtcaggcaggaattgtgattgaagagggaaaacaacctgttagaggtagccctcatgaacaagcaaaggaattagcactttctgcttaccatgatcggctagctaggcgaagttga

SEQ ID NO: 444 - DNA, 1938 bp, Scytonema hofmannii
  source 1..1938: mol_type = genomic DNA
atgagcacaatcacgattcaatgccgcctagttgcagaagaagcgaccctgcgctacttttgggaacttatggctgagaagaatacgccactcattaatgaattgttggagcagttaggacaacatccagattttgatacttgggtacaagcaggcaagatgcctgaaaagacagttgagaacttgtgcaagtccctagaagatcgagaaccttttgcaaatcagcccggtcgttttcgtacttcggcagttgctctggtaaagtacatttacaaatcctggtttgcgttacaaaaacgacgggcggacagactagaaggtaaagagcgctggttaaagatgctcaaaagtgatgtggaactggaacgagaaagcaattgtagtttggatattattcgagctaaagctggggaaattcttgctaaagttactgaggggtgcgctccgagcaatcaaacatcctctaagagaaaaaagaagaagactaaaaaaagccaagcgacaaaagatctccctacgcttttcgagattatattaaaagcttacgaacaagctgaagaaagcctgacacgagctgcccttgcttatctccttaaaaatgactgtgaagtcagtgaagttgatgaagattcagagaaatttaaaaagcgacggcgaaaaaaggaaatagaaattgaacgtttaagaaatcaactgaaaagtcggatacctaaaggtcgcgatttaaccggagataagtggttgaaaacgctagaagaagccacccgaaatgttcctgaaaatgaggatgaggcaaaagcttggcaagcccaactcttaagagaagctagttctgttccttttcctgtagcttatgaaactagtgaagatatgacttggtttaccaacgagcaaggtcgaatctttgtttactttaatggttcagccaaacataaatttcaagtttattgcgatcgccgtcaacttcattggtttcaacgttttgtagaagactttcaaatcaagaaaaatggtgataaaaaaggtagcgaaaaggagtaccctgctgggttattgacgctttgttccactcgtctgagatggaaagaaagcgcggaaaaaggagatccttggaatgttcatcgcctaattctttcttgcactatcgatacacgcttatggacacttgaaggaacggaacaggtgcgagctgaaaagatcgctcaggttgaaaaaactattagcaagcgggagcaagaagttaatctgagtaagactcaacttgagcgtttacaagccaagcacagtgagagggagagattgaacaatatttttcccaaccgccctagcaagcccagttaccggggtaaatctcatattgcgatcggtgtaagcttcagtttggaaaacccagccactgttgccgtcgtagatgttgcaaccaagaaagtccttacttaccgcagtttcaaacaattactcggagataactacaaccttgcaaaccggctgcggcaacaaaagcaacgtctttctcacgaacgtcacaaagctcagaaacaaggcgcaccaaattcatttggagactcagagttagggcagtatgtagacagattgctagcaaaatcgattgtcgcgatcgcaaaaacttatcaagctagtagtattgtcttgcctaaacttcgctatatgagggaaatcatacataatgaagttcaagctaaagccgaaaaaaagattccaggatataaagaaggtcaaaaacaatatgccaaacagtatcggataagcgttcatcaatggagttataatagattatcacagattcttgaaagccaagctacaaaagctggaatttcaattgaacgtggatcgcaagtaatccaaggtagctcccaagaacaagcacgagatttagctttatttgcctataacgaacgccaacttagtctgggttag

SEQ ID NO: 445 - protein, 642 aa, Anabaena variabilis
MSQITIQCRLVASEPSRHQLWKLMVDLNTPLINELLVQVAQHPEFETWRQKGKHPAKIVKELCEPLRTDPRFIGQPGRFYTSAIATVNYIYKSWFALMKRSQSQLEGKMRWWEMLKSDAELVEVSGVTLESLRTKAAEILSQFAPQPDTVEAQPAKGKKRKKTKKSDGDCAERTLRERSISDYLFEAYRDTEEILTRCAINYLLKNGCKISNKEENAEKFAKRRRKLEIQIERLREKLEARIPKGRDLTDAKWLETLLLATLNVPENEAEAKSWQDSLLKKSITVPFPVAYETNEDMTWFKNERGRICVKFSGLSEHTFQVYCDSRQLQWFQRFLEDQQIKRNSKNQHSSSLFTLRSGRIAWQEGEGKSEPWKVNRLILYCSVDTRLWTAEGTNLVREEKAEEIAKAIAQTKAKGKLNDKQQAHIKRKNSSLARINNLFPRPSKPLYKGQSHILVGVSLGLEKPTTLAVVDGSIGKVLTYRNIKQLLGDNYRLLNRQRQQKHTLSHQRQVAQILASPNQLGESELGQYVDRLLAKEIVAITQTYKAGSIVLPKLGDMREQVQSEIQAKAEQKSDLIEVQQKYSKQYRVSVHQWSYGRLIASIRSSAAKVGIVIEESKQPIRGSPQEKARELAIAAYNSRRRT

SEQ ID NO: 446 - protein, 623 aa, Cyanobacterium aponinum
MVQVTIQSRLIASADTRQSLWLLMSKKNTPLINEILTRIKHHPDFPQWREKGRLPKNFIAQQIQELKNDSRFQGQPSRFYASVGKIIDYIYKSWFKVQKSYKIQLEGNSRWLEMLKPDSLLIESFDGSMEALQNQAQQILDNIETTSTQEGIVDYLFQKYEKIENCRMKDAIVYLIKNGSRIPKNNIETTKKYKRIKRKLEIKIRKLKRQVEMSIPSGRDLEGEKWLHTLILASNTMPVDQSESDSWFSALKRNSPSIPYPIVYESNEDLTWCLNNQNRICIKFSGLSDHLFQIYCDSRQLAYFRRFYEDQELKKASKDQFSSALFTLRSAMIIWKEDDGKGESWDKHKLYLHCTFDTDYWTVEGTQVIAQKKQEEVLNLIDRMKEKTDLTDTQKAFIQRKQTTLARLNNIFPRPSKPIYQGNPNLFLGVAMGLQEPVTIALVDVSTNKVILYRNIKQLLGDNYHLLRRRRNEKQKLNHQNHKARKRANFQQKGESNLGEYLDRLIAKSILQIAKEYQVSTIIVPRLNQMRSITEAEIQARAEERIPEYKEGQRKYAQDYRVQVHQWSYGRLIDNIKAISSKLGIVVEEGKQPKQGTFTDKASQLALSTQKNNRQNNPKKTNS

SEQ ID NO: 447 - protein, 778 aa, unidentified
MQLRVICCCLSADEATRQFFWEAMVKYTLLVNRLLEQVGQLSEFKQWQEKGSISKEPVKQLCDALKKHHAEFQGLPHRFYISAKLMVTYTFESWLALQQRRRRKIDGKRRWLNRVEDDIELAKVTDFSPEMIQNRARKILAEIHPSNPVEPEPETSSDNEINEGENCQEEEEMNQPKSLLSCLFDLYDSTEDALTLRAIVHLLKNNGEVNEEDEDPKKLELRLAAKREEIQRLEKQLQGRLPKGRDPTGETTTRFLEEAIKLPEHPTAYPPRFLLNAFYCYALLPMPYIQYGVYLLNAILDEARIVESDFITWRDTIAEHLVNAAKRPNSLPYPLIFGSTSDLVWESESKRKGPNAPDTEGALEQSGAKSSRKRPSKRKRTRLKTQSDERITVRFHGMSQYRFKIYCDRRQLPIFRQFLTDYCTHKALDEENKFSMGLFALRSASLIWKKDKQRPHKRNSSEPVEPLSPWQTHRLYLHCSIDSRLLTAEGTEQVRFQKILQTKRKLEGAKNKEQEILRQKSERQHTESEQDLDDKLKKQRQNVARNQTSLNCLYNPTPPRPSRVRYQGNPNIAIGVSFCRQQLVGVGVIDLQTQQVQEYYSIRRLLINRKVTQVKRGRSVLQLKLKKYRLVNQLCMWKKKNITQRTQQQKQGLCIQNTTESNLRQYLERLVADRIVEVALKHQAGSIVTPQLGEIRESIESAVQAIAKQLFENHREAQQAYAKQFRMDFHRWSYGRLTDCIHSRARQEGILVQAGRQPVEGNLVGKALTIALSGRNLV

SEQ ID NO: 448 - protein, 639 aa, Nostoc punctiforme
MSQITIQCRLIASESTRQKLWKLMATLNTPLINELIEQLGKHPDFENWRQQGKLPTTVVSQLCQPLKTDPRFVGQPSRLYMSAIHIVDYIYKSWLAIQKRLQQQLDGKMRWLEMLNSDVELVETSGSSMGAIRTKASEILAKAMPTSDSDSSQPKTKKGKEAKKSSSSSSDRSLSNKLFEAYQETEDILSRSAISYLLKNGCKLSDKEEDSEKFAKRRRQVEIQIQRLTEKLISRMPKGRDLTNRKWLETLFTATTTFPEDNAEAKRWQDILLTRPSSLPFPLVFETNEDMVWSKNQKGRLCVHFNGLSDLSFEVYCDNRQLHWFQRFLEDQQTKRQSKSQYSSGLFTLRNGHLVWQEGEGKSEPWNLNRLNLYCCVDNRLWTADGTEQVRQEKAEEISKLITKMKEKSDLKDTQKAFIQRKESTLNRMNNSFERPSQPLYQGQSHILVGVSLGLEKPATVAVVDAIAGKVLAYRSIRQLLGDNYELLNRQRRQQRSSSHERHKAQKSFSPNQFGTSELGQYVDRLLAKEIIAIAQTYKAGNIVLPKLGDMREIVQSEIQAIAEAKCPGSVEVQQKYAKQYRVNVHKWSYGRLIQSIQSKGSQAGIVIEEGKQPVRGSPHEQAKELALSAYHDRLARRS

SEQ ID NO: 449 - protein, 645 aa, Scytonema hofmannii
MSTITIQCRLVAEEATLRYFWELMAEKNTPLINELLEQLGQHPDFDTWVQAGKMPEKTVENLCKSLEDREPFANQPGRFRTSAVALVKYIYKSWFALQKRRADRLEGKERWLKMLKSDVELERESNCSLDIIRAKAGEILAKVTEGCAPSNQTSSKRKKKKTKKSQATKDLPTLFEIILKAYEQAEESLTRAALAYLLKNDCEVSEVDEDSEKFKKRRRKKEIEIERLRNQLKSRIPKGRDLTGDKWLKTLEEATRNVPENEDEAKAWQAQLLREASSVPFPVAYETSEDMTWFTNEQGRIFVYFNGSAKHKFQVYCDRRQLHWFQRFVEDFQIKKNGDKKGSEKEYPAGLLTLCSTRLRWKESAEKGDPWNVHRLILSCTIDTRLWTLEGTEQVRAEKIAQVEKTISKREQEVNLSKTQLERLQAKHSERERLNNIFPNRPSKPSYRGKSHIAIGVSFSLENPATVAVVDVATKKVLTYRSFKQLLGDNYNLANRLRQQKQRLSHERHKAQKQGAPNSFGDSELGQYVDRLLAKSIVAIAKTYQASSIVLPKLRYMREIIHNEVQAKAEKKIPGYKEGQKQYAKQYRISVHQWSYNRLSQILESQATKAGISIERGSQVIQGSSQEQARDLALFAYNERQLSLG

SEQ ID NO: 450 - protein, 646 aa, Nostoc carneum
MSQITIQCRLVASESTRQQLWKLMADLNTPLINELLEQLAKHPDFEKWRQKGKLPASVVMKLCQPLKNDPRFAGQPSRFYISAIHIVDYIYKSWLAIQKRLQQQLDGKTRWLEMLNSDPELVEASASSLEVIRTKAAEILAIAMTASDSDNSSPNGKKSKKAKKASSNPKRKLFNTLFDAYQETEDVLSRSAISYLLKNGCKLSDKDEDPEKFAQRRRQLEIQIQRLTEKLTSRIPKGRDLTHAKWLETLFTATTTVPKDNAEAKHWQDILLTRSSSVPFPVVFETNEDLVWSTNEKSRLCVHFNGLSDLTFEVYCDSRQLHWFKRFLEDQQTKRKSKNQHSSGLFTLRNGRLAWQQGEGKGEPWQLHRLTLYCCVDNRLWTAEGTEQVRQEKAEEITKFITKMNEKSDLSDTQFAFIKRKESTLTRINNSFDRPSKPLYQGQSHILVGVSLGLEKPATVAVVDAMPDGKADANAGKVLTYRSIRQLLGDNYKLLNRYRREQRSLSHERHKAQKSFSPNQFGASELGQYIDRLLAKEIIAIAQTYKVGSIVLPKLGDMREIVQSEIQAIAEAKCPGSLEIQQKYAKQYRVNVHSWSYGRLIQSIQSKAAQAGIMIEAGKQPIRGSPQDKAKELALSAYHDRLARRS

SEQ ID NO: 451 - protein, 639 aa, Hassallia byssoidea
MSQITIQCCLIASESTRQKLWKLMAHLNTPLINELLQQLSKHPDFEKWRKNGKLPSTVVNQLCQPLKTDPSFTGQPSRLYLSAIHVVDYIYKSWLAIQKRLQQQLDGKIRWLEMLNSDAELIEISGCSLEAIRTKAAEILAIATPDSDVAAPLTKTGKAKKSKKSSASNPDRSLSHKLFDAYQETDDILSRSAISYLLRNGCKLNDKEEDLEKFAKRRRKVEIQIQRLTDKLTSRIPKGRDLTNAKWLETLFTATTTVPEDNVEAKRWQDILLTRSSSVPFPLIFETNEDLVWSKNEKGRLCVHFNGLSDLTFEVYCDRRQLHWFKRFLEDQQTKRKSKNQHSSGLFTLRNGRLAWQEGEGKGEPWQINRLTLYCCVDNRLWSAEGTEQVRQEKEEEITKFITKMNEKSDLSETQQAFIKRKESTLTRINNSFERPSQFLYQGQSHILVGVSLGLEKPATVAVVDAIAGKVLAYRSIKQLLGDNYELLNRQRRQQQYLSHERHKAQKSFSPNQFGTSELGQYVDRLLAKEIIAIAQTHKAGSIVLPKLGDMREIVQSEIQAIAEEKFPGYVEGQQKYAKQYRVNVHGWSHSRLIQSIQSKAAQIGIVIEEGKQPIRGSPQDKAKELALSAYNLRLARRS

SEQ ID NO: 452 - protein, 647 aa, Nostocales
MSQITIQCRLIASESTRQQLWKLMAESNTPLINQLLQQLSKHPDFEKWRKNGKLPSTVVYQLCQPLKTHPSFTGQPSRFYLSAIHVVDYIYKSWLAIQKRLQQQLDGKLRWIEMLNSDAELVEISGCSLEAIRTKAAEILAMTTPESGSNISVTKTRKTKKSKNSNSSASNSDRSLSHKLFDAYQETDDILSRSAISYLLKNACKLNNKEEDPEKFSQRRRKVEIQIQRLTDKLISRIPKGRDLTNSKWLETLFTATTTVPEDNTEAKRWQDVLLTRSSSVPFPVIFETNEDLVWSKNEKGRLCVHFNGLSDLTFEVYCDSRQLHWFKRFLEDQQTKRKSKNQHSSGLFTLRNGRLAWQEGKGKEEPWNIHHLTLYCCVDNRLWTEDGTEQVRQEKAEEITKFITKMNEKSDLSDTQLAFIKRKESTLTRINNSFDRPSKPLYQGQSHILVGVSLGLEKPATIAVVDAMPDGKADANAGKVLTYRSIRQLLGDNYELLNRQRRQQRSLSHERHKAQKSFSSNQFGTSELGQHIDRLLAKEIVAIAQTYKAGSIVLPKLGDMREIVQSEIQAIAEAKCPGYVEIQQKYAKQYRVNVHQWSYGRLIQSIQSKAAQVGIMVEEGKQPIRGSPQDKAKELALSTYHSRLAR

SEQ ID NO: 453 - protein, 648 aa, Nostoc sp.
MCFVWYFIFMSQKTIQCRLIASESTRQKLWKLMAESNTPLINELLQQLSKHPDFEKWRRNGKLPSTVVSQLCQPLKTDPSFTGQPSRFYISAIHIVDYIYKSWLTIQKRLQQQLDGKLRWIEMFNSDVELVEISGFSLEAIRTKASEILAITTPESDPKTLLTKRGKTKQSKKSSASNPDRSLSRKLFDAYQETDDILSRSAISYLLKNGCKLNDKEENPEKFAKRRRKVEIQIQRLTDKLTSRIPKGRDLTYSKWLETLFTATTTVPENNAEAKRWQDILLTRSSSIPFPVVFETNEDLVWSTNEKGRLCVHFNGLSDLIFEVYCDSRQLYWFKRFLEDQQTKRKSKNQHSSGLFTLRNGRLAWQQGEGKGEPWNIGHLALYCCVDNRLWTAEGTEQVRQEKAEEITKFITKMKDKSDLSETQLAFIKRKESTLTRINNSFDRPSKPLYQGQSHILVGVSLGLEKPATIAVVDAIAGKVLTYRSLRQLLGDNYELLNRQRRQQRSLSHERHKAQKSFSPNQFGASELGQYVDRLLAKEIVAIAQTYKAGSIVLPKLGDIREIVQSEIQAIAEAKCPSSSEIQQKYAKQYRVNVHQWSYGRLIQSIQSKAAQIGIVIEEGKQPIRGSPQDKAKELALYAYSLRLARRS

SEQ ID NO: 454 - protein, 636 aa, Nostoc sp.
MSQITIQCRLVASESSRHQLWKLMAELNTPLINELLHRVNQHPEFETWRQKGKHPTSVVKELCEPLKTDSRFIGQPGRFYTSAIALVNYIYKSWFALMKRSQFQLEGKNRWLQMLNSDVELIESSGVSLDSLRTKAAEILAQFASLNTAETPSTNVKKAKKRKKAQNSDSDRNLSKNLFESYPKTEDNLTRCAISYLLKNGCKINDKEEDAKKFVQRRRKLEIQIERIREQLETRTPKGRDLTATKWLATLFTATHNVPTNEAEAKSWQDSLLRQFSKVPFPVAYESNEDMTWFKNQFGRICVKFNGLSEHSFQVYCDSRQLHWFQRFLEDQQIKKNSKNQHSSSLFTLRSGRLAWQEEEGKGDPWKANHLTLYCSVDTRLWTTEGTNQVREEKAEEIAKIITNTKAKGDLNEKQQAHIKRKNSTLDRINNPFPRPTKTLYKGQSHILVGVSLGLEKPATLAVVDGTTGQVITYRSIKQLLGDNYKLVNRQRKQKHSLSHQRQIAQTLAAPNQFGESELGEYIDRLLAKEIIAIAQTYSAGSIVLPKLDNMREQVQSEVQAKAEQKSDLIEVQKQYAKQYRVSVHQWSYGRLMANIHSSAVKAGIVIEESKQPIRGSPQEKAKELAIAAYHSRKIN

SEQ ID NO: 455 - protein, 635 aa, Microcoleus sp.
MSQITIQCRLVANVSTRHQIWTLMAERNTPLINELLEQIGQHPDFETWRQKRKIPAGIIKQLCEPLRTDSRFIGQPGRFYASASALVDYIYKSWLKVQQRLQRKLEGQMRWLGMLKSDEELVNQSGCTLEVIRTKASEILVPLTSKNESPQPTQTKGKKSKKPQDLGSNRSISKTLFQVYDDIEDLLTKNAICYLLKNGCKIPDQEEDKEKFAKRRRKTEIKISRLEEQLASRIPKGRNLTGEKWLETLIAATSTVPENESQARSWQDRLLTKPQSVPFPVTYESNEDLTWSKNSKGRLCVKFNGLSEHTFQIYCDQRQLKWFQRFLEDQQIKRESKDQHSSSLFTLRSGQIAWALGKGKGDAWNIHHLTLYCTLDTRLWTAEGTEQVRQEKADDIAKTLARMKEKGDLNDKQQAFIKRKNSTLARLNNPFPRPSQPLYQGRSHIAVGISLGLGKPATAAIVDGTTGEAIAYRSIRQLLGDNYKLFNRQRQEKQRQSHQRHKAQKNATSNQFGESELGEYVDRLLAKEIVTLAQTYQAGSIVLPKLGDMRELVHSEIQTRAEQKIPSYVEGQQKYAKQYRVNVHQWSYGRLIENIQVQAAKIGISIEQGQQPVRGSPQEKAKEMAIAAYHSRLNP

SEQ ID NO: 456 - protein, 639 aa, Nostocaceae
MSQKTIQCRLIASESTRQKLWKLMAESNTPLINELLQQLSKHPDFEKWRRNGKLPSTVVSQLCQPLKTDPSFTGQPSRFYISAIHIVDYIYKSWLTIQKRLQQQLDGKLRWIEMFNSDVELVEISGFSLEAIRTKASEILAITTPESDPKTLLTKRGKTKQSKKSSASNPDRSLSRKLFDAYQETDDILSRSAISYLLKNGCKLNDKEENPEKFAKRRRKVEIQIQRLTDKLTSRIPKGRDLTYSKWLETLFTATTTVPENNAEAKRWQDILLTRSSSIPFPVVFETNEDLVWSTNEKGRLCVHFNGLSDLIFEVYCDSRQLYWFKRFLEDQQTKRKSKNQHSSGLFTLRNGRLAWQQGEGKGEPWNIGHLALYCCVDNRLWTAEGTEQVRQEKAEEITKFITKMKDKSDLSETQLAFIKRKESTLTRINNSFDRPSKPLYQGQSHILVGVSLGLEKPATIAVVDAIAGKVLTYRSLRQLLGDNYELLNRQRRQQRSLSHERHKAQKSFSPNQFGASELGQYVDRLLAKEIVAIAQTYKAGSIVLPKLGDIREIVQSEIQAIAEAKCPSSSEIQQKYAKQYRVNVHQWSYGRLIQSIQSKAAQIGIVIEEGKQPIRGSPQDKAKELALYAYSLRLARRS

SEQ ID NO: 457 - protein, 645 aa, Calothrix sp.
MSQITIQCRLVASESTRQQLWKLMAELNTPLINELLRQVHQHPEFETWRQKGKHPTSIVKELCQPLKTDPSFIGQPGRFYTSAIATVNYIYKSWFKLMKRSQSQLEGKIRWWEMLKSDAELVEVSGVTLESLRSKADEILAHFTPQSDTVEAQPGKGNKRKKTKKSKVAEGDCAERTLRERSISKTLFEAYRDTEDILTHCAISYLLKNGCKINDKEEDTQKFAKRRRKLEIQIERLREQLEARIPKGRDLTNGKWLETLLLATHNVPESETEAKSWQDSLLKKSSKVPFPIAYETNEDMTWFKNERGRICVKFNGLSEHSFQVYCDSRQLHWFQRFLEDQQIKQNSKNQHSSSLFTLRSGRIAWQEGEGKGEEWKVNHLIFYCSVDTRLWTAEGTNLVRVEKAEEIAKTITQTKAKGELNDQQLAHIKRKNSSLARINNSFPRPSKPLYQGQSHILVAVSLGLEKPATVAVVDGTIGKVLTYRSIRQLLGDNYKLLNRQRQQKHTLSHQRQIAQMLAAPNELGESELGEYIERLLAKEIIAIAQTYKAGSIVLPKLGDMREQVQSEIQAKAEQKSDLIEVQQKYAKQYRVSTHQWSYGRLIENIRSSAAKTGIVIEESKQPIRGSPQEKAKELAIAAYHSRQKT

SEQ ID NO: 458 - protein, 639 aa, Anabaena sp.
MSQITVQCRLIASESTRQQLWTLMAELNTPLINELLQQLSKHPDFEKWRKDGKFPSTVVSQLCQPLKTDPQFAGQPSRCYLSAIHVVDYIYKSWLTIQKRLQQQLDGKIRWLEMLNSDAELVETSGYSLEAIRTKAAEILAMTTPESDTNVPLTKKRNTKKSKKSSASNPEPSLSHKLFNAYQETDDILSRSAISYLLKNGCKLNDKEEDTEKFAKRRRKVEIQIQRLTDKLTSRIPKGRDLTNSKWLETLFTAITTVPEDNAEAKRWQDILSTRSSSLPFPLIFETNEDLKWSTNEKGRLCVHFNGLTDLTFEVYCDSRQLHWFKRFLEDQQTKRKSKNQHSSGLFTLRNGRLAWQEGEGKGETWQIHRLTLSCCVDNRLWTAEGTEQVRQEKAEDITKFITKMKEKSDLSDTQQAFIQRKQSTLTRINNSFDRPCKPLYQGQSHILVGVSMGLEKPATVAVVDASANKVLTYRSIKQILGENYELLNRQRRQQRSSSHERHKAQKSFSPNQFGTSELGQYIDRLLAKEIVAIAQTYKAGSIVLPKLGDMRENIQSEIQAIAEIKCPGSVEIQQKYAKQYRINVHKWSYGRLIQSIQSKAAQVGIVIEEGKQPVRDSPQDKAKELALSTYHLRLAKQS

SEQ ID NO: 459 - protein, 635 aa, Anabaena cylindrica
MSQITIQCRLVASETTRQQLWQLMAEKNTPLINELLSQIGKHPEFETWRQKGKHPTGIVKELCEPLKTDPRFIGQPARFYTSATASVNYIYESWFALMKRYQSQLDGKLRWLEMFNSDAELVEHSGVSLDTLRATSAEILAQFAPQDTNRDTSNKGKKSKMGKKSQKSDSEGNLSKKLFDAYSSAEDNLTRCAISHLLKNGCKVSNKEENSEKFTQRRRKLEIQIQRLTEKLAARIPKGRDLTDTQWLETLFTATYNVPEDETEAKLWQNSLLRKFSSLPFPVAYETNEDLVWSKNRFGRICLTFPTLREHIFQIYCDSRQLHWFQRFLEDQEIKKNSKNQHSSALFTLRSGRIAWQEGEGKGEPWDIHHLTLYCCVDTRLWTEEGTNLVKEEKAEEIAKTITQTKAKGDLNDKQQAHLKRKNSSLARINNPFPRPSQPLYKGQSHILLGVSLGLEKPATVAVVDGTTGKVLTYRNIKQLLGDNYKLLNRQRQQKHLLSHQRHIAQRIAAPNNFGDSELGEYIDRLLAKEIIAIAQTYQAGSIVLPNLGDMREQIQSEIKAKAEQKSDLVEVQKKYAKQYPNSVHQWSYGRLITNIQSQSKKAGIVIEEGKQQIRASPLEKAKELAINAYQSRKA

SEQ ID NO: 460 - protein, 642 aa, Trichormus variabilis; identical to SEQ ID NO: 445

SEQ ID NO: 461 - protein, 639 aa, Nostoc punctiforme; identical to SEQ ID NO: 448

SEQ ID NO: 462 - protein, 645 aa, Nostoc linckia
MSQITIQCRLVGSESTRQQLWKLMAEKNTPLINELLLKVAQQPEFESWRQKGKHPAKIVKELCEPLKTDPRFIGQPGRFYTSAIALVNYIYKSWLALMKRSQSQLEGKMRWLEMLKSDAELVEASGVTLENLRTKAAEILAQLAPQSDTVEAKSPKGNKRKKTKKSKKSDGDCAERTLRERSISQILFEAYRNTEETLTRCAIGYLLKNGCKISNQDEDADKFAKRRRKLEIQIERLKQQLEARIPKGRDLTDAKWLETLLLVTNNAPENEAEAKFWQDSLLKQSSKLPFPVAYETNEDMTWFKNERGRICVKFNGLSEHSFQVYCDSRHLHWFQRFLEDQQIKHNSKNQHSSSLFTLRSGRIAWQEGEGKGDHWKVNRLILYCSVDTRLWTAEGTNLIREEKAEEIAKTITQTKAKGELNDQQLAHIKRKNSSLARINNPFPRPSKPLYKGQSHILVAVSLGLENPTTVAVVDSSIGKVLTYRSIKQLLGDNYRLLNRQRQQKHTLSHQRQVAQILASPNQIGESELGQYVDRLLAQEIVAIAITYKAGSIVLPKLGDMREQVQSEVQAKAEQKSDLIEVQQKYAKQYRVSVHQWSYGRLIANIESQSAKAGIFIEEAKQPIRGSPQEKAKELAIAAYDSRKIN

SEQ ID NO: 463 - protein, 614 aa, Crinalium epipsammum
MSQITVQCRLVASESTRHHLWKLMADLNTPLINELLARMAQHQDFETWRKKGKLPDGIVKQLYQPLKTDPRFTNQPGRFYTSAITVVDYIYKSWFKIQQRLEQKLKGQIRWLGMLKSDEELAAESNTSIEVIRTNAAELITSLSSEDGSVSTRLWKTYDETDDILTHCVICYLLKNGSKVPKKPEENLEKFAKRRRKVEIKIERLRRQLESRIPKGRDLTGKNWLETLAIASTTAPADEPEAQSWQDTLLTESKLVPFPVAYETNENLTWSKNEKGRLCVQISGLSKHIFQIYCDQRQLKWFQRFYEDQEIKKANKDQYSSGLFTLRSGRIAWQEGTDKGEPWNIHHLILYCTVDTRLWTAEGTEQVCQEKAEDIAKTLTRMKKKGDLNDRQQAFIRRQQSTLARLNNPYPRPSQPLYQGQPHILVGLAFGLDKPATAAVVDGTTGKAITYRSLKQLLGDNYELLNKQRKRKQQQSHQRHKAQSNGRSNQFGDSDLGEYVDRLLAKALVTLAQSYQAGSIVLPKLGDIRELIQSEIQAKAEQKIPGYIAGQEKYAKQYKISVHQWSYGRLIDNIKAQAAKISIVIEEGQQPIRGSPQEKAKEMAISAYDDRTKS

SEQ ID NO: 464 - protein, 632 aa, Cuspidothrix issatschenkoi
MSQITIQCRLLASESTRQQLWQLMAEKNTPLINELLMQMGKHPEFETWRQKGKHPTGVVKELCEPLKTDPRFMGQPARFYTSATASVNYIYKSWFALMKRFQSQLDGKLRWLEMLNSDTELEAASGVSLDVLQTKSAEILAQFAAQNPAETQPAKGKKGKKSPTSDSERNLSKNLFDAYSNTEDNLTRCAISYLLKNGCKISNKAENTDKFAQRRRKVEIQIQRLTEKLAARIPKGRDLTDTLRLETLFNATQTVPENETEAKLWQNILLRKSSQVPFPVAYETNEDLVWFKNQFGRICVKFSGLSEHTFQIYCDSRQLHWFQRFLEDQQIKKDSKNQHSSALFTLRSGRISWQEGQGKGEPWNIHHLTLYCSVDTRLWTEEGTNLVKEEKAEEIAKTITQTKTKGDLNDKQQAHLKRKSSSLARINNHFPRPSQPLYKGLSHILVGVSLGLENPATIAVVDGTTGKVLTYRNIKQLLGESYKLLNRQRQQKHLLSHERHVAQRMSAPNQFGDSELGEYIDRLLAKEIIAVAQTYKAGSIVIPKLGDMREQIQSEIQSKAEQKSDIIEVQQKYAKQYRTTVHQWSYGRLISNIQSQASKAGIAIEEGKQPIRASPLEKAKELAISAYQSRKA

SEQ ID NO: 465 - protein, 632 aa, Anabaena sp.
MSQITIQCRLVASESTRQQLWQLTAEKNTPLINELLSQIGKHPEFETWRQQGKHPTGIVKELCEPLKTDPRFIGQPARFYTSATASVNYIYKSWFALMKRFQSQLDGKLRWLEMLNSDTELVEASGVSLDILQTKSAEILAQFAPQNPAETQPAKGKKGKKSPNSDSDRNLSKNLFDGYSNTEDNLTRCAISYLLKNGCKISNKAENTDKFAQRRHKVEIQIQRLTEKLAARIPKGRDLTDTIRLETLFNATQTVPENETEAKFWQNILLRKSSQVPFPVAYETNEDMTWLKNQFGRICVKFNGLSEHTFQIYCDSRQLHWFQRFLEDQQIKKDSKNQHSSALFTLRSGRISWQEEEDKGEPWDVNHLTLYCSVYTRLWTEEGTNLVKEEKAEEIAKTITQTKAKGDLNDKQQAHLKRKNSSLARINNPFPRPSQPLYKGQSHILVGVSLGLENPATIAVVDGTTGKVLTYRNIKQLLGENYKLLNRQQQQKHLLCHQRHIAQRMSAPNQFGDSELGEYIDRLLAKEIIALAQTYKAGSIVIPKLGDMREQIQSEIQSKAEQKSDIIEVQKKYAKQYRVSVHQWSYGRLIANIQSQANKAGIAIEEGKQPIRASPQEKAKELAISAYQSRKA

SEQ ID NO: 466 - protein, 635 aa, Nostoc sp.
MSVITIQCRLVAEEDTLRKLWELMAGKNTPLVNELLAQVGKHPEFETWLEKGKIPTEFLRTLVNSLKTQERFADQPGRFYTSAIALVDYVYKSWFALQKRRKYQIEGKERWLKILKTDLELEQESQCSLNLIRTTANEILTKLTPQSEQNKNQRKGKKTKKSTKPKKPSLFQILLNTYKETEDPLTRCAIAYLLKNNCQISELDEDSEEFTKNRRKKEIEIERLKNQLQSRIPKGRDLTGEEWLKTLEISTANVPQNENEAKAWQAALLRKSADVPFPVAYESNEDMTWLQNDKGRLFVRFNGLGKLTFEIYCDKRHLHYFKRFLEDQELKSNSKNQYSSSLFTLRSGRLAWSPGEEKGEPWKVNQLHLYCALDTRMWTIEGTQQVVDEKSTKITETLTKATQKDELNDKQQAFITRQQSTLDRINNPFPRPSKPNYQGQPSILVGVSFGLEKPVTIAVVDVVKNEVLAYRSVKQLLGKNYNLLNRQRQQQQRLSHERHKAQKKNAPNSFGESELGQYVDRLLADGIVAIAKTYQASSIVIPKLRDMREQISSEIQSRAEKKCPGYKEAQQKYAKEYRMSVHRWSYGRLIESIKSQAAKDGISTEIGTQPIRGSPQEKARDLAVFAYQQRQVAVI

SEQ ID NO: 467 - protein, 632 aa, Anabaena sp.
MSVITIQCRLVAEEDTLRTLWELMADKNTPLINEILAQVGKHPEFETWLEKGKIPTELLKTLVNSLKTQERFASQPGRFYTSAIALVDYVYKSWFALQKRRKRQIEGKERWLTILKSDLELEQESQCSLNIIRTKATEIITEFTPQSDQNNSQKKRKKTTKSTKPSLFQILLNNYEETQDILTRCALAYLLKNNCQISERDENPEEFTRNRRKKEIEIERLKDQLQSRIPKGRDLTGEEWLKTLEVVRANVTQNENEAKAWQAAILRKSADVPFPVAYESNEDMTWLQNDKGRLFVRFNGLGKLTFEIYCDKRHLHYFKRFLEDQELKRNSKNQYSSSLFTLRSGRLAWSPGEEKGEPWKVNQLHLYCTLDTRMWTIEGTQQVVDEKSTKITETLTKAKQKDDLNDKQQAFVTRQQSTLNRINNLFPRPSKSRYQGQPSILVGVSFGLENPVTLAVVDVVKNEVLAYRSVKQLLGKNYNLLNRQRQQQQRLSHKRHKAQKRNAPNSFGESELGQYVDRLLADAIIAIAKTYQAGSIVIPKLRDMREQISSEIQSRAEKKFPGYKEAQQKYAKEYRMSVHRWSYGRLIESIKSQAAKAGISTEIGTQPIRGSPQEKARDLAVFAYQERQAALI

SEQ ID NO: 468 - protein, 635 aa, Trichormus variabilis
MSVITIQCRLVAEEDILRQLWELMAEKNTPLINELLAQVGKHPEFETWLDKGRIPTELLKTLVNSFKTQERFADQPGRFYTSAIALVDYVYKSWFALQKRRKRQIEGKERWLTILKSDLQLEQESQCNLNVIRTKANEILTQFTPQSDQNKNPRKSKKAKKSAKLQKSSLFQILLNTHEQTQETLTRCAIAYLLKNNCQISERDEDPEEFNRNRRTKEIEIERLKDQLQSRIPKGRDLTGEEWLETLEIATVNVPQNEKEAKAWQAALLRKTADVPFPVAYESNEDMTWLQNDKDRLFVRFNGLGKMTFEVYCDKRHLHYFKRFLEDQEIKRNSKNQYSSSLFTLRSGRLAWLPGKQKGEPWKINQLHLYCTLDTRMWTAEGTQQVVNEKITKITETLTKAKQKDELNDKQQAFITRQQSTLDRINNPFPRPSQPNYQGRPSILVGVSFGLEKPVTLAVVDVVKNEVLAYRSVKQLLGKNYNLLNRQRQQQQRLSHERHKAQKQNAPNSFGESELGQYVDRLLADEIVAIAKTYQAGSIVIPKLRDMREQISSEIQSRAEKKCPGYKEVQQKYAKEYRMSVHRWSYGRLIESIKSQAAKAGIFTEIGTQPIRGSPQEKARDLAVFAYQERQAALI

SEQ ID NO: 469 - protein, 638 aa, Chlorogloea sp.
MSQSTVQCRLIASTSTRQQLWKLMAQLNTPLINEILQQLNKHPDFEKWRKNGKLPSTVVSQLCHPLKTDLRFVGQPSRLYTSAIHVVDYIYKSWLAIHKRLQQQLDGKIRWLEMLNSDAELVETSFCSLEEIRTKAADILAMTTPESDANAPLIERRKTKKSKKSSTSNSDRGLSHKLFDAYQNTEDRLRRSAISYLLKNGCKLKDKEDPEQFAKRRRKLEIQIQRLTEKLTSRIPKGRDLANAKWLETLFTATTTVPEDNAEAKRWQDILLTRSSLLPFPLVFETNEDLVWSTNEKGRLCVHFNGLSDLTFEVYCDSRQLHWFKRFLEDQQTKRKSKNQHSSGLFTLRNGRLAWLEGKGKGEPWELHHLTLYCCVDTRLWTTEGTEQVRQEKTNEITKFITKMKEKTDLSVTQQAFVQRKQSTLTRINNSFERPNKPVYQGQSNILVGVSLGLEKPATVAVVDALTNKVLACRSTRQLLNENYELLNRQRRQQQSLSHERHKAQKSFSPNQLGASELGQYVDRLLAKEIVAIAQSYFAGSIVLPKLGDMREIIQCEIQAIAEAKCPGSKEIQKNYAKQYRVNVHQWSYGRLLQNIQSKATQMGIVIEEGKQPVRGSPQDKAQELALSAYKLRLARQS

SEQ ID NO: 470 - protein, 635 aa, Nostoc sp.
MSVITIQCRLVAEEDTLRQVWELMTDKNTPLVNELLAQVGKHPEFETWLEKGKIPTEFLKTLVNSLKNQERFSDQPGRFYTSAIALVDYVYKSWFALQKRRKRQIEGKERWLIILKSDLQLEQESQCSLNVIRTEANEILAKFTPQSDQNKNQRKSKRTRKSAKLQTPSLFQNLLNTYEQTQETLTRCAIAYLLKNNCQISERDEDPEEFNRNRRKKEIEIERLKDQLQSRIPKGRDLTGEEWLKTLEIATTNVPQNENEAKAWQAALLRKPADVPFPVAYESNEDMTWLQNDKGRLFVRFNGLGKLTFEIYCDKRHLHYFKRFLEDQELKRNSKNQHSSSLFTLRSGRIAWSLGEEKGEPWKVNKLHLYCTLDTRMWTIEGTQQVVSEKTTKITETLNQAKRKDVLNDKQQAFVTRQQSTLDRINNPFPRPSKPNYQGQPSILVGVSFGLEKPVTLAVVDVIKNEVLAYRTVKQLLGKNYNLLNRQRQQQQRLSHERHKVQKRNAPNSFGESELGQYVDRLLADAIIAIAKTYQAGSIVIPKLRDMREQISSEIQSRAEKKCPGYKEVQQKYAKEYRMSVHRWGYGRLIESIKSQAAKAGIFTEIGTQPIRGSPQEKARDLAVFAYQERQAALI

SEQ ID NO: 471 - protein, 635 aa, Nostoc piscinale
MSVITIQCRLVAGEDTLRTLWELMADKNTPLVNELLAQVGKHPEFEPWLEKGKIPTEFLKTLVNSLKTQERFADQPGRFYTSAIALVDYVYKSWFALQKRRKRQIEGKERWLTILKSDLQLEQESQCSLNAIRTKANEILTKLTPQSEQNKNQRKSKKTKKSAKLQKSSLFQILLNTYEQTQETLTHCAIAYLLKNNCQISELEEDSEEFTKNRRKKEIEIERLKDQLQSRIPKGRDLKGEEWLKTLEISTANVPQNENDAKAWQAALLRKSADVPFPVAYESNEDMTWLQNEKGRLFVRFNGLGKLTFEIYCDKRHLHYFTRFLEDQEIKRNSKNQYSSSLFTLRSGRLAWSPGEDRGEPWKVNQLHLYCSLDTRMWTIEGTQQVADEKSTKITETLTKAKQKDELNDKQQAFITRQQSTLDRINNPFPRPSKPNYQGQPSILVGVSFGLEKPVTVAVVDVIKNEVLAYRSVKQLLGKNYNLLNRQRQQQQRLSHERHKAQKRNAPNSFGESELGQYVDRLLADAILAIAKTYQASSIVIPKLRDMREQITSEIQSRAEKKCPGNKEVQKKYAKEYRMSVHRWSYGRLIESIKSQAAKTGIFTEIGTQPIRGSPQEKARDLTVFAYQERQASVI

SEQ ID NO: 472 - protein, 639 aa, Scytonema hofmanni
MSQITIQARLISFESNRQQLWKLMADLNTPLINELLCQLGQHPDFEKWQQKGKLPSTVVSQLCQPLKTDPRFAGQPSRLYMSAIHIVDYIYKSWLAIQKRLQQQLDGKTRWLEMLNSDAELVELSGDTLEAIRVKAAEILAIAMPASESDSASPKGKKGKKEKKPSSSSPKRSLSKTLFDAYQETEDIKSRSAISYLLKNGCKLTDKEEDSEKFAKRRRQVEIQIQRLTEKLISRMPKGRDLTNAKWLETLLTATTTVAEDNAQAKRWQDILLTRSSSLPFPLVFETNEDMVWSKNQKGRLCVHFNGLSDLIFEVYCGNRQLHWFQRFLEDQQTKRKSKNQHSSGLFTLRNGHLVWLEGEGKGEPWNLHHLTLYCCVDNRLWTEEGTEIVRQEKADEITKFITNMKKKSDLSDTQQALIQRKQSTLTRINNSFERPSQPLYQGQSHILVGVSLGLEKPATVAVVDAIANKVLAYRSIKQLLGDNYELLNRQRRQQQYLSHERHKAQKNFSPNQFGASELGQHIDRLLAKAIVALARTYKAGSIVLPKLGDMREVVQSEIQAIAEQKFPGYIEGQQKYAKQYRVNVHRWSYGRLIQSIQSKAAQTGIVIEEGKQPIRGSPHDKAKELALSAYNLRLTRRS

SEQ ID NO: 473 - protein, 638 aa, Mastigocoleus testarum
MTQITVQCRLVATETTRQELWDLMADKNTPLINELLKQVAEHSDFEAWRQKGKIPTGTIKQLCEPLKTDSRFIGQPGRFYTSAIALVSYIYKSWLALMKRLQYKLEGKIHWLEMLKSDEELVEISGVNLEALRSKAAEILAQFSPQIDTNNSQNKRKTKSKNSKKSKSSDISKNLSQQLFDTYRDTEDIVTHCAISYLLKNGSKLPNKEESPEKFTQRRRKIEIQIQRLREQLEARIPHGRDLTDLNWLNTLDIATNQVPQSETEAKSWQNNLLRKSHAVPFPVSYETNEDMTWFKNRKGRICVKFNGLSEHTFEIYCDNRQLHWFKRFLSDQQIKKNSKNQHSSSLFTLRSGRISWQEEVGKDRPWNVNHLKLDCTVDTRLWTAEGTNQVREEKAEEIAKTITKSKEKGELNDRQLAHIKRKQSTLDRINNPYPRPNKPLYKGLSNILVGVSLGLEKTATVAILDASTDKVVTYRSIKQLLGENYKLLNRQRQQKGELSHQRKIAQTQAASNQYGESELGQYIDRLLAKEIVAIAQKYSAGSIVLPKLSDMREQINSEIQAKALEKCPDCIEAQKKYAKQYRRSVNQWSYGRLIENIKSQAIKTGIVIEESKQPIRGSSQDKAKELATTAYKSRKKS

SEQ ID NO: 474 - protein, 635 aa, Nostoc sp.
MSVITIQCRLVAEEETLSQLWELMADKNTPLINELLAQVGKHPDFETWLEQGKIPTELLKTLVNSLKTQERFAGQPGRFYTSAIAIVDYVYKSWFALQKRRKHQIEGKERWLTILKSDQQLEQESQCSLNVIRTKAIEILSQFTPQSDQNKNQRKSKKTKKSAKLHKSSLFQILLNTYEQTQDPLTRCAVAYLLKNNCQISELHEDPEKFTRNRRKKEIEIERLKDQLQGRLPKGRDLTGEEWLETLEIATDNVPQNENEAKAWQAALLRKSAEVPFPVAYESNEDMTWLKNDKGRLFVRFNGLGKLTFEIYCDKRHLHYFQRFLEDQEIKRNSKNQYSSSLFTLRSGRLAWLPGEEKGEPWKVNQLHLYCALDTRMWTTEGTQKVINEKSIKITETLTKAKQKEDLNDKQQAFITRQQSTLDRIHNPFPRPSKPNYQGQPSILVGVSFGLEKPVTVAVVDVVKNEVLAYRSVKQLLGKNYNLLNRQRQQQQRLSHERHKAQKQNAPNSFGESELGQYVDRLLADAIVAIAKSYQAGGIVIPKLHDMREQISSEIQSRAENKCPGYKEAQQKYAKEYRMSVHRWSYGRLIDSIKSQAAKVGISTEIGTQPIRGSPQEKARDLAVFTYQERQAALI

SEQ ID NO: 475 - protein, 635 aa, Nostoc sp.
MSIITIQCRLVAEEETLRKLWELMTDKNTPLINELLAQVGQHPDFENWLEKGKIPTELLKTLVNSLKTQERFSGQPGRFYTSAIALVDYVYKSWFALQKRKKRQIEGKERWLTILKSDLQLEQESQCSLNAIRTKANEILTKLTPQSEQNKNQRKSKRTKKSAKLQKSSLFQILLNTYEETQDALTRCAIAYLLKNNCQISELDEDLEAFTRHKRKKEIEIQRLKDQLQSRIPKGRDLTGEEWFKILEIATGNVPQNENEAKAWQAALLRKSADVPFPVAYGSGEDMTWLQNDKGRLFVRFNGLGKLTFEIYCDKRHLHYFKRFLEDQEIKRNSKDEYSSSLFTLRSGRLVWLPREKKGEAWKVNQLNLFCALDTRTLTNEGTQQVILEKSAKITKKLTKAKQKDDLNDKQQAFITRQQSTLDMINNPFPRPTKPNYQGQPSISVGVSLGLEKPVTLAVVDVVKNEVLAYRSVKQLLGKNYNLLNRQRQQQQRLSHERHKAQKRNAPNSFGESELGQYVDRLLADGIVAIAKTYQASSIVIPKLRDMREQISSEIQSRAEKKCPGYKEAQQKYAKEYRMSVHRWSYGRLIESIKSQASKAGISTEIGTQPIRGSPQEKARDLAVFAYQERQAALI

SEQ ID NO: 476 - protein, 636 aa, Nostoc sp.
MSIITIQCRLVAEEETLRQLWELMTDKNTPLVNELLAQVGKHPDFETWLEKGKIPTELLKTLVNSLKTQERFVGQPGRFYTSAIALVDYVYKSWFALQKRRKRQIEGKERWLTILKSDIQIEQESQSTLNVIRTKATEILTKFTPQSEQNHNQRKSKRTKKKSTNSKKSSLFQILLNTYEETQDTLTRCALAYLLKNNCQISELDEDPEEFTRKKRKKEIEIQRLKDQLQSRIPKGRDLTGEEWLETLELARANVPQNEKEAKAWQAALLRKSADVPFPVAYESNEDMTWWQNDKGRLFVRFNGLGKLTFEIYCDKRHLHYFKRFLEDQEIKRNSKNQYSSSLFTLRSGRLSWRPGEEKGEPWKVNQLHLHCALATRMWTTEGTQQVVNEKTTKITKTLTQAKQKNELNEKQQAFITRQQSTLDRINNPFPRPSKANYQGQSSILVGVSFGLEKPVTIAVVDVVKNEVLAYRSVKQLLGKNYNLLNRQRQQQQRLSHERHKAQKQNVPNSFGESELGQYVDRLLADAIIAIAKTYQAGSIVIPKLRDMREQISSEIQSKAEKKCPGYKEAQQKYAKEYRMTIHRWSYGRLIESIKSQAAKAGIPTEIGTQPIRGSPQEKARDLAVLAYQERQVAVI

SEQ ID NO: 477 - protein, 633 aa, Nostoc sp.
MSVITIQCRLVAEEDTLRQLWELMAEKNTPLINELLLQVGKHPEFETWLEEGKIPTELLKTLVNSLKTQERFAGQSGRFYTSAIALVDYVYKSWFALQKRRKYQIEGKERWLKMLKSDLELEQESQCSLNVIRTKATEILTKFTPQSEQNSKQKKGKKTKKSTKSKKSSLFQILLNTYGETEDPLTRCALAYMLKNKCKISEIDEDPEEFTRNRRKKEIEIERLKDQLQSRIPKGRDLTGEEWLETLEIVTANVAQNEKEAKTWQAALLRKTADVPFPVAYESNEDMTWLKNDKGRLFVRFNGLGKLTFEIYCDKRHLQYFQRFLEDQEIKRNSKNQHSSSLFTLRSARLAWLPGEEKGEVWKVNQLNLYCSLDTRMWTTEGTQQVVEEKVTRITNTLTKVKQKDDLKDKQQAFITRQQSTLDRINNPFPRPSKPNYQGQPSILVGVSFGLKKPVTVAVVDVVKNEVLAYRSVKQLLGENYNLLNRQRQQQQRLSHERHKAQKQNAPTSFGESELGQYVDRLLADAIIVIAKTYQADSIVIPKLRDMREQISSEIQSRAEKKCPGYKEAQQKYAKEYRISIHRWSYGRLIESIKSQAAKVGISTEIGTQPIKGSPQEKAGNLAVFAYQERQAA

SEQ ID NO: 478 - protein, 627 aa, Spirulina major
MSQITIQCRLVASEATRQVLWTLMAERNTPLINELLAQMAQHPDLEEWRQKGKPTPGVVKKLCDPLRQDPRFMGQPGRFYSSAIALVEYIYKSWLKLQQRLQRKLEGQQRWLGMLKSDPELCEENHCTLDTLRDKAAEILASLESPQPKQGKVKTKKAKAQSSPRQSLFEMHDGAEDGFVKSAIAYLLKNGGKLPTHEEDPKKFAKRRRKAEVKVERLIHQITASLPKGRDLTGERWLETLLTASYTAPKDAQQTKVWQSILLTKTKAVPYPINYETNEDLTWSKNEKGRLCVRFNGLSEHTFQIYCDQRQLKWFQRFYEDQEVKRTSKNQHSTSLFTLRSGRIVWQESDRNDKPWTANHITLCCTLDTRLWSAEGTEEVRTEKAIDIAKTLTNMNEKGDLNDKQQAFIKRKTATLDRINNPYPRPSKPLYHGQSHILVGVALGLDKPATVAVVDGTTGKAITYRNLKQLLGENYKLVNRQRQQKQAQSHQRHKAQKRSGTDQFGDSELGQHIDRLLAKAIVAFAHSQSAGSIVVPKLEDIREIVQSEIQARAEEKVPGYIEGQKQYAKRYRVQVHQWSYGRLIDSIKSKATQQQVVIEEGKQPVRGSPEAQATELAISTYHLRASS

SEQ ID NO: 479 - protein, 635 aa, Nostoc sp.
MSVITIQCRLVAEEDILRQLWELMADKNTPLINELLAQVGKHPEFETWLDKGRIPTKLLKTLVNSFKTQERFADQPGRFYTSAIALVDYVYKSWFALQKRRKRQIEGKERWLTILKSDLQLEQESQCSLSAIRTKANEILTQFTPQSEQNKNQRKGKKTKKSTKSEKSSLFQILLNTYEQTQNPLTRCAIAYLLKNNCQISELDEDSEEFTKNRRKKEIEIERLKNQLQSRIPKGRDLTGEEWLKTLEISTANVPQNENEAKAWQAALLRKSADVPFPVAYESNEDMTWLQNDKGRLFVRFNGLGKLTFEIYCDKRHLHYFKRFLEDQELKRNHKNQYSSSLFTLRSGRLAWSPGEEKGEPWKVNQLHLYCTLDTRMWTIEGTQQVVDEKSTKINETLTKAKQKDDLNDQQQAFITRQQSTLDRINNLFPRPSKSRYQGQPSILVGVSFGLKKPVTVAVVDVVKNEVLAYRSVKQLLGENYNLLNRQRQQQQRLSHERHKAQKQNAPNSFGESELGQYIDRLLADAIIAIAKTYQAGSIVLPKLRDMREQISSEIQSRAEKKCPGYKEVQQKYAKEYRMSVHRWSYGRLIECIKSQAAKAGISTEIGTQPIRGSPQEKARDVAVFAYQERQAALI

SEQ ID NO: 480 - protein, 635 aa, Chlorogloea sp.
MSVITIQCRLVAEEDFLRQLWELMAEKNTPLINELLAQLGKHPELETWLEKGKIPTELLKALGNALKTQEPFAGQPGRFYTSAIALVNYVYKSWFALQKRRKYQIEGKERWLKMLKSDLDLEQESQCSLDVIRIKATELLTKFTPQFDTNNKQRKGKKNKKASKTQKPSVFKVLLNTYEETQCLLTRCALAYLLKNNCQISELNENLEEFTRNRRKKEIEIERLKDQLQSRIPKGRDLKGEEWLKILKIATANVAQDENEAKAWQAALLRKTKNVPFPVDYESNEDMTWLKNDKNRLFVRFNGLGKLTFEIYCDKRHLPYFQRFLEDQEIKRNSKNQYSSSLFTLRSARISWLPGKEKGEAWKVNQLNLYCSLDTRMWTTEGTIQVVEEKVMAITETLTKTKQKDDLNHKQQAFITRQQSTLNRITNPFPRPCKPTYQGKPSILLGVSFGLDKPATVAVVDAANKKVLAYRSTKQLLGKNYNLLNRQRQQQQRLSHERHIAQKQNAPNSFGESELGQYVDRLLADAIIAIAKTYQVGNIVLPKLRYMREQISSEIQSRAEKKCPGFKEAQQKYAQEYRISVHRWSYGRLVESIKSQAAKAGISTEIVTLLTRGSPEEKARDLAVFAYQERQAALI

SEQ ID NO: 481 - protein, 670 aa, Cyanothece sp.
MSTITIQCRLVAPEATRQALWQLMAQKNTPLVSELLRQVAQHPDFETWRQQGKLEAGIIKKLCEPLKKDPRFYEQPARFYTSAISLVDYIYKSWLKVQRRLQNKLEGQNRWLVMLKSDEELVQISQSSLETIQAKATDILSTLKPEKPDKFPETSTTKGKKSKKYKNNNSLFTQLYNLYEKADDTLTHCAIRYLLKNGCKIPQKPEDPEKFAQRRRKVEIKIERIIEQIESSIPQGRDLTGDSWLETLIIAANTATVEASEIKSWQDKLLSQSKSIPYPVAYETNEDLTWSINEKGRLCVRFNGLGKHTFQIYCDQRQLKWFQRFYEDQQIKKDGKDHHSSALFSLRSGRIVWQEGLGKGKPWNIHRLTLHCSLDTRFWTEEGTQQVQQEKSKKFQTNRLRMKPELTFSIFFRSQTLETYLQVWLVITAYRLQSFLDKGNVAKAHQEFQKAIKRNESSLQKITSSYNRPHKTLYQGKSHIFVGVAMGLEKPATVAVVDGTTGKAIAYRSLKQLLGNNYHLFNRQGKQKQNTSHQRHKSQKHFADNQFGESQLGQYIDCLLAKAIISVAQTYCAGSIVVPKLKDMRELIQSEIQAKAEAKIPGYVEGQAKYAKSYRVQVHQWSHGRLIDNITSQASKFNITVEEGEQPHQGNPQDKAKLLAIAAYHSRLCA

SEQ ID NO: 482 - protein, 615 aa, Myxosarcina sp.
MSQNAIQCRLIAPETTRRQQWQLMAEKNTPLINELLKQLAEHPELETWKRKGKIPPGTVKNLCQPLRTCPQYINQPGRFYSSVISLAEYIYRSWLKLQRRLIFRLNGQQRWLQMLKSDEELVAESGRSLKEIEAKASEALDRLNREENPSISNRLFDLYDETEDILIRSAIVYLLKNGCKIRQKPEDPKKFARRRRKTEIRVKRLQEKLNGKAPQGRDLTGEKWLNTLFTATSQVPQDEAQAKSWQDILLTKSKLVPYPIVYESNEDLTWSKNERGRLCVKFNGLSDHTFQIYCDRRQLKIFNRFYEDQQIKKASKNSHSSALFTLRSATIAWQEGKGKGEPWNVNRLILYCTFDNLLLTTEGTEVVRQEKAEAIANTLTKIKEKGDLNQKQQAFIRRKETSLSRINNPFPRPSRPLYKGKSNILLGVAIRLDKPATVAIVDGATDKAIAYLSTKQLLGKNYHLLNRKRQQQHILSHQRNVAQRHHANNKFGESELGQYIDRLLAKAIIQLAKDYRVGSIVVPYMEDTREIIQAEVQARAEAKIPGCIEKQKEYAKKYRTNIHKWSYGRLIDLIKAQAAKAGIVIEESKQSIRGDPKKQAKEIAVCAYRDRIVPF

SEQ ID NO: 483 - protein, 642 aa, Aphanizomenon flos-aquae
MSVITIQCRLVAEEDSLRQLWELMTEKNTPFINEILLHLGKHPEFETWLEKGRIPAESLKTLGNSLKTQEPFTGQPGRFYTSAIALVDYLYKSWFALQKRRKNQIEGKQRWLKMLKSDPELEQESQSSLEVIRTKATELFSKFTPQSDSEALRRNQNDKSKKGKKTKKPTKAKTSSIFKILLNTYEEAEDPLTRCALAYLLKNNCQISELDENPEEFTRNKRRKEIEIERLKDQLQSRIPKGRDLTGEQWLETLEIATVKVPQNENEAKAWQAALLRKTANVPFPVAYESNEDMTWLKNDKNRLFVRFNGLGKLNFEIYCDKRHLHYFQRFLEDQEILRSSKRQHSSSLFTLRSGRIAWLPGEEKGEHWKVNQLNFYCSLDTRMLTTEGTQQVVEEKVTAITEILTKTKQKDDLNDKQQAFITRQQSTLSRINNPFPRPSKPNYQGKSSILIGVSFGLEKPVTVAVVDVVKNQVIAYRSVKQLLGENYNLLNRQRQQQQRLSHERHKAQKQNAPNSFGESELGQYVDRLLADAIIAIAKKYQAGSIVLPKLRDMREQISSEIQSRAENQCPGYKEGQQKYAKEYRINVHRWSYGRLIESIKSQAAQAGIAIETGTQPIRASPQEKARDLALFAYQERQAALI

SEQ ID NO: 484 - protein, 616 aa, Xenococcus sp.
MSNITIQCRLIAPEETRRQLWQMMVEKNTPLINELLRLLAEHPDLETWKRRGNTPPGTVKNLCLPLRTDPQFVGQPGRFYSSAISLVEYIYKSWLKLQQRWEFQLQGQERWISMLKSDEELEVYCDHTLEDIKLKATQILDNDLTEENRGISNQLFSLYDETEDTFTRNAIAYLLKNGCKIRQKPEDPKKLAKRRRKTEIKIARLTEKLNGKAPQGRDLTGQTWLDTLLTATTQVPQDEAQAKSWQDKLLTEPKSVPYPIAYESNGDLTWSKNEKDRLCVKFNGLGKHIFQIYCDKRQLTVFQRFYEDQEIKKASKNNHSSALFALRSARIFWQERKGKGKSWDVNRLILRCTFETLLLNAEGTELIRQEKANAIAKTLTDIKEKGDLNQKQQAFVKRKQTSLDRINNPFPRSSKPLYRGKSNVLLGISMRLDNPATAAIVDGETGKVIVYQSTKQLLGKKNYHLLNRQRQQKQLLSRKRNVAQRHNANNKFGESELGQYLDRLLAKAIIKLAKDYQAGSIVVPQVGDIRDIIHTEVQARAESKIPGCIEKQKEYAKKYRTNAHSWSYGRLIENIKSQASKAGILVEESKQPIRGSPNEQAKEIALYAYCDRSESY

SEQ ID NO: 485 - protein, 655 aa, Halothece sp.
MSQITIQCRLVASAETRQHVWELMAEQNTPLVNELLKQVAEHPEFETWQQKGKLPAGIVSKLCKPLKEDSRFSGQPGRFYTSATKLVEYIYQSWLALQKRLQWRLNGQKRWLEILKSDQELCQQADCSLETLCHKASEILASFQSSTTKSKKKSKKQKNSSRKSLFDAYDSAEDSLTRSAIAYLLKNNCKIPEQQEDPEKFTQRRRKAEIKVERLTRQIDSSLPKGRDLTGERWLETLITAANKVPQNIEEFKSWQNILLTKPKSVPFPISYETNEDLTWSKNEKGRLCVRFSGLSDHTLQIYCDQRQLKWFQRFYEDQETKRASKNQHSSSLFTLRSARILWQEGTAKGQAWHRNYLSLYCTVDTRLWTAEGTEQVRQEKTDEITKILTNMEEKGDLSQTQEAFIKRKQTTLDRLNNSYPRPSKPLYQGQSHLLLGIAFGLEKPATIAIVDGTTGKAITYRSIKQLLGENYKLLNRHRKQKQVQSHQRHKNQKKFAPNQLRNSELGEYIDHLIAKAIVNIAQKYKVGSIVLPKLDNIREVIQSEVQMRAEQKIPGVVEKQKEYAKQHRIQVHQWSYNRLIESIKAKANQKEIVIEQAKQPNRIQVHQWSYNRLIESIKAKANQKEIVIEQAKQPIRDSSQEEAKELATIAYKSR

SEQ ID NO: 486 - protein, 642 aa, Anabaena cylindrica
MSVITIQCRLVAEEDSLRQLWELMSEKNTPFINEILLQIGKHPEFETWLEKGRIPAELLKTLGNSLKTQEPFTGQPGRFYTSAITLVDYLYKSWFALQKRRKQQIEGKQRWLKMLKSDQELEQESQSSLEVIRNKATELFSKFTPQSDSEALRRNQNDKQKKVKKTKKSTKPKTSSIFKIFLSTYEEAEEPLTRCALAYLLKNNCQISELDENPEEFTRNKRRKEIEIERLKDQLQSRIPKGRDLTGEEWLETLEIATFNVPQNENEAKAWQAALLRKTANVPFPVAYESNEDMTWLKNDKNRLFVRFNGLGKLTFEIYCDKRHLHYFQRFLEDQEILRNSKRQHSSSLFTLRSGRIAWLPGEEKGEHWKVNQLNFYCSLDTRMLTTEGTQQVVEEKVTAITEILNKTKQKDDLNDKQQAFITRQQSTLARINNPFPRPSKPNYQGKSSILIGVSFGLEKPVTVAVVDVVKNKVIAYRSVKQLLGENYNLLNRQRQQQQRLSHERHKAQKQNAPNSFGESELGQYVDRLLADAIIAIAKKYQAGSIVLPKLRDMREQISSEIQSRAENQCPGYKEGQQKYAKEYRINVHRWSYGRLIESIKSQAAQAGIAIETGKQSIRGSPQEKARDLAVFTYQERQAALI

SEQ ID NO: 487 - protein, 649 aa, Calothrix sp.
MSIITIQCRLVANDRTLQHLWELMAEKNTPLISELLEQLGKHPDFETWLKNGKVPKDTIKILCDSLKTQSRFAGQPGRFYTSAISQVKEIYKSWLTLQKRRQRQIEGKQRWLGMLKSDVELQEESNCSLEKIRAKGTEILAEFVSKFTKDTTKKSKTKIKSTKKSNKKTKKDTEESNSTLFQALCDIYDKTEDTLSKCAIIYLLKNNCQVIDTEENPDTFLKRKRAKEIEIKRLQDQIVGRIPKGRDLTDKKWLDTIKLASSQVPQDENEAKSWQNQLLKTSSSVPYSVDYETNTDIKWVKHNNGSIFVNFNGLGEHQFEVYCDSRQLPYFQRFCEDMQIWHNDEEKYSSALFMLRSARLVWLEKKGRGKPWNVNYLYLHCSLDTSLWTAEGTEQIRINKINETDEAIAKAKTKDKQELTENQLAYLQRQQSTRNKLNNSFPGRPSKPIYKGNSHILVGVSLGLEKPVTVAAVDVVSNKVLAYRSVKQLLGQNYKLLNRQRQQQKHLAQKRHESQKKQAPNQFGESELGLYVDRLLAKSIINFAKTYQASSIALPKLRDMREIIQSEIQAKAESKIPGYKEGQEKYAKEYRMSVHRWSYGRLIGNIQAQAAQAGILIETSSGQIRGSPQEQAKHLAISAYIERQTILNK

SEQ ID NO: 488 - protein, 667 aa, Cyanothece sp.
MSTITIQCRLVAPEATRQALWQLMAQKNTPLVSELLRQVAQHPDFETWRQQGKLEAGIIKKLCEPLKKDPRFNEQPARFYTSAIALVDYIYKSWLKLQQRLQRKLEGQNRWLAMLKSDDELIQISQTNIEIIQAKATEILSTLQPQDREQSSKKKAKKCKKSTNKNSLFSQLDKLYNEINNNLTHCAIRYLLKNGGKIPQRPEDTEKFAQRRRKVEIKIERIIEQIESSIPQGRDLTGDSWLETLIIAANTATVEAEDVKSWQDKLLSQSKSIPYPVAYETNEDLTWSINEKGRLCVRFNGLGKHTFQIYCDQRQLKWFQRFYEDQQIKKDGKDHHSSALFSLRSGRIVWQEGLGKGKPWNIHRLTLHCSLDTRFWTEEGTQQVQQEKSKKFQTNRLRMKPELTFSIFFRSQTLETYLQVWLVITAYRLQSFLDKGNVAKAHQEFQKAIKRNESSLQKITSSYNRPHKTLYQGKSHIFVGVAMGLEKPATVAVVDGTTGKAIAYRSLKQLLGNNYHLFNRQGKQKQNTSHQRHKSQKHFADNQFGESQLGQYIDCLLAKAIISVAQTYCAGSIVVPKLKDMRELIQSEIQAKAEAKIPGYVEGQAKYAKSYRVQVHQWSHGRLIDNITSQASKFNITVEEGEQPHQGNPQDKAKLLAIAAYHSRLCA

SEQ ID NO: 489 - protein, 661 aa, Gloeocapsa sp.
MSTITIQCRLVAPETTRQALWELMAQKNTPLVSELLRQVAQHFDFETWRQKGKLEVGIIKKLCEPLKKDPRFSNQPARFYTSAIALVDYIYQSWLKLQQRLQRKLEGQNRWLVMLKSDEELVQISHSSLETIQAKATEILSSLKRDPKSTKKGKNSQKNKSLFTQLYDLYDKTENTLTRCGICYLLKNGCKISKKPEEPEKFAQRRRKVEIKIERLIEQIEGSIPQGRDLTADCWLETLNIAANTATVDATEVKSWQDQLLSQSKSIPYPVAYETNEDLTWSINEKGRLCVRFNGLGKHTFQIYCDQRQLKWFQRFYEDQQIKKNGKNQHSSALFTLRSGRIVWQEGKSKGKPWNIHSLALHCSLDTRFWTEEGTEQIQQEKSQQFQRNRLRMKPELTFGIFFRSQQLETFLQLWLVITAYRFQSFLEKGNIAKANHDFQKAIQRNESSRQKITNSYNRPHKPLYQGKSNILVGVAMGLEKPATVAVVDGTTGKAIAYRSLKQLLGENYPLLNRQRKQKQKSSHQRHKAQKSSSNNQFGESELGQYIDRLLAKAIVAVAKTYQGGSIIVPRLKDMRELIQSEIQAKAEAKISGYVEGQKKYAKSYRVQVHQWSYGRLITEITSQASKLGILIEESEQIYHNNPQKQAQYLAISAYCARLSA

SEQ ID NO: 490 - protein, 650 aa, Calothrix parasitica
MSFKTIQCRLVAEESTRQQLWQLMAHKNTPLINELLLQVAQHPDFETWRKKGKIAKGIITQLCQSLKTDLRFIGQPGRFYTSAITFVDCIYKSWLELMKLNQRRLEGKNRWQKMLKSDAELVEDSSASLDLIRSKATEILAQAQLNSESLSAENQENNKSEKSIKKQKKGKKKNNKKSEESEENKSLSKALFDAYENTEDILTRCAISYLLKNGCKVTNKEEDPEKFTIRRRKLEIEIEDLQEKLEARLPKARDLTDSSWLNNLELATKQVPESEEEAKSWQDALLKKSSSVPFPIAYETNEDMTWFKNEKGRICVKFNGIGEHTFEIYCNKRQLHWFKRFLLDQETKKNSNDQYSSSLFTLRSGLILWQERDKKGKPWNINYLALHCCVDTRLWTAEGTQVVAEEKAEEITRIISNAKKKDNLNKNQLTFIKRKKTTLARINNPYPRPSKPLYKGQSNIILGLYLGLKERATIAVVDVNAGKVLINQSTKQLLGNNYRLIDRQRRQKRKLSHQRKIAQTQSKPNNFKESDLGEYIDRLLAKKIVEIAQKFSASSIVLPKLTNMREQINSEIQAKAEKKCPESIEVQKKYAHQYRINLNNWSYGRLTQNIQNLASQVGLTVEENEQPLKGSPKEKAKELALVAYKARNKS

SEQ ID NO: 491 - protein, 629 aa, unidentified
MSQKTIQCRLIAPPATRQYLWMLAAEKNTPLINALIQAVVTHDDFEAWRLKGRHPADVVTKLCKSLKDEAPFSGQPARFYVSAEKAVNYIFKSWFTLQSRLQRQITGKQMWLTILKSDDELTEMCGQDLEAIQKKAVQILAQLEKAVETDKAEGGPGKSAKDLIRVQLFKKHDGAKQPLIRCATAYLLKNGGKLPEKPEDPDKFAQRRRKAEIQVQRLQDQIEARIPKGRDLTGQAWLSALLTATTTVPKDNREHKQWQDKLLAQPRTIPFPILFETNEDLVWSRNQAGRLCVRFNGLSEHTFQIYCDQRQLPWFQRFLEDQNTKRASKNQHSSALFALRSARISWQEAERKGHPWDAHYLTLSCTVDTRLWSAEGTEDVRQEKAAETAKVLARLSEKGRLSDTQQSYAKRLTSTLERLNSPFDRPSYPRYQGNPHIIVSLSLGWDNPLTLAVWNAKTQEVLAYRSLRQLLGKDYALFLRQRREQGKRSHDRHKAQRQGKNNQFGTSNLGEHVDRLLAKAVVVTAQQYGAGSIAIPKLDNIREILQAEIQAKAEQKAPGSIEGQKRYAKQYKSSIHKWSYGRLLDQIASKAAQNGMAIETVKQPWQPNVGEMAKAVAIAAYESRKVVVH

SEQ ID NO: 492 - protein, 639 aa, Calothrix parietina
MSVITIQCRLVADEETLRHLWTLMAEKNTPFANEILEQLAQHAEFESWVKNSRVPATVIKELCDSLKNQELFAGQPGRFYTSATTLVTYIYKSWLAVNKRLQRKIEGKKQWLDMLRSDTELEQESNSNLEKIRAKATEILDSFATRQINQVNSKSKTSKNNKNKQEKEVKSLSIQSNILFETYRQTEDNLTKCAIVYLLKNNCEVNDVEEDIEEYEKNKRKKEIQIKRLEDQLKSRVPKGRDLTGEKWVEVLEKAVNSVPESENEAKSWQASLLRKSSQIPFPVVYETNEDIKWSINEKGRIFVSFNGLGKLKFEIFCDKRHLHYFQRFLEDQDIKRQGKNQHSSSLFTLRSGRISWLEQPGKGKPWNINRLLLFCSIDTRMLTAEGTQQVIEEKIADTQNKIAKAQEKCEGELNPNQQAHINRKKSTLARINTPFPRPSKPLYQGKSHIVVGVSLGLKATATIAVFDAMNNQVLAYRSTKQLLGDNYKLLNRQQQQKQRLSQQRHKSQKQFASNSFGESELGQYVDRLLAKEIVAVAKNFGAGSIVLPKLGDMREIIQSEVQAKAEKKIPGFIELQKNYAKEYRKSAHNWSYGRLIENIQSQATKEGIEIETGKQPTRGIPQEQARDLALFAYQCRIA

SEQ ID NO: 493 - protein, 616 aa, Geminocystis sp.
MAHVTIQCRLIASRDTRQFLWQLMAQKNTPLINEILLRIKQHPDFPHWRTKKRLPKDFLARQIAELKNNYPFEEQPSRFYASVNKVIDYIYKSWFEVQKALDWKLQGNLRWVEMLLPDTELIKHFDNSLESLQQQATLILDSIDSTVSHDRISTILFEKCGKTKKPEIKSAIIYLLKNGCTIPKKPETTEKYQDLKRKVEIKITKLHRQIESRIPLGRDLEDKKWLDTLITASTTAPIDQTEANTWFSILKQNQSSIPYPILYETNEDLKWSLNEKNRLSIRFSGLGEHSFQLCCDHRQLPYFQRFYEDQELKKASKDQLSSALFTLRSAMILWKEDEGKGELWDRHKLYLHCTFETRCLTAEGTSTIVEEKQKEVTKIIDLMKAKEELSDSQQAFIRRKNSTLAKLNNTFPRPSKPVYQGKPNVHLGIAMGLEQPVTIAIVDIETDKVITYRNTKQLLREDYRLLRRRRIEKQKLSHQNHKARKRFNFQQKGESNLGEYLDRLIAKAILTVAQEYQVSTILIPRLRDMRSITEAEIQLRAEKKIPEYKEGQKKYAQDYRVQVHQWSYGRLIENVKLICEKVGIVVVEAKQPKQGTLTEKALQLVLSATEKNLKKK

SEQ ID NO: 494 - protein, 612 aa, Cyanothece sp.
MSQITIQCRLVAKEPTRQTLWQLMAELNTPFINELLQKVAQNPDFEQWRQKGKLQKSVIKQLGDKLKKDPRYLGQPARFYTSGISLVEYIFKSWLKLQQRLQRKLDGKRRWLTVLKSDEELIQQSQQNLEAIRHKASEILQTHQKTEKLFNHLFQLYQEEKNPFTHIALCYLLKNRCKLPQKPEDPEKFTKRRRKVEIAIDRLQEQLEGRLPQGRDLTNHNWLETLSIACQTDPEDTAQARSWQDKLLIQSQSIPFPINYETNEDLTWHKNEKGRLCVKFNGISDLSFEIYCDQRQLKWFQRFYEDQQAKKGSKNQHSSALFTLRSGRILWQEGNEKGQPWNIHRLILQCTLDTRLWTQEGTEEVKQEKAEEIAKVLTSMNEKGDLTKNQQAFIKRKQSTLDKLENPFPRPSQPLYRGQSNILVGVSMGVDKPATVAVVDGITQKTLTIEYIKQLLGNNYPLIQRQRQQKQHQSHQRNVAQRKEAFNQFGDSELGEYIDRLLTKAIVTLAKKYKAGSIVVPKLEDMREIVQTEIQTKAEERIPNCIEAQKNYAKCYRVQVHQWSYSRLIDNIEAQASKLGIVLEISQQPYKGTPHDKAIALALNAYQSRLSA

SEQ ID NO: 495 - protein, 637 aa, Leptolyngbya frigida
MSQKTIECRLVATEDTRRYLWHLMAEKYTPLVNTLLKQVAQDDHFEEWCHSGNLSVAIVKQFCEKLKEDSQFAGQPGRFYSSAIALVHRIYKSWLALRKRVRNKIAGQTRWLAMLKSDDELTEASGSDLDALKVQAEAILAQIQSQTLLNGQSKPKKSRNQKQPTQTLEPKKNNIPNELFKLYDSVDDVLTRCAIAYLLKNGSKIPDKPEDAKKFAKRRRKTEIRLERLMHTLQRTRLPKGRDLSWHNWLKALEQSAKCVPQDETEAADWQASLLTEAAILPFPVNYETNEDLRWFLNEKGRLCVSFNGLGEHTFEVYCDQRQLHWFKRFLEDQEAKKASKGQLSSSLFTLRSGRLAWQAGKHQGDPWNVHRLSLACVVETRLWTTEGTDQVRQEKAATYTKVIAGTKAKGKLNAKQEAFIQKREKTLALLNHAYPRPSHPLYQGQPSLLAGISYGLDKPATLAIVNIQTGKAITYRSLRQLLGENYRLLNRSRLRQQRNAHQRHNNQSKNAPNQFGESNLGEYIDRLIAGAIVAIAQQYQVSSIVLPDVGDLREIIQSEVQARAEQKILGSVERQRQYALSYRSSVHRWSYAQLSQAIQSQAAQIGIAVETAKQSFTGTPQERAKGLAIAAYQARK

SEQ ID NO: 496 - protein, 612 aa, Cyanothece sp.
MSQITIQCRLVAKEATRQTLWQLMAELNTPFINELLQQVAQYPDFEQWRQRGRLTAKVIEQLGNELKKDPRFLGQPARFYTSGISLVEYIFKSWLKLQQRLQRKLDGKRRWLEVLKSDEQLIKDSQTDLETIRQKATEILQSYEGTERLFNSLFQAYRDEQNILTQTALNYLLKNRCQLPKKPEDAKKFAKRRRKVEITIKRLQKQINGRLPQGRDLTNDNWLETLNLACDTDPKDVEQSRTWQDKLLKKSQSIPFPINYETNEDLTWSKNEKGRFCVQFNGISDLKFEIYCDQRQLKWIQRFYEDQQVKKDGKDQHSSGLFTLRSGRILWQEGKGKGELWDIHRLTLQCTLETRCWTHEGTEQVKQEKADEIAGILTRMNEKGDLTKNQKAFVRRKQSTLNRLEKPFPRPSQPLYQGKSNILVGVSMELKKPATIAVIDGVTRKVLTYRNIKQLLGKNYPLLNRQQRQKQRQSHQRNIAQRKEAFNQFGDSELGQHIDRLLAKAIISIAQKYQAGSIVVPKLEDIREATQSEIQAKAEAKIPNCIEAQAEYAKKYRMQVHEWSYGRLIDNIQAQASKLGIFIEESQQPLQGTPLQKAAELAFKAYRSRLSA

SEQ ID NO: 497 - protein, 612 aa, Cyanothece sp.
MSQITIQCRLVAKEPIRHTLWQLMADLNTPFINELLQKVAQNPDFEQWKQKGKLQKSVIKQLGDKLKKDPRYLGQPARFYTSGISLVEYIFKSWLKLQQRLQRKLDGKRRWLTVLKSDEELIQQSQQNLEAIRHKASEILQTHQKTEKLFNHLFQLYQEEKNPFTHIALCYLLKNRCKLPQKPEDPEKFTKRRRKVEIAIDRLQEQLEGRLPQGRDLTNHNWLETLSIACQTDPEDTAQARSWQDKLLIQSQSIPFPINYETNEDLTWHKNEKGRLCVKFNGISDLSFEIYCDQRQLKWFQRFYEDQQAKKGSKNQHSSALFTLRSGRILWQEGNEKGQPWNIHRLILQCTLDTRLWTQEGTEEVKQEKAEEIAKVLTSMNEKGDLTKNQQAFIKRKQSTLDKLENPFPRPSQPLYRGQSNILVGVSMGVDKPATVAVVDGITQKTLTIEYIKQLLGNNYPLIQRQRQQKQHQSHQRNVAQRKEAFNQFGDSELGEYIDRLLTKAIVTLAKKYKAGSIVVPKLEDMREIVQTEIQTKAEERIPNCIEAQKNYAKCYRVQVHQWSYSRLIDNIEAQASKLGIVLEISQQPYKGTPHDKAIALALNAYQSRLSA

SEQ ID NO: 498 - protein, 639 aa, Calothrix sp.
MSQITIMCRLVANESTRQQLWQLMAELNTPLINELLVLISQHQDFETWQQKGKIPAGTVKQLCESLKTDPGFAGQPARFYASAIATVSYVYKAWMKVQKRLKSQLESKARWLSMLQSDEELIAIAGVDLDGLRNQARLILQQFAPEPSPQEDLQANKKQPKTEKSLSQTLLDTYESSEDILTRCAISYLLKNGCKVYEKPENSQKFSKHKDKLKVQIQRLIQKLEGRVPQGRNLTDTEWLETLILATEKIPQDEAEAKSWQDSLLKKSSSVIFPVSYESNEDMTWFRNQKGRICIKFNGISEHTFEIYCDSRQLHWFERFLSDQETKKNSKNQHSSALFTLRSARIGWHEQEIKNKQICRRKPTVNPWDIYHLTLYCTVDTRLWTAEGTAVVAAEKAEEIAKIITKTKEKDDLNEKQLAHIKRKNSTLERINNPYPRPSKPLYQANPHILVGVSLGLKKPATIAVVDVISQKVLTYCSIKQLLGKNYKLLNRHRQLKHNFAHKRKIAQTQAKQQQYLDSELGQYIDRLLAKQIIAIAKQYSASSIVLPQLNGMREQINSEIQAKAKEKCPESIEAQKKYAKQYRRSINQWSYGRLIESIISQGLQAGIAIEESKQAVQGSPQEKAKELAFVAYNSRKKS

SEQ ID NO: 499 - protein, 645 aa, Scytonema hofmannii; identical to SEQ ID NO: 449

SEQ ID NO: 500 - protein, 623 aa, Cyanobacterium aponinum; identical to SEQ ID NO: 446

SEQ ID NO: 501 - protein, 629 aa, Alkalinema sp.
MSQITIQCRLVAPPTARQHLWTLAAEKNTPLINTLIQEVANHEEFETWRLKGKHPTKIVSEICRRLRTEAPFSGQPARFYTSAEKTVNYIFKSWFTLQSRLQRQLSRKQIWLSILKSDPELVELCGHPLETIQNKATQLLTQIEKTLADSNPEDPQSPCTNDLIRAQLFKKYHGAKTPLIRCSIAYLIKNGGKLPKSPEIPHKFAQRRRKAEIQVQRLQDQLEGRLPKGRDLTGQAWLSTLITATSTVPKDNHEQKQWNDRLLAKPCTTPFPILFETNEDLNWSKNHTGRICVRFNGLSEHTFQVYCDQRQLPWFQRFLEDQQTKHTSKNQHSSALFTLRSAHLAWQETHSNGAGWDNHYITLYCTVDVRLWTAEGTEEVHQEKAVDIAKQLTYLDQKEDLSETQAAFAQRLTSTLDRLNKPFPRPHRHRAQQHSHIIVGLSVDWEAPLTLAIWNANTQEVLVYRSLRQLLGKDYPLFLQHRQEQQKQSHNRHKAQKRNKNCQFGTSHLGEHIDRLLAKAVITIAQQYNAGSIAVPNLDNIRETLQATIDAKAEQKAPGCIEAQKRYTKQYKITIHRWSYGRLIDQIISKAKQVGLGVEEAKQPLSGNVQEKAKLVAISAYNARLIVAF

SEQ ID NO: 502 - protein, 636 aa, Leptolyngbya boryana
MSVITIQCKLVATEETRRALWHLMAEKHTPLINELLKHIAQDSRFEEWSLTGKLPRLVVSEACNQLKQDPQFSGQPGRFYSSAISTVHRIFLSWLALQTRLRNQISGQTRWLAMLQSDNELTIASQTDINTLRLKASELLTHLNEPISESDQPEVKKTRSKKKNQTSNQAGANVSRTLFKLYDETEDPLTRCAIAYLLKNGCKLPDQNENPEKFIKRRRKTEIRLERLMNTFQTTRIPRGRHLSWHSWIEALETATSHIPENEEEAAGWQARLLTKPAILPFPVNYETNEDLRWSLNSQGRICVSFNGLSEHFFEVYCDQRDLHWFNRFLEDQETKKASKNQHSSSLFSLRSGQIAWQEGKGDAEHWVVHRLVLSCSIETDTWTQEGTEEIRQKKASDCAKVIASTKAKENRSQNQDAFIRRRERMLELLENQFPRPSYPLYQGQPSILAGVSYGLDKPATLAIVNIQTGKAITYRSIRQILGKNYKLLNRYRLNQQRNAHKRHNNQRKGGSSQLRESNQGQYLDRLIAHEIVAIAQEYQVSSLALPDLGDIREIVQSEVQARAEQKILGSIEQQRKYARQYRASVHRWRYAQLTQFIQSQAAQVGISIEITKQPLSGTPQEKARNLAIAAYQSRK

SEQ ID NO: 503 - protein, 642 aa, Cyanobacterium sp.
MLLYKYVLLNIIVDAMSLITIQCRLVASADTRQFLWMLMSQKNTPLINEIFMRIAEHPDFSVWKEKGKLPKNFLAQQIAELKEDKRFQGQPSRFYASVHKMIDYVYESWFTIQDKNKFRLQGHTRWLEMLKPDTEILQCFDGSWEKLQNQAKKILDEIDSTLSHTRIVDKLFKEYEATNDPRIQGAIVYLIKNGASIPDNKVETEKKYKKLKRKVEIQVHKLKKQIEISAPTGRDLNQQKWLDTLILASLASTTMPLNQAQCDRWFSALKKNSPSIPYPVIYETNEDLKWSLSDQNRLHVRFNGLSDHTFKIYCDSRQLPYFQRFYEDQELKKANKNQFSSALFTLRSAMIIWKEDDGKGELWDKHKLYLHCTLDTDYWTVEGTQVVAQRKQKEVLNIIDGMKEKDDLRDTQKKFIQRKETTLARLNNIFPRPGKPIYQGNPNLFLGVAMGLQESVTLALVNVGEGKAILYRNIKQLLGDNYHLLRRRRNEKQKLNHQNHKARKRASFQQKGESNLGEYVDRLIAKSILKIAQEYKVSTIIIPLLSQMRSITEAEVQARAEERIPEYKEGQKKYAKDYRVQVHQWSYGRLIDNIKANSAKVGIVVREGKQPKQGTFTDKALQLALSIQQNITEGKIPRNTKF

SEQ ID NO: 504 - protein, 641 aa, Nostoc sp.
MSVITIQCRLVASEDTRRHLWQLMAEKNTPLINELLKQVRIHPDMEQWLKKGKLPDGVIKPLCDSLSTQECFVNQPKRFYKSAIEVVEYIYKSWLALQKERQQKIDKKEHWLNMLKSDIELEQESNFSLNIIRAKAIKVLAHYIAKVEENHKQDITNKNVNKRKKSKSKNNNYTLFDILFKAYDQAKVSLNRCAIAYLLKNNCQVSEEEEDPNRYALRRSKKLKEIERLKEQLKSRIPSGRDLTGQEWLQSLLVATTNVPESENQFKIWQKHLLQNSSSIPFPVQFTSNEDLIWSKNEKGRICVSFSGEEFNNHIFEIYCDKKQIYWFQRFLEDQSIKRNNKKQYSSSLFTLRSGRLAWQDNKGNDLPWKIHRLTLYCSVDTRLWTIEGTQEFRREKVDEITEKLADMEKKENLNKNQQIYVKRLNSTLTKIDTAYPRPNQNLYQGKTSILIGVSLGLEKPATIAIVDCPTNKVLAYRSVKQLLGDNYNLLNRQRQQQQRNSHERHKAQKSNTQIKLSELELGKHIDNLLAQAIITLAKSYQAGSIVLPTMKNVRESIQSEIEARAVKRCPNYKEGQQQYAKQYRQSIHRWSYNRLIGCIKSQAAKANISIEQGPQPIRDSPQEKARDLAIAAYHFRQNKS

SEQ ID NO: 505 - protein, 690 aa, Scytonema sp.
MSVITIQCRLVAEENTLRQLWELMAEKNTPLINELLEQVGQHPNFEKWLKKGEVPEEAIDTIKKSLITQEPFAGQPGRFYTSAVTLVKEIYKSWFALQQERQRKIEGKERWLKMLKSDIELQQESQCNLDIIRNKANEILTSFVANFTENRNQQFKKKGNKTKKNKKEEEESTLFNALFKIYDKTKDCLSQCALAYLLKNNCQVSEIDEDPEEYVKRRRRKEIEIERLRKQLKSRKPKGRDLTGEKWLTALKEATNQVPVDQLEAKSWQASLLKVTSDIPYPVDYESNTDLDWLIHSNDDDIKKKVILVWQIYFLKQLIKSGSYSFIKYLYFQRGCLPKRDVNWLNLKNKAGRIFVKFNGLRKNIINPEFYICCDSRQRHYFQRLCQDWQVWHDNEETYSSSLFFLRSARLLWQKRKGTGAPWKVNRLILQCSIETRLWTEEETELVRIEKINQAETEIRESEQKGKPKQKVLSHRQKLNNLFPNRPSKPIYKGKPNIIVGVSFGLDKPATVAVVDVANKKVLAYRSTKQLLGKNYNLLNRQRQQQQRLSHERHKAQKRNAPNSFGESELGQYVDRLLADAIIAIAKTYQAGSIVIPKLRDMREQITSEIQSRAEKKCPGYKEAQQKYAKEYRLSVHRWSYGRLIESIKSQAAKVGISTEIGTQPIRGSPEEKARDLAVFAYQERQAALV

SEQ ID NO: 506 - protein, 643 aa, Trichormus variabilis
MSVITIQCRLIASEATRSYLWQLMAQKNTPLINELIEQLGIHPEIEQWLKKGKLPDGVVKPLCDSLITQESFANQPKRFNKSAIEVVEYIYKSWLALQKERQQTIDRKEHWLKMLKSDVELEQESKCTLDAIRSQATKILPKYLAQSEQNNNQTQSQNKKKSKKSKTKNENSTLFDILFKAYDKAKNPLNRCTLAYLLKNNCQVSQKDEDPNQYALRRSKKEKEIERLKKQLQSRKPNGRDLTGREWQQTLIMATSSVPESNDEANIWQKRLLKKDISLPFPIRFRTNEDLIWSKNEEGRICVSFSGEGLNDHIFEIYCGNRQIHWFQRFLEDQNIKNDNNDQHSSALFTLRSAILAWQENKQHKENSLPWNTRRLTLYCTLDTRLWTTDGTEKVKQEKVDEFTQQLANMEQKENLNQNQQNYVKRLQSTLNKLNNAYPRHNHDLYQGKPSILVGVSLGLEKPATLAIVDSSTNIVLAYRSIKQLLGDNYKLLNRQRQQQQRNSHERHKAQKSNMPNKLSESDLGKYIDNLLAQAIIALAKNYQAGSIVLPTMKNVRESIQSEIEARAVKRCPNYKEGQQQYAKQYRQSIHRWSYNRLMQFIQSQAVKANISIEQGPQPIRGSSQEKARDLAIAAYYLRQNKS

SEQ ID NO: 507 - protein, 626 aa, Cyanobacterium sp.
MSLITIQCRLVASADTRQFLWMLMSQKNTPLINEIFMRIAEHPDFSVWKEKGKLPKNFLAQQIAELKEDKRFQGQPCRFYASVHKMIEYVYESWFTIQDKNKFRLQGHTRWLEMLKPDTEILQCFDGSLEKLQNQARKILDEIDSTLPHKRIIDQLFKEYERINDPRIQGAIVYLIKNGASIPDNKVETEKKYKKLKRKVEIQVNKLKEQIEISVPTGRELNDQKWLDTLILASTTMPLNQAQCDHWFSVLQQNSPCVPYPIIYQTNEDLRWSINDKNRLCVQFSGLGGHLFTIYCDSRQLSYFRRFYEDQGLKKSHKDKFSSALFTLRSILLLWKEDKTNKTKGEPWQINRLYLHCTLETDCWTVEGTQVVAQRKQKEVLNIIDGMKEKDDLRDTQKKFIQSKQTSLARLNNIFPRPSKPIYQANPDLYLGVAMGLQEPVTIALVDVSQEKVILYRNIKQLLGDNYHLLRKRRNEKQKLSHQNHKAKKRANFQQKGESNLGEYVDRLIAKSILKIAQEYKVSTIIVPRLKQMRSITEAEVQARAEEKIPEYKEGQRKYAKDYRVQVHQWSYGRLIDNIKGNSSKLGIVVEEGTQPKQGTFTDKALQLALSSSKTNHKANPTKINS

SEQ ID NO: 508 - protein, 674 aa, Calothrix sp.
MSVITIQCRLIAHVATLRYLWKLMAEKNTPLINELLEQVAEHPNFEAWLKKGEVSKTAIKTICNSLKTQERFNNQPGRFYTSAVTLVHEVYKSWFALQQRRQRQINGKERWLNMLKSDIELQQESQCDLNVIRAKATEILNKFNAKFSQKKKYKSKKKANNTKNKNKEFLNNTLFSALFDMYDKTEDCLSKCALAYLLKNNCEVNELDEDQEKYAKNKRQKEIEIERLKKQIISRKPKGRDITAEKWLSTLEKATNQVSQNEDEAKSWQASLLRRDSCMPYPIDYDSDDLEWRVNSLAEKNNILEQSKYDVDNEAYKDVNWSDIKNKEGYILVKFNGLKEIIKHPEFYVGCDSRQLDYFQRFCQDWKIWNENQETYSSGLFLLRSARLLWQERKGKGDPWTVHRLILQCSIETRLWTQEETELVRLEKIDQADKTISNMEKKDSLNKNQVAYLKKTLTTRRKLNNPFPGRPSQALYQGKSSILVGVSLGLDKPATVAVVDAASKKVLTYRSVKQLLGQKYNLLNRQRQQQQRLSHERHKAQKQNAPNSASESELGQYIDRLLADAIVAIAKTYSASSIVLPKLQDLHEIIESEIQVKAEKKVPGYKEGQKNYAKQYRVNIHRWSYGRLFKIIQSQAAKASISIEITSSVIRSSPQEKARDLALLAYQERQAKLT

SEQ ID NO: 509 - protein, 608 aa, Geminocystis sp.
MAVITIHCRLISSKSNRHQLWNLMVQKNTPLINELLLELSQHEDLEQWCELGKLPSGLISKLCDQLKQRAEFEGQPSRFYASAINLVDYIYKSYLRTQRRLRFRLQGQQRWFEMFKSDTEFKNETNFSLTDIRVKARELLDKDLKDSSPDDYFKTYESTSDLLTRSAISYLLKNGRKLPEKPEDYQKFQKRRRKLQIKIEKLQKKIDSSPPMGRNLTNDSWLGMLNLVSNTIPQTDEEAKQWQDQLLRQSKSVPYPVMFNTNEDLRWSKNKKGRLCVTFNGLGKLVFEIYCDQQQLKWFERFYEDQEVKRKGKNQHSSALFTLRSGMLLWQEHEGKQEAWQNNHLTLYCSLDTCFETAEGTELVRQKKVKEVVNLIDAMNNKSERTKTQDAFIKRKQSTLARLDNSFPRPSKPLYQGNQNIVVAVSMSLEYPATIAMFNMSSQEVLTYRSTKQLLDNNYHLLNRQRNQKQRLSHQRHKTQRQNSSDFFTQQESELGQYLDRLLAQSIVSIAKQYQASTILLPNLKNIRDSIQAEIEAKAEAKIPNCKEAQKKYLKNYRINIHHWSYGRLIDSIQLQASKLDILIQEVKQPIRGSPQEKAKQMAILTLE

SEQ ID NO: 510 - protein, 643 aa, Leptolyngbya ohadii
MSIITIHCRLTAPESVRRHLWLLMSGRNTPLINDLLKRVSQHPDFETWQYWGTVPKVAIKELCEPLKELYPGQPARFYASAILMVTYIYESWLSLQQTRRHRLNGKQRWLEVVKSDAELLEMSSSTLETIRHRAQEILSRCNVESTPQSESSTKKRSKQQGQSSASSSKSLMTRLFETYNSADDILSRCAIAHLMKNDCKVSATEEDPKEFAHRILRKQKDIEQLEAQLQARLPKGRDLTGEEFLKTLTIATQQISASVAEARDWQGKLLTRPKSLPYPIIYGSSTDVRWGKTAKGRITVSFNGIDKYLKEADSEIQEWFKTQKEYPFRLYCDQRQLPFFQRFLEDWQAYQANKDTYPAGLLTLSSATLGWREGEGKGEPWQVNHLVLYCSFDTRLMTAEGTLAVQQEKASKALKNLARENSDPRNLSTLNRLQNLPERPSRKPYQGNPEILVGLSVGLTHPVTVAVVNGRTGDALTYRTPRTLLGDRYPLLNRQRQRQKQNALQRHKNQKRGVAYQPSESELGQYVDRLLAKSIIQLAQQYQAGSIVIPNLKHLRELLSSEITAKAEQKCSGSVEAQDKYAKEFRQRIHRWSYNRLLEAICSKANQVGITIETGFQPSKGTFQEQAKDLAIATYHSRAINKK

SEQ ID NO: 511 - protein, 641 aa, Lyngbya confervoides
MSKITIQCRLVASEATRQYLWHLMADIYTPFVNEILRQIREDDNFEQWRQSGKIPASVFEDYRKTLKTESRFQGMPGRWYYAGREEVKRIYKSWLALRRRLRNQLAGQNRWLEVLQSDETLMEVSGLDLSALQAEASQLLNILGSKNKTSKNRSKKAKGKPKGKSAKDPTLYQALWELYRETEDIAKKCVIAYLLKHKCQVPDKPEDPKKFRHRRREAEIRAERLNEQLIKTRLPKGRDLTNEQWLQVLEIATRQVPKDEDEAAIWQSRLLTDAAKFPFPVAYETNEDLKWFLNGKGRLCVSFNGLSEHTFEVYCGQRQLYWFNRFLEDQQIKKENQGERSAGLFTLRSGRLVWKPYSSDASRSDPWMANQLTLQCSVDTRLWTAEGTEQVRQEKATSIAKVIAGTKAKGNLNQKQQDFITKREKTLELLHNPFPRPSKPLYQGKPSIIAAVSFGLEKPATLAIVDIVTDKAITYRSIRQLLGQNYKLFTKHRLKQQQCAHQRHQNQVESAENRISEGGLGEHLDSLIAKAILETAAEYGASSIVLPELGNIREIIHAEIQAKAERKIPGLKEKQDEYAAKFRASVHRWSYGRLAQKVTTKASLHGLETESTRQSLQGTPQEKARNLAISAYESRKVAQRA

SEQ ID NO: 512 - protein, 648 aa, Nodosilinea nodulosa
MAQITIQCSLVASEATRQYLWHLMADIYTPFINEMLVRIGQHPNFEEWNQKGKIPADVFEDLRKALKEDPAFRGIPGRWYHAGRDLVKRIYKSWLTKRRRLYSQLAGQTHWLTILQSDDELIAACNQDLGVIRAEAAALLVKAEGAAPPSPSAKKSKKSPCPQKKAQKEKSAQPSKSLYPWLFEAYKTAETDLSKCAIAYLLKHNCQIPTKAEDAKKFQKRRRKAEIRVERIIEQLARTRLPKGRDLTDEKWLDTLKMAVQQVPKDEAEAAAWQADLLTDSSPLPFPIAYETNEDLKWSQNAKGRLCVSFNGLAEHSFEIHCDIRQLHWFQRFLDDQTIKKQGRKSHSAGALTLRSGRISWRLDAGKGNPWDRNRLVLFCSVDTLLWTKEGTEKASQEKASKIAQMISGTKAKGNLTNEQEDSVRKKEKTLALLQNPFPRPSRPLYEGSPTVLAGVSFGLDKPATLAIVDITTGQAIAYRSIRQLLGDDHKLLNRQRQRQRKKAQLRRSKQLKFAPNRISKEGLGDQIDSLIAKAIVQIAQQYNASSIVLGDLANIREIIESEVKAKAEQKTTLKEIQAKYALDYRTSIHRWSYNRLAQKIESKALQAGLSVETIKQPLTGSPQDKAREVAIAGFQARNVRKILDTGS

SEQ ID NO: 513 - protein, 612 aa, Cyanobacterium aponinum
MSIVTIHCRLIAPESCRSKIWDLMALKNTPMINEILKRLSNHEELESWYQTGRLPNGLVTKICDQLKNQPPFDNQPSRFYLSVTNLVEYIYKSYLRTQKQLRFRLQRQQRWYQMLKSDSELKQEAQCSLTDIRNKAQSLLAKYTNAESLSQSLFDAYNLAEDKITKVAISYLLKNGCKIPQKVENIERFVKRRRKVKIKIERLEKRIAESSPPMGRDLSDEKWINILNIVCQSAPQTDEQGKQWQDQLLKQSKSVPYPLIFNTNEDLIWSKNEKGRLCVTFNGLTKKGFVFEVCCDQRQLKWFERFYQDQQVKRQSKNQHSSALFSLRSGMLLWREGEGKQKPWTKNHLALFCSLETQFETIEGTELIKQQKVEEVLKTIENIKNKGELTKTQENFLQRKQSTLARLDNPFPRPSKPLYQGNPTIVIGVSMGIEKPATIAVVNQSTGEVIAYRSLKQLLGDDYKLLNLQRLHKQKQSHKRHKSQRDSSSRKCNKSQSELGQYIDRLLAKEIVAIARTYKVGRIVVPSLNNIRESIQAELTAKAEAKIQGSLEAQKRYLKNYRINVHQWSYGRLIENITLQASKLNIIVTEAKQSIRGSPQEKAKHLALSSKD

SEQ ID NO: 514 - protein, 729 aa, Fremyella diplosiphon
MLNIYAIIKHMCFIDERMSQITIQCRLVASESTRQQLWKLMAEKNTSLINELLVQVAQNPEFETWRQKGKHPSSIVKELCQPLKTDPRFIGQPARFYTSAIATVNYIYKSWFALIKRSHFQLEGKIRWWEMLKSDTELVELSGMTIESLRSKAAEILAQFTLKSDTVEAKPATENKRKKTKKSKASDSDRSMSKTLFEAYHDTKDILTSCAISYLLKNGCKINDKEEDTQKFAKRRRKLEIQIERLREQLEARIPKGRDLTDAKWLETLLLATRNVPKSELEAKSWQDDLLKKSSKLPFPVGYESNEDMTWFWQFSLYNIAINLRFFWLWIYIDYLIAIVFLRDVLQIEKQWLHNLEINNTSLLIKLWNLALELNCLASILFLHESLHKYKRRLCVQFNGLSKHTFKVYCDFRDLHWFQRFFEDQRIKKNSKNQHSSSLFTLRSGCICWQEHEGKGKEWIVNRLILYCCVDTRLWTAEGTNQVREEKAEEIAKAITRTIARGELNEKQLAFIRRKNSTLARINNPFPRPSQLLYKGQSHILVGVSLGLEKLATVAVVDGSTGKVLTYRSIKQLLGDNYKLLNRQRQQKHTLSHQRQIAQILAAPNQLGESELGQYVDRLLAKEIVAIAQTYKAGSIVLPKLGDMREQVQSEIQAKAEQKSDLIEVQQKYAKEYRVSVHQWSYGRLIANIQTQAAKVGIVIEEAKQPVRVSPQEKAKELAIAAYNYRQKT

SEQ ID NO: 515 - protein, 646 aa, Geminocystis sp.
MLVKNCLSIIIIVQLEDNIFSINFIKTLTIRKTICYFKVMTIKTICCQLIAPEQTRQRLWQYMAEQYTPLMTELIRQVGEHPDLSQWQDKGKMPSNIVKDLCATLKQIRPFTGLPSNFYQSAINQVNYIFASWLASQHKLKLRLNGKRYYFSMLYSDQDLVKNSGHTLTEIRSQAQIILNQISNKKTEEKHKYLFQHHRESSNILGKTAITYLIKHNQKIPTEPEHRDKFEKLYRKTQIQIEKLEKQIEARLPKGRNLSEQQWLNTLITASQNVPKDENEAKLWQKYILTDSNSLPYPVSYETNENLVWSLDEQGRLNLRFNGLGKLTFKVYCDNRQLHYFQQFLQDQTIKKSGKNKHSSGLFLLRSAMLVWKPNESKGKSWNKNTLHLHCAIDTRLLTLEGTQEVREEKLTQVTNIIQSMEKKPSLNDNQKQCLKRKKTSQKNLHESFLRPSRAKYQGNPNIIVGVALGLKHPVTVSIVDMATQKVIAYRSTKQLLGKNYKLLNRYKVQKQRQAHQRHVNQRQSSSVSFGDSNQGKYLNDLLVGAVMDLATQYQAGNIVLPKLDHIREIVESEIKVKAEKKIPLSVDLQKKYAKTYRMSVHQWGYGLFIDGLQNQAKRLSISIEERKQPIRGSPQEQSRDLVLGK

SEQ ID NO: 516 - protein, 719 aa, Tolypothrix sp.
MCFIDERMSQITIQCRLVASESTRQQLWKLMAEKNTSLINELLVQVAQNPEFETWRQKGKHPSSIVKELCQPLKTDPRFIGQPARFYTSAIATVNYIYKSWFALIKRSHFQLEGKIRWWEMLKSDTELVELSGMTIESLRSKAAEILAQFTLKSDTVEAKPATENKRKKTKKSKASDSDRSMSKTLFEAYHDTKDILTSCAISYLLKNGCKINDKEEDTQKFAKRRRKLEIQIERLREQLEARIPKGRDLTDAKWLETLLLATRNVPKSELEAKSWQDDLLKKSSKLPFPVGYESNEDMTWFWQFSLYNIAINLRFFWLWIYIDYLIAIVFLRDVLQIEKQWLHNLEINNTSLLIKLWNLALELNCLASILFLHESLHKYKRRLCVQFNGLSKHTFKVYCDFRDLHWFQRFFEDQRIKKNSKNQHSSSLFTLRSGCICWQEHEGKGKEWIVNRLILYCCVDTRLWTAEGTNQVREEKAEEIAKAITRTIARGELNEKQLAFIRRKNSTLARINNPFPRPSQLLYKGQSHILVGVSLGLEKLATVAVVDGSTGKVLTYRSIKQLLGDNYKLLNRQRQQKHTLSHQRQIAQILAAPNQLGESELGQYVDRLLAKEIVAIAQTYKAGSIVLPKLGDMREQVQSEIQAKAEQKSDLIEVQQKYAKEYRVSVHQWSYGRLIANIQTQAAKVGIVIEEAKQPVRVSPQEKAKELAIAAYNYRQKT

SEQ ID NO: 517 - protein, 682 aa, Cyanothece sp.
MTLKTLECRLYAPSDTLRYLWLLMAEKNTPLINEIINHLSEHPDFDQWFKAKQIPKSAISDICNDLKSQENYQNQPGRFYSSAISLTHYMFKSWFAVHKQLQRRIEGKRRWLNLLKSDQELEQNCGQSLEIIIQKAEEILKLMDSEKSQSSSKPKKPKKPKKKKKSSSEETITLFDRLFKAYNQGNDSLESYALAYLLKNNGQIPEDDEDLDKFALRKRKKEIEIERLQQQLENRIPLGRDLTGELWQEMLTIVNESIPQDENEASAWQAKLLKKSHNIPYPVAYETNTDLKWSKDSRGHLLVTFNGLVESLKKLNLNPEFEIRCDRRHLPWFQRFCKDQEIKANNDQHSSALFVLRSARLIWREGQGKEDPWKIHQLYLQCSVETQLWTEAGTKQVQSEKMVEFQLNQLRMKPELTFPIFFRSQSLPTYFNLWKVITSYRILKFLEKGDFTKAQKNFQDAIKRTESCLENLQSSYLTSQKSLYQGNPEIIMGVAMGLSQPATIAVVNVVTQEVLTYRSLKQLLGKNYNLLNRQRQQKQKLSHQRHKAQKKDAFNQYGESELGQYVDRLIAKAIVQVAKEYQADSIAVPKIRQMREIIQSEVQARAERKIQGYKEGQKKYAQQYRENVHQWSYGRLIESIHQASAKFGIRVEIASQSYQGSFQEQAQNLAIAAYTNRLEAVG

SEQ ID NO: 518 - protein, 637 aa, Microcoleus sp.
MSIITVQCQLKATKDSLRHLWSLMVEKNTLLVNELLKQINTHPDLENWLKVGNIKAEVIEGLCDNLRTESRFQDMPGRFANAAEKLVKDIYKSWFALQEERRFRLWRKQRWFSLLRSDLELEQESGLSLEKLRTEATKILIKAQLECSREAEPDQATTDNSSALWDNLFTAYDKFKSPRLRCVIAYLLKNGCQVNKVEEDPEAYQRRRRKKEIQIERLKEQLKSRLPKGRNLSEQEWLEALEQAQGLIIDDEHLRQVQASLTRKQSPVPFSISYETSTDLRWSSNEQGRICVSFNGKGISKHTFEVFCDQRQLHWFERFYEDYKIFTQNKDQVPAGLLTLRSARLVWQEGEGEGEPWQVHRLLLHCSVETRLWTAQGTEEVRAEKIAQTQAAIDRQKAKGTQSKKLNTSLERLKTFQGFSRPSRASYKGNCSIVIGVSFGRAKPATVAVVNVETGEVLAYRDVKQLLNKPIKEGKTKKKKTQYEYLKRRQEQQRLNSHQRHNAQKNGAPCNFGESKQGEYVDRLLAKAIVEVASQYRASSIVLPDLRNIEEAAESEVRARAEQKFPGNQKLQDSYAKDYRASIHCWSYSRLAQCIELKAGKAGIATEKVHQPHGDTPQEKARDLVLAAYANRKVSVS

SEQ ID NO: 519 - protein, 643 aa, Cyanothece sp.
MSMYTIHCHLTASEPVRRHLWYLMAGSNTPLVNNLLKLVSQHPDFETWQRKGDISKSSVEALCEPLKETYPGQPGRFYSSAILRVTYTYKSWLALQKNRRYRLEGKQRWLHVVESDSELLHRSGSSIETLKYRAQDILVQLNVEQQTQKTSVTDISTITPEETPSSKNESLFPSLFRAYDSEDDILSRCAIAYLIKNGGKIPETEEDQEKFTQRVNSKREEIEQLEIELSARYPKGRDLTGEEFLETLAIATQQLSETVAQAREWNDKILTQPKFMPYPIIYGSSTDVRWRKTSKSRITVSFNGIDKYLKAADPEIKAWFKDHQEYPFRLHCDERQLPFFQRFLEDWQFYQANKETYPAGLLTLSSTLLGWREGEGKGDPWNVNRLALYCTFDTRLMTAEGTLDVQKEKSEKALKNLAKAKPDPRNHSTLDRLKNLPVRPSRTPYQGNPEILVGLRVGLTNPITAAVVNGRTGEVLTYRTPSTLLGDRYDLFNRHRHQQEQNALERHKYQKRGVTYQPSESELGKYVDRLLAKAIIELAQTYKAGSIVIPCLTHLREILASEIAARAEEKCPGSVEAQDNYAKEYRRKIHNWSYNRLISAICSKAEQLGIIVESGFQPYEGDSYQQAKDLAIAVYHSRQLALK

SEQ ID NO: 520 - protein, 671 aa, Scytonema sp.
MSRNSKKDFKSPILRTIRCHLYASEDVLRKVWEEMTQKNTPLIVQLLKSVSEQPEFEANKENGKITKKEITELRKSLTQDSDLDKQSGRLRSSADTFVTEVYSSWLTLYQKRKSQKERKEYFLNNILKSDFELVEESNCDLQTIRFKAQEILSQPEKLLQQIIIENGNKAEINSSRKKGIKNSNNQNSNTKENANEGNSKTLTDILYEIHKKTRDIVTQCAVAYLIKNYNQVSELEEDIQKLKKRRSQKEIEIKRLEKQIKNNQLPNGRDISGKTYIQALDNLINQVPNDNEEYANWLACLSKKISALPYPIDYLYGDLSWYKNEEEKIFVYFNGWADYHFQIHCNKRQRHFFERFLEDHEAFKKNEKSEEKLSGGLITLRSAQLLWQQGEGKGEPWKVHKLALHCTYDARLWTAEGTEEVREEKTDKTQKQVIKGEENENLDKKEQTQLKKNKSSLSRLNNSFTRPSKLVYRGQPHIIVGVSFHPVELATVTVVDVNTKKVLTNKTVKQLLGDDFDLLSRRRRQQVHLRKEREKAQKKDSPCNIGESKLGEYVDKLLAKRIVEVAKYYQASCIVLPTLKDTREIRTSVIQAKAETKFPGDVNAQKLYVKEYNRQIHNWSYTRLQESIKLKAAESKISIECGIQPHYDTLQEQARDLALSAYQCRINTIGR

SEQ ID NO: 521 - protein, 679 aa, Nostoc sp.
MSSDRKKKSTIPVHRTIRCHLDASEDILRKVWEEMTQKNTPLILKLLKSVSEQPEFEANKEKGEITKKEIVKLRKNVTKNPELEEQSGRLRSSAESFVKEVYSSWLTLYQKRKRQKEGKEYFLKNILKSDVELIDESNCDLETIRSKAQEVLSQPEEFIKQLTINDEDVKPTKSARKRVNKNINNKSTDAEQRKDSSSTNNVDKNKLETLTNILYEIHKQTQDILTRCTVAYLIKNHNKISNLEEDIQKLKKRRNEKIVQIKRLENQIQDNRLPSGRDITGERYSEAFGNLINQVPKNNQEWEDWIANLSKKISHLPYPIDYLYGDLSWYKNDVGNIFVYFNGWSEYHFKICCNKRQRHFFERFLEDYKAFKVSQKGEEKLSGSLITLRSAQLLWQQGEGKGEPWKVHKLALHCTYDSRLWTAEGTEEVRKEKTDKAQKRVSKAEENEKLDDIQQTQLNKDKSSLSRLKNSFNRPGKLIYQSQSNIIVGISFHPIELATVAIVDINTKKVLACNTVKQLLGNAFHLLSRRRRQQVHLSKERKKAQKKDSPCNIGESKLGEYIDKLLAKRIVEIAKFYQAGCIILPRLKDMKEIRTSAIQAKAEAKIPGDVNAQKLYVKEYNRQIHNWSYNRLQESIKSKAAEFKISIEFGIQPHYGTLEEQAKDLAFYAYQSRNHTLGR

SEQ ID NO: 522 - protein, 641 aa, Cyanothece sp.
MYTIHCHLTASEPVRRHLWYLMAGSNTPLVNNLLKLVSQHPDFETWQRKGDISKSSVEALCEPLKETYPGQPGRFYSSAILRVTYTYKSWLALQKNRRYRLEGKQRWLHVVESDSELLHRSGSSIETLKYRAQDILVQLNVEQQTQKTSVTDISTITPEETPSSKNESLFPSLFRAYDSEDDILSRCAIAYLIKNGGKIPETEEDQEKFTQRVNSKREEIEQLEIELSARYPKGRDLTGEEFLETLAIATQQLSETVAQAREWNDKILTQPKFMPYPIIYGSSTDVRWRKTSKSRITVSFNGIDKYLKAADPEIKAWFKDHQEYPFRLHCDERQLPFFQRFLEDWQFYQANKETYPAGLLTLSSTLLGWREGEGKGDPWNVNRLALYCTFDTRLMTAEGTLDVQKEKSEKALKNLAKAKPDPRNHSTLDRLKNLPVRPSRTPYQGNPEILVGLRVGLTNPITAAVVNGRTGEVLTYRTPSTLLGDRYDLFNRHRHQQEQNALERHKYQKRGVTYQPSESELGKYVDRLLAKAIIELAQTYKAGSIVIPCLTHLREILASEIAARAEEKCPGSVEAQDNYAKEYRRKIHNWSYNRLISAICSKAEQLGIIVESGFQPYEGDSYQQAKDLAIAVYHSRQLALK

SEQ ID NO: 523 - protein, 678 aa, Nostocales sp.
MSRDRQKKSTSPIHRTIRCHLHASEDVLRKVWEEMTQKNTPLIVQLLKSVSEQPEFETNQEKGTISKKEITKLRKALTNDSDLQQQSGRLGSSADSLVTEVYTSWLTLSQKIKKQKEGKEYFLNNILKSDVELVQESNCDLQTIRCKAQDILSQPKEFLEQITNHDAVLNQTKSARKKVQNSSNEINASKQRENSDYQENVDKNIPETLTEILYKIHKITQDILTQCAVAYLIKNHNQVSDLEEDIKKLKKRRTEKQVQIKRLEEQIQKNKLPNGRDITGERYNHAFDNLINQVPQNNEEFAEWIASLLNKVSDLPYPIDYLYSDLTWYKNEQRKICVYFNGWAKFHFQICCNKRQLHFFKRFLEDYKALKESEKGEIKLSGSLVTLRSVQLLWQQGEGAGEPWKVNKLALHCTYDARLLTAEGTEEVRQEKTDTTQKQVTKAEGNENIDSDEQKNLNRNISSLSRLNNSFARPSKPIYRGQSNIIVGVSFHPVELATLVVVDIITKEKIICKTVKQLLGDAFSLLSRRRRQQVHFRKEREKAQKKDSPCNMGESQLGEYVDKLLAKRIVEVTKEYKASCIVLPRLKDTREIRTSVIQAKAEAKFPGDVNAQKIYVKEYNRQIHNWSYGRLQESIKSKAAEFKISIEFGMQPSYDNLQEQAINLALSAYQCRINTIGR

SEQ ID NO: 524 - protein, 665 aa, Nostoc sp.
MSSTSGKNLTNPIFRTISCDLSAKEDVLRKVWEEMSQKNAPLIVQLLKSVSEQPEFEANKENGTITKREITKLRRDITENSDLKEQSGRLRSSADSLVTEAYSSWLRLYQVRKNQKEGKEYFLKNILKSDVELVEQSNCDLQTIRCKAKEILSQVEEFIEQIKNKPKINQTKLAKKKNNKSNKSNKAIDKILNRFFIGNLDKTLTNTLYEIHRKSPDSLTQCAVAYLIKNDNKVSEAEENFTQLNKRRAAKEIEIKRLETQIQNTRLPIHYGRDITGEKYSQAFEKLVNQVPQDNEEFAEWIAILLKKVSSLPYPILYCSGDLSWYKDEKGNIFVYFNGWAEYHFQICCDKRQLRFFERFLKDYKALKPSKKEEEKVSGSLVTLRSAHLLWRQGKGKGEPWKVNKLALHCTYDARLWTAEGTEEVRQEKTDKAQAKVNKAESNENLNSEQQKELTKNKSSLSRLKNSFARPSKPLYRGQSNIIVGISFHPVELATLVVVDINTKEILICKTVKELLGDAFPLLSRRRRQQVHFRKEREKAQKKDSPCHLGESKLGEYVDRLLAKRIVEVAKEYQASCIVLPGLKGIREIRTSAIQAKAETKFPGDINVQELYVKEYNRQIHNWSYSRLQESIKSRAAELKITIKFGKQPSHSTLQEQAINLALSA

SEQ ID NO: 525 - protein, 584 aa, Geminocystis sp.
MAEQYTPLMTELIRQVGEHPDLSQWQDKGKMPSNIVKDLCATLKQIRPFTGLPSNFYQSAINQVNYIFASWLASQHKLKLRLNGKRYYFSMLYSDQDLVKNSGHTLTEIRSQAQIILNQISNKKTEEKHKYLFQHHRESSNILGKTAITYLIKHNQKIPTEPEHRDKFEKLYRKTQIQIEKLEKQIEARLPKGRNLSEQQWLNTLITASQNVPKDENEAKLWQKYILTDSNSLPYPVSYETNENLVWSLDEQGRLNLRFNGLGKLTFKVYCDNRQLHYFQQFLQDQTIKKSGKNKHSSGLFLLRSAMLVWKPNESKGKSWNKNTLHLHCAIDTRLLTLEGTQEVREEKLTQVTNIIQSMEKKPSLNDNQKQCLKRKKTSQKNLHESFLRPSRAKYQGNPNIIVGVALGLKHPVTVSIVDMATQKVIAYRSTKQLLGKNYKLLNRYKVQKQRQAHQRHVNQRQSSSVSFGDSNQGKYLNDLLVGAVMDLATQYQAGNIVLPKLDHIREIVESEIKVKAEKKIPLSVDLQKKYAKTYRMSVHQWGYGLFIDGLQNQAKRLSISIEERKQPIRGSPQEQSRDLVLGK

SEQ ID NO: 526 - protein, 617 aa, Cyanobacterium sp.
MSLKTIRCRLVAPEESRKAIWTLMAERNTPLVNEVLRRVPEQTDFAKWQKSGRLPDRSVAQIVESLKTDPRFIDQPAWYYISAKKQVAYTFRSWLKLQHRKQWKLEGKRRWLSILQPDSELAKQANYTLAELRQAATRILNQIDALEPFKYLLCDYGRSKSAKRRSTLAYLLKRNAQLVPEVENLDKLRKRHHKTEIAIQRLEIQLQASLPKGRDLMESAHIEALVQSIQSPPLEDKDFVTWQQNLTRKPAKLPFPVIYETVESLTWAHDDKGYLLVRFQGKGTGEHVFRVYCDKTHQHWFERFLDDQETKRTSGDKHSAGLFTLRSAKLSWVVSKTHLHEAEPWNRYHLCLLCTVDTRLWTMEGTQLVKAQKAAGTAAKLQSRRAKEGLSKNQQADIRRLESTLERLEVPYSRPSRMLYQGTDNILVGISMGLDQPATVAVVNVSTQEMLAYRSTKQLLGDKYKLLNRARTERARIAHQGHRQRLKGGKRINSESQLGVYIDRLLAKAIVEVAQQYQAASIVLPDLKDIREIVEAEVGQRAAVRVPDFIDGQRRYAKAYRAQVHQWSYRRLQAAITSKAEQSGLVVETVRQQCIASDQEKAKALALKAYTNRVNVV

SEQ ID NO: 527 - protein, 665 aa, Nostoc cycadae
MSAIYRTIRCYLYASEDILRKVWEEMTQKNTPLIVQLLKLVSEQPEFEANKENGTITKKEITELRKPLTDDSDFQEQSGRLCSSADSLVKEVYSSWLKLYQQRKKQKEGKEYFLNNILKSDAELVQESQCNLQTIREKAQEILNNPEKFSEQVTNNQNVKQKKSLRKKSNNDNKEIKQSKNQAYKENEDESSPNTLTDILYKIHREAQDILTRCAVSYLIKNNNKVSDIEEDITQLEKRRIQKQVEIKRLEEQLKNSKLPKGRDITGTKSSQAFNNLINQIPKDDEEFAEWVATFLRKISKIPYPIDYGSSDLSWGKDKKGNIFVYFNGWAKYHFQICCNKRQLHFFERFLEDYKAFKASEKGEEKLSGSLVTLRSAQLLWQQGEGKGEPWKVNKLALHCTYDARLCTAEGTEEVRQEKTDKAQKEITKAETHENLDSNEQKKLNKNKSSLSRLKNSFARPSEPTYRGHCNIIVGVSFHPTELATLAVVDVNTKKILVCKTVKELLGNSFRLLSRRRRQQVHFRKEREKAQKKDSPCNIGESQLGEYVDKLLAKRIVEVAKTYKASCIILPRLKDATEIRTSVIQAKAETKFPGDVNAQKLYVKEYNRQIHNWSYSRLQESIKSKAGELKISIEFGIQPSYDTLQEQARDLALSAYQCRINTIDR

SEQ ID NO: 528 - protein, 678 aa, Nostocales sp.
MSRDRQKKSTSPIHRTIRCHLHASEDVLRKVWEEMTQKNTPLIVQLLKSVSEQPEFEANQEKGTISKKEITKLRKALTNDSDIQQQSGRLGSSADSLVTEVYTSWLTLSQKIKKQKEGKEYFLNNILKSDVELVEESNCDLQTIRCKAQDILSQPKEFLEKIINNDAVLNQTKSARKKVQNSSNEINASKQSENSDLKENVDKNIPQTLTEILYKIHKITQDILTQCAVAYLIKNHNQVSDIEEDIKNLKKRRTEKQVQIKRLEEQIHNKKLPNGRDITGERYNQAFDNLINQVPQDNEEFAEWIASLSTKVSHLPYPIDYLYSDLTWYKNEQEKICVYFNGWAKFHFQICCNKRQLHFFKSFLEDYKALKESEKGETKLSGSLVTLRSVQLLWQQGEGAGAPWKVNKLALHCTYDARLLTAEGTEDVRQEKTDTTQKQVTKAEANENIDSDEQKNLNRNISSLSRLNNSFARPSKPIYRGQSNIIVGVSFHPVELVTLAVVDIITKEKIICKTVKQLLGDAFSLLSRRRRQQVHFRKERKKAQKKDSPCNIGESQLGEYVDKLLAKRIVEVAKEYQAICIVLPTLKDTREIRTSVIQAKAETKFPGDVNAQQLYVKEYNHQIHNWSYSRLQESIKSKAAELKISIEFSIQASYDTLQEQAINLALSAYQCRINTIGR

SEQ ID NO: 529 - protein, 692 aa, Nostocaceae sp.
MILVTQIEKGVFAGDIVTMSRDRKKGSKSPSLRTIRCHLHTKEDVLRKVWEEMTQKNTPLIVELLKSVSEQPEFETNKENGKITKKEITNLRKSLTQDSGRLYSSVDNLVQEVYSAWLTLYQKRKKQKEGKEYFLNNILKSDIELVEESNCDLQILRAKAQEIISNPQDILRQITIDNPKDKPTKSIQKRVRKNINASNSDTAKNNILNSQEKTTEENISKSVIEILYEIHKTTQDTIIRCAVTYLIKNYTKISDTEEDLNKLKERRAEKEIEIKRLEKQIQDSRLPNGRDITGARYLEAFDKLINQVPKNNEEFANWIADASRKISNLPYPIDYLYSDLTWYKNQDGKIFVYFNGWSKYHFQICCNKRQRHFFERFLEDHKAWKESEKGEVKLSGSLVTLRCVQLLWQQGEGKGEPWKVNKLSLHCTYDTRLWTAEGTEEARKEKINKIQRQVEQAEETENLDEQQQKQLKKNKSSLSRLNNSFNRPIQPIYQGLSNMIVGVSFHPVELATVAVVDTTTQKVIAYKTINELLDNAFHLLSRMRRQQIHFRKERKKAQKKDSPCNLGESKLGEYVDKLLAKRIVEVAKEYQAICIVLPKLKDMKEIRTSVIQAKAETKFPGNVNAQKLYVKEYNRQVHNWSYNRLQESIKSKAAELKISIEFGIQLSYDTLQAQARDLALSAYQCRIHTIDR

SEQ ID NO: 530 - protein, 674 aa, Nostoc sp.
MSRDRKKGSKSPSLRTIRCHLHTKEDVLRKVWEEMTQKNTPLIVELLKSVSEQPEFETNKENGKITKKEITNLRKSLTQDSGRLYSSVDNLVQEVYSAWLTLYQKRKKQKEGKEYFLNNILKSDIELVEESNCDLQILRAKAQEIISNPQDILRQITIDNPKDKPTKSIQKRVRKNINASNSDTAKNNILNSQEKTTEENISKSVIEILYEIHKTTQDTIIRCAVTYLIKNYTKISDTEEDLNKLKERRAEKEIEIKRLEKQIQDSRLPNGRDITGARYLEAFDKLINQVPKNNEEFANWIADASRKISNLPYPIDYLYSDLTWYKNQDGKIFVYFNGWSKYHFQICCNKRQRHFFERFLEDHKAWKESEKGEVKLSGSLVTLRCVQLLWQQGEGKGEPWKVNKLSLHCTYDTRLWTAEGTEEARKEKINKIQRQVEQAEETENLDEQQQKQLKKNKSSLSRLNNSFNRPIQPIYQGLSNMIVGVSFHPVELATVAVVDTTTQKVIAYKTINELLDNAFHLLSRMRRQQIHFRKERKKAQKKDSPCNLGESKLGEYVDKLLAKRIVEVAKEYQAICIVLPKLKDMKEIRTSVIQAKAETKFPGNVNAQKLYVKEYNRQVHNWSYNRLQESIKSKAAELKISIEFGIQLSYDTLQAQARDLALSAYQCRIHTIDR

SEQ ID NO: 531 - protein, 640 aa, Nostoc cycadae
MTQKNTPLIVQLLKLVSEQPEFEANKENGTITKKEITELRKPLTDDSDFQEQSGRLCSSADSLVKEVYSSWLKLYQQRKKQKEGKEYFLNNILKSDAELVQESQCNLQTIREKAQEILNNPEKFSEQVTNNQNVKQKKSLRKKSNNDNKEIKQSKNQAYKENEDESSPNTLTDILYKIHREAQDILTRCAVSYLIKNNNKVSDIEEDITQLEKRRIQKQVEIKRLEEQLKNSKLPKGRDITGTKSSQAFNNLINQIPKDDEEFAEWVATFLRKISKIPYPIDYGSSDLSWGKDKKGNIFVYFNGWAKYHFQICCNKRQLHFFERFLEDYKAFKASEKGEEKLSGSLVTLRSAQLLWQQGEGKGEPWKVNKLALHCTYDARLCTAEGTEEVRQEKTDKAQKEITKAETHENLDSNEQKKLNKNKSSLSRLKNSFARPSEPTYRGHCNIIVGVSFHPTELATLAVVDVNTKKILVCKTVKELLGNSFRLLSRRRRQQVHFRKEREKAQKKDSPCNIGESQLGEYVDKLLAKRIVEVAKTYKASCIILPRLKDATEIRTSVIQAKAETKFPGDVNAQKLYVKEYNRQIHNWSYSRLQESIKSKAGELKISIEFGIQPSYDTLQEQARDLALSAYQCRINTIDR

SEQ ID NO: 532 - protein, 563 aa, unidentified
MSQKTIRCRLVAPESTREAIWQLMAERNTPLVNEVLRQLPENSDFSKWQRRGKLPDLPVKQLVDGLKSDPRFSDQPVWYYISAQKQVTYTFKSWLSLQKRKQCRLEGKRRWLDILRTDSELAGEAKCSVGALRSAASNILKKVDDSDPFKLLLKEYGTSKSAKRQCALAYLLKRDAKLDPEEEDLEKLGQRHSKAEIQIKRLETQLKASLPKGRDLTGQIRAEALTQSVQSPPLDDEAYSAWHASLTREAATLPFPIIYETVESLVWFKDTKGRYSVCFQGQGTSAHTFKVYCDKPHQQWFDRFWIDQETKRSGGERHSAGLFTLRSARLSWIPSKKHQNEPEPWNRSYLNLSCTVDTDLWTQEGTQNVMQEKAAATASKLQSMQEKESLDKNQQGYVRRLESTLTRLQTPYPRPSRALYQGRSDILVGVSMGLDKPATVAVVNALSGEVLTYRSTKQLLGEQYPLLQRARSERTKVAHQGHRQRRKGGKRVNQESNLGKHVDRLLAKAIVEVAHKYQAGSIVLPDLAHIREIVESEVKQRAAEKVPDFIDGQKQYAKAYRVQ

SEQ ID NO: 533 - protein, 660 aa, Cyanothece sp.
MTHITVVQCRLIAPESTLQHIWKMMAQQQTPLINQLLHDINTHPDINTWLTANQLPSKLVETLAQPLKTQSPYQGLPGRFITSAIILVKEMYASWFAIQTQKRLSLEGKKRFLTILKSDKQLIQDSQTDFLTLCYKAQQLLKRTQNKLKLDEPQHSEKAHWSIINALYPAYNNAKTPISRAAFALLIKNNGQVPDTPENPDYYQQRRKRKEIQIRRLEEQLKASLPKGRILDSKHWENTLKLAQTPITTIEEITSLQTQLLQKYSHLPFPVFYGTNTDLTWFKNPQGRICVKFNGLNQYPFQIACNKRQYPWFQRFFTDYQSYKSHKQQVPTGLMVLRSARLLWQPTNGQGEPWNTHHLSLHCAIDNDLWTISGIQQVKQQKILQTEQKIANFHSKALEKELTPNQQQRLKASQTSLNLLKTFDINEFFPSKCSLYQGSPDIILGVSIGLENPATIAIINISTQEILTYRTTKQLLSRTRKVRNKKPNSNNSNQSLSSAYKQISNYELFLQYQQQKHHNQHQRHNAQINDANNNYGEANLGLYLNRLLAKAILELAQQYQVSLIILPSLKNKRELIESEIRAKAELKYPGCKEKQDSYAKDYRTNVHQWSYQQLIKCIESKAAQIGIDTATGKQMNLETSQDQARNLVLNFCQKFSPTQV

SEQ ID NO: 534 - protein, 659 aa, Phormidium tenue
MSIITIQCRLTASVATRQHLWNLMAHSNTPLVSELMRIIPLQPDFENWRQASKIPAKAIRDLCASFRKDERFAGQPGRFYSSASTMVAYTYDAWFALQASRLRRLYGMRRWLEILQSDTEMLKLCGVSWESFQERARAILQTATDQIQAKQPTPQPARRGNKKQRKQSDKIVSRRRLVDRLFQLYNESPETLDRCAIVRLLKNGCTVPEQAEQPERYQRMLLAKQTGVSRIERELASRLPKGRDLTDENFLNALELLTYQIPTSTEEFAQWKSQLLREPNPLPYPVLYSGNLNLTWFVEEVPRGKSQKPKQQICVKLNGLAKHVLKVQCDARQHHYFQRFVQDWDIYNRGKGPISGSLLLLRTASILWKPVQQSRHRATGEPWSDHSLYLHCQIDTKLLTQEGIEEKRQKKLASAQSSEQTRHATPVQAARQQGSLDRLQRSAQHPIHLPSRTPYQGQPQIILGVSFNLKHPVTVAVVDVQSQEVVKYHSSRQLLSTTDPKTDQSHLPQQQMAQQQSHDHERHKALKKDHYAPYKEANLGAYLNQVLAKRVVDIAIQFRVSSIVLPDTKGLRDKLEAQLRAKAASKIVGSVAAQKRYARTASIRLHHWSYNQLAELIKNRAAKLGIPVEVVPGLVADSPQATARDVVFSAYYRRQSASK

SEQ ID NO: 535 - protein, 453 aa, unidentified
MTRGAIAYLLKNGGKLPDKPEDLKKFVKRRRKAEIRVERLTSTLKRMRLPSGRDLTDQAWVKTLATAAFDVPENEEEAALWQAVLLSETRKLPFPITYETNGDLTWFLNDNGRLCVTFNGLSEHPFEIYCDQRQLHWFKRFLEDQEVKKASKNQHSSGAFTLRSARIAWQAGKEQGDPWKVHHLVLFCTVETRFWTAEGTQQICEEKAAEYAKVIAGTKAKGNLNKNQEKFIRSREKTIARMQNPFPRPSRPLYQGQPTILAGVSYGLDRPATLAIVDITTGKAITYRSIRQLLGDNYQLLNRYRLRQQRNAHRRHNRQRKGAANQIQESNLGEYLDCLIAKAVVSVAKAYQVSSIVLPDLGNIREMVEAEVQARAEQRIVGYEEGQRQYAKQYRASVHRWSYGRLTEKIQSQAAQIGIMVEQAKQMFQGTPQEKAKNLVTEAYNSRKQEKSS

SEQ ID NO: 536 - protein, 434 aa, Stanieria sp.
MRQKPEDPKKFAKRRRKTEIKVERLLKKLNSQTPKGRDLTGQQWLDTLITVATHVPQDEVQAKLWQDILLTKPKSVPFPITYETNEDMTWSKNEKSRLCVRFSGLGEHIFEIYCDQRQLPLFQRFYQDQEVKKASKNLHSSALFLLRSSRIAWQEGEGKGEPWNVNHLTLYCTLGTRLLTAEGTEQVRQEKAAEIATTLTRMKEKGDLNAKQQAFVKRKQTCLSRINNPFPRPDRPLYQGQAHILLGIYMGLEKPATAAVIDAISGKVITYRSTKQLLGDNYQLLNRQRRQKSFLSHQRHLNQKHHANNQLGESKLGQHLDRLLANAIVNLAKTYQVGSIVLPKLGNMREIVQSEIQALAEQKIPGNKEGQKKYAKQYRVNVHQWSYGRLMENIKAQAAKAGIVIEESKQSIRGSPQDQAKEIAISAYTNRLNY

SEQ ID NO: 537 - protein, 453 aa, unidentified
MTRGAIAYLLKNGGKLPDKPEDLKKFVKRRRKAEIRVERLTSTLKRMRLPSGRDLTDQAWVKTLATAAFDVPENEEEAALWQAVLLSETRKLPFPITYETNGDLTWFLNDNGRLCVTFNGLSEHPFEIYCDQRQLHWFKRFLEDQEVKKASKNQHSSGAFTLRSARIAWQAGKEQGDPWKVHHLVLFCTVETRFWTAEGTQQICEEKAAEYAKVIAGTKAKGNLNKNQEKFIRSREKTIARMQNPFPRPSRPLYQGQPTILAGVSYGLDRPATLAIVDITTGKAITYRSIRQLLGDNYQLLTRYRLRQQRNAHRRHNRQRKGAANQIQESNLGEYLDCLIAKAVVSVAKAYQVSSIVLPDLGNIREMVEAEVQARAEQRIVGYEEGQRQYAKQYRASVHRWSYGRLTEKIQSQAAQIGIMVEQAKQMFQGTPQEKAKNLVTEAYNSRKQEKSS

SEQ ID NO: 538 - protein, 711 aa, Crinalium epipsammum
MSDQTSQNNEITIQSLLEAPEETLCFLWQLMVNVTELINSLLHHINTHPDFDIWLTQCAIPASVINSFIKTAKTQSPYREMPTRFITSAQNLVNEMFKSWFEIQRLKRLSLKGKRHFFTILKSDEELQRESDCTFDTLCQEAAIILQQTQLQIEQKRLDANQPPPTLDKQAFWEVAHVLYKAYDQADTPLVRSGIALLLKNQNQVPEQFEDPKKYQQRRQAKQEEIERLEHQLQSKAPKGRLTDQQEWLRILEKASQPITEVAEFRDIQAQLLRKFFALVYPVTFSTNTDLQWSTNQQGRICVQFYGMSKYTFEIACDRRQLNWFKRFLADYQLYKQHKTQIPTGLMPLRCARLVWTEGQDDFALIVATWLLIAVIQHKFYHIAWLLLKNHRIIKSPPWRVHHLHLHCIVDHRLWTQEGKEIVKAEKIPQTEKLINDFQQKERIQENGLTTGQQQRLKASETSLRLLQNCDHFAASKRISYRGQPNRILGVSIGLHEPVTIMIVNTTTGKTLASRNTKQLLDKKRRVRDQQPELPKYEERQHFTNIYKEISDYELFLFYRQQKQQHQHQRHKAQIKATPDHSKEANLGLYINRLLAKAIIEFAQQHQVSTIILPDLKNKRESIESEAKALAKLKIPKDKSRQQQYTRNILSEVSQWSYKQLSDCIINKASQSGIAIEIIQQISQGNPYQKARNLITTFTKNSGNKCSAKIE

SEQ ID NO: 539 - protein, 453 aa, Geminocystis herdmanii
MIVYLIKNGSRIPKNNIETTKKYKRIKRKLEIKIRKLKRQVEMSIPSGRDLEGEKWLQTLILASNTMPVDQNESDSWFSALKRNSPSIPYPIVYETNEDLKWCLNDQNRICIKFSGLSDHLFLIYCDSRQLPYFRRFYEDQELKKASKDQFSSALFTLRSAMIIWKEDDGKGESWDKHKLYLHCTFDTDYWTLEGTQVIAQKKQEEVLNLIDRMKEKTDLTDTQKAFIQRKQTTLARLNNIFPRPSKPIYQGNPNLFLGVAMGLQEPVTIALVDVSTNKVILYRNIKQLLGDDYHLIRRRRNEKQKLNHQNHKARKRANFQQKGESNLGEYLDRLIAKSILQIAEEYQVSTIIVPRLNQIRSITEAEIQARAEERIPEYKEGQRKYAQDYCVQVHQWSYGRLIDNIKAISSKLGIVVEEGKQPKQGKFTDKALQLALSTQKNNRQNNPTKTNS

SEQ ID NO: 540 - protein, 697 aa, Cyanobacterium sp.
MDQVIPGYMKTILCCLCVKVETRRFLWNAMVTYTALVNELLELVSQHPKFEVWRQQGKITRDEVKSILRPLKQNSVYAALPGRFFTSAELMVTYAFKSWLALQKHRHHQMVGKLRWLQVIEADLQAMPTSDLSLEVVQARAQQVLEHAEQSTDTQQGRSSFLSRKGKRRGNPLMGFLLDAYEAASDELERRAICYLLRNDLKVVEEDENPEVIQFRIDRKRIEVERLQDQLQSRLPKGRDPTDERYLEALGAAIALPDVDLSPIDEEDWSQWKAQKQLPLLNPLPYPILWGSSSDLRWSIIANSEADGQPSKRRKSSKRPKEKIQVQFNGLGKHTMSIQCDRRQLPVFKQFAEDYITHESTAEEDKFGMSLFALRSACLVWKKDPQAAVKRRKHKQKAKAQLDKITDYDAPWQTHRLYLHCTVDTRLITKEGSEQVRREKASRAEKLVAASVGKELTKTQQKNLKSNKTSVERLRRQPPERPSANLYHGNPDIVVGISLSRHEPVTAVVLDRSTDRALACQRTKALLKVRSIKKTYPNRSLLQRQKEQCRLVNRWRSQRRYNLSQRPEDQKHDNYRQQDAESALGDYLDRLLAARVIQLAQKWQAGSIVLPSLGNIREIVESSVQAEAERRYPKHKELQDKYAKQYRLEFHRWSYGRLLKYLKECARQHGLTIRQERQPKQGSEQEKALALIASAFL

SEQ ID NO: 541 - protein, 637 aa, Cyanobacterium sp.
MAHLNTPLVTELMQVIQHHNDFVNWQQRRELPMQVVRNLCTSLRLDERFSGQPGRFYSSAAMMVAYTYDAWFALQSSRQQGLDGLKRWIDILKSDADMLELCGLDWKSFQASAKEILQSVTDQLQSDQPKPSPSHKGSQQRREQSDRTVSKRQLVNQLFQLHDESPSLLTRCVAVYLLKNGCAVLEKPEKPERYQRMLLGKKKAAKRLEEQLASRLPKGRDLTDETFLKALELLTYQIPNSAEELARWKAQLLRKPNPLPFPILYGSNNDLTWFVKEKPRGKAKPPKQQICVKFNGLGKHVFRVQCDRRQHHYFQRFVQDWEVYKCGKGPISGSLLLLRTASLLWKPANQSSHQPTGNPWQDNYLYLHCQIDTQLLTREGIEQKRQKKLNSTQNPDLSPSDPASKAARQHQGHVKRLQPIEQYPIPLPSREPYEGQPHLILGVSFALQHPVTLAVVNLQSKQSLYYRSTRQLLKTTDAKTDQSHLLRRRKTQQQRHSYERHKALKREQYAPYQEANLGTYLNQVLAKRVVDVAYQAQVSAIVLPETKGLRDKLEAQLRARAATKIVGSVAAQKRYARAASLRLHHWSYNQLAELIKSKAAKLGIPIEIVPALVADSPQEIARNIALSAYYRRQAAAK

SEQ ID NO: 542 - protein, 393 aa, Euhalothece sp.
MTGEQWLETLITAANTVPKDKEEFKSWQNILLTKPKSIPFPISYETNEDLTWSKNEKGRICVKFSGLGDYTFQIYCDQRQLKWFQRFYEDQETKRASKNQHSSSLFTLRSARILWQEGTAKGQAWHRNYITLYCTVDTRLWTAEGTEQIKEEKAEEVARILTNMKDKGDLTKTQEAFIKRKQTTLDRLNNSYPRPSKPLYQGQSHLLLGVAFGLEKPATIAIINGSTGKAITYRSIKQLLGENYKLLNRHRKQKQVQSHQRHKNQKKFAPNQLKNSELGEYIDHLIAKAIVNIAQEYKVGSIVIPKLENIRELIQSEVKMRAEKKVPGYLEGQKKYAKQYRIEVHQWSYGRLIETTKSKANQGGIPIEQSKQPIRGSPQEEAKEIAILADQAR

SEQ ID NO: 543 - protein, 753 aa, Geitlerinema sp.
MPIITVECLLAASEETRQYVWSLMVQHAVLVRELLERAAQHPDFERWQSAGNLPAKAVERLAKESSNEEPPLLLEPRFSQLPDRFYKSAISTVQTTYKSWLALQHGRQQQRNRKQLWLDIVEDDLLTEYDESQLDSIIKKAHEILSQLLSEMKKEANETSEDKKVRRKKATKKKDKAQTDSEEMQEERKFISIYKLNKLYNSSTDAVTRRAIAHLVRNHSQVNEEEDPDKIPLEIEKTRIEIERLDQQLKSQLPKGRDPFGTQYQKNLEFATELPSKLSTSEEDVSEFIKWNAEEGQRRIAVMRLPKSLPYPISFGSNTDLRWFQETQERKTLKGKKTNKPRNQIIVRFQGLKNHSFKILCDRRQLPHFQQFVTDWKTYQELDRKGKADSEKCSASLFLLRSARLIWREDNRVPPKSLRKKKGKQKNNAVVASGKNVGSSSDNRKTEPWNTHRLYLQCSIDTRLLTAEGTEEVRQEEIGQIIKQLEGDSKDSRKKKAVTDNQELTAGQMADRKRKSSTLTRLNNKSAFSRPSKKPYQGQPDIVVGVSFSRHKPATAVVWDAKEDKILETQTVRQLLVDRKVQDKRGNQTIVQLKFQQYRLVGRHQRLRRNRLRRRNQERSRGMYQQSKSETNLGLYVDRLLAARIVELAIKWKAGSITLPKIENIRESVESEIRARAEKKFPGLKEAQDKYAKEFRISFHQWSYGRLDTAIRSKAARVGVLIETAWQPVSGDLQDKAKDLAQAAYYTRESAER

SEQ ID NO: 544 - protein, 407 aa, Richelia intracellularis
MTCCSIVYLLKNNCQVSLLEEEPDEYAKLRRKKEIEIERLKEQLKSHIPKGRDLTGLEWSDILEKIANSTPQTENEAKLWQASLLRKSRSVPFPVAYETSEDMYWEINEQGRVFVRFNGLSKLKFEVYCDQRHVHWFRGFVEDWETKHKGKNQHSSSLFTLRSGRLVWLEQKAKGEPWNVNRLILHCSLDTRMWSHEGTQQVINEKIVKIENTLTKVKDKGELNPKQQAFVTRQKSTLARINTPFPRPSRTLYQGKSHILVGVSLGLEKFATVAVLDAIQNKVLAYCSVKQLLGNNYKLLNRQRYQKQRLSQEPHKTQKQFTPKNFGESELGQYIDRLIAQKIVANAKTYHAGSIVLPKLGYMGEIIQSEVQAKAEKKIPGYLEGQQRYAKEYRKQVHNWSYGRLIE

SEQ ID NO: 545 - protein, 807 aa, Phormidesmis priestleyi
MVASKPKPLGNKKKPDELKKRQQPKESWKTVCCCLCADESTRKFLWEAMERYTLLVNLLSKQVGHAPEFEQWKRQGWISEKAVVALCNALKQEEQFKGLPSRFYMSAQSMVKDTFEGWVKSQQRLSRKISGKKRWLKSVEEDIDLAKTTDFSPEVIQNRAKEILSELHHQETPAPQSSEISDDSPDESQQEDEDSNSQRSILSLLFDRYKVTEDYLSRRAVVHLLKNGCEVNEEIEDPEKLQQRLATKREEIQRLEAQLASRLPKGRDPTGEKANNFLKEAIQFPKHRNCYPELFLFDIFYHYALLPMPSVQYAVYLLQAILIESNVVESEFSAWQEAMTERLSNAAKIPNSLLYPLIFGSTDDLYWSFESKEKNQHDSELGKPCEGTKSRKRPSKRKRKQLKTRSEERIYVRFKGLSDYNFKIACDRRQLPIFQMFTRDWLSNKKLDKEKKSSLGLFALRSAKLIWQEDKQLLHKKGKSKQASSEELDTSSQESIPRWKTHRLYLHCSIDSDLLTAEGIEKVQPRKISETSKNLDNARKKEQELLAQVSNSNLTEQDKQELENELIKKRKKILSCKTSLVQLNNPPPRPSKVPYQGEANITLGVSFCRQELVGVAVVDLQTQQVLEYYSIRKLLTNQRVKKSRRNRSLLQLQLEKYRLVNRLRKLRRHNLVDRQEEQKQARYVESKAESNLGQYLERVIAAKIAQVALEWKASSVVIPNLGDMGEYIESAVQARAKQLFPNHRERQKNYAKQFRVGGHRWSYRRLTEFIHSRTLSEGISIKAGRQPATGSLANKALKTALSGHNFV

SEQ ID NO: 546 - protein, 668 aa, unidentified
MVTYTALVNELLELVSQHPKFEVWRQQGKITRDEVKSILRPLKQNSVYAALPGRFFTSAELMVTYAFKSWLALQKHRHHQMVGKLRWLQVIEADLQAMPTSDLSLEVVQARAQQVLEHAEQSTDTQQGRSSFLSRKGKRRGNPLMGFLLDAYEAASDELERRAICYLLRNDLKVVEEDENPEVIQFRIDRKRIEVERLQDQLQSRLPKGRDPTDERYLEALGAAIALPDVDLSPIDEEDWSQWKAQKQLPLLNPLPYPILWGSSSDLRWSIIANSEADGQPSKRRKSSKRPKEKIQVQFNGLGKHTMSIQCDRRQLPVFKQFAEDYITHESTAEEDKFGMSLFALRSACLVWKKDPQAAVKRRKHKQKAKAQLDKITDYDAPWQTHRLYLHCTVDTRLITKEGSEQVRREKASRAEKLVAASVGKELTKTQQKNLKSNKTSVERLRRQPPERPSANLYHGNPDIVVGISLSRHEPVTAVVLDRSTDRALACQRTKALLKVRSIKKTYPNRSLLQRQKEQCRLVNRWRSQRRYNLSQRPEDQKHDNYRQQDAESALGDYLDRLLAARVIQLAQKWQAGSIVLPSLGNIREIVESSVQAEAERRYPKHKELQDKYAKQYRLEFHRWSYGRLLKYLKECARQHGLTIRQERQPKQGSEQEKALALIASAFL

SEQ ID NO: 547 - protein, 655 aa, Nostoc flagelliforme
MSSNSKKDSNSQILRTIRCDLYTSEDVLRKVWEEMTEKNTPLIVQLLKTVSEQPEFEANKESGKITKKEITGLRKSLTEDSGRPYSSVDNLVKQVYSSWLTLYQKRKQQKEGKEYFLTHILKSDIELVEESNCDLSTIRSKAQEIIRKPEEFLNEINPKDTNNRQRKSSQKGRKKQHKSKEENKNFENSNTEASLTKDDSKSLTDTLYKIHRETKNILTRCAVAYLIKNDEKISNLEEENTKSLEKRRTEKEVEIKRLEKQIQNTRLPNGRDITGDTYTKAFDNLINQVPKDNDECAIWIANLLNKISSLPYPIHYVYSDLTWYKTEEGNIMVYFNGWKDYKFQICCNQRQLHLFERFLEDHKVFKKSEKSGEKLSASLFTLRSVQLLWQQKEPNKVRLRRKDKSEKVKLKYASPSPKPKSQNTTEVKNSDPNRIESEPWKVYKLALHCTYDARLWTAEGTEEARKQNVDKTQKQINQAEENENLDEQQQKQLKKNKSSLSRLNNSFLRPSKPIYQGQSNIIVGVSFHPVELVTLAVVDINTKEFILNKTAKQLLGDSSYLLSRRRRQQVHFRKKREQAQKKDSPCNIGESQLGEYVDKLLAKRIVGVAKQYQASSIVLLRSKNITEIRTSIIQAKAQTKFQGGRIMSISNTYSQ

SEQ ID NO: 548 - protein, 755 aa, unidentified
MVKYTLLVNRLLEQVGQLSEFKQWQEKGSISKEPVKQLCDALKKHHAEFQGLPHRFYISAKLMVTYTFESWLALQQRRRRKIDGKRRWLNRVEDDIELAKVTDFSPEMIQNRARKILAEIHPSNPVEPEPETSSDNEINEGENCQEEEEMNQPKSLLSCLFDLYDSTEDALTLRAIVHLLKNNGEVNEEDEDPKKLELRLAAKREEIQRLEKQLQGRLPKGRDPTGETTTRFLEEAIKLPEHPTAYPPRFLLNAFYCYALLPMPYIQYGVYLLNAILDEARIVESDFITWRDTIAEHLVNAAKRPNSLPYPLIFGSTSDLVWESESKRKGPNAPDTEGALEQSGAKSSRKRPSKRKRTRLKTQSDERITVRFHGMSQYRFKIYCDRRQLPIFRQFLTDYCTHKALDEENKFSMGLFALRSASLIWKKDKQRPHKRNSSEPVEPLSPWQTHRLYLHCSIDSRLLTAEGTEQVRFQKILQTKRKLEGAKNKEQEILRQKSERQHTESEQDLDDKLKKQRQNVARNQTSLNCLYNPTPPRPSRVRYQGNPNIAIGVSFCRQQLVGVGVIDLQTQQVQEYYSIRRLLINRKVTQVKRGRSVLQLKLKKYRLVNQLCMWKKKNITQRTQQQKQGLCIQNTTESNLRQYLERLVADRIVEVALKHQAGSIVTPQLGEIRESIESAVQAIAKQLFENHREAQQAYAKQFRMDFHRWSYGRLTDCIHSRARQEGILVQAGRQPVEGNLVGKALTIALSGRNLV

SEQ ID NO: 549 - protein, 726 aa, Chamaesiphon minutus
MSLITFPFRLDALGKTPKDREQVRRYFWELMTQQHTPLINRLNLLVAEHPKFANWQIKNTVDADDLLCLWRSLKKQPQFQGIPDRACVSARLVTHNTYESWLALQADRQEKLTKLLNSVEILKPDVELIAIGSCNLDVIRNRAKEVLSEVNTQISNDSEKKKSQKAIEGGIYKILYDKHRKTDDLVEKCAIAYLIKNRFKINSDETEEDVKKLNARRHTKQKEIEIIQKQLHSRLPKGRPWAGRDIFGEIASIDVRETEWNSIESALLKQQTFMPHPILFESSDDLIWAEPEKFQLKDLQVEAGKSGSTELDEFQNENFQGEQANSVESRKRVCVGFKSFEEKYAFEVAGDYRHIHAVWQALKERKIYDKNIDENTSALFLVRSATLIWRDYKKNENRIVRRRKANNKRSKREGGTAGTKPDSLRAPAFYDPEFPWNRYQLFLHCTIETLYVSKEGTELKLEMQKKPITKALQTLEKNITESEEKGESTKNRKDRHSRQSGTLRRMECYDDNYERPSKSLYTGQPHIVTGIALGASGLVTATIVDTSSGKILECRGRKALLGKQDRLVNRRQFQRQLNMRRRTQNQRRGANNQFGEANLGDTIDRHIANAVVDFAKTYQSGCIVLPDMEDYRRRKQSEMAALAERECSGWKGVEKKFAKAQNVKIHSWSYGRSIEYITNQAEKEGMLVKIGRQPIHGSSQEQAKQMAIEVYQDKTKFKQSLSNQSA

SEQ ID NO: 550 - protein, 813 aa, unidentified
MNELEEGAGFNETVLCKLGADEKVRQDFWQWSIKHTLLVNELLIQVSQHKDFEQWKNSGTITKKAVVELGKPFKDPEREQFIELPYRFHTSATLLVFYIYQSWLKLHQKHSYKLQGKKKWLAVLDNDLEVAKHTDFSPQMIQTQASEILSQASAQHEKSQQKRKKKSSKKSGETSKSHLAIMTILFDRHEQSQDLLERRAIAHLLKNGCQVNDAEEDLEALKLRLEKKRIQIARLEKQLERRLPDGRDPTGERFASNLAQAIAFADHLTFVPAKFWINWYQVLQRNPNDESDLVIPFLGYVYHQQAGDAGFDAWEQGDSERAALVSTLYETLPYPILFGSAGDVYWSLKQVDPNPGTTRQKQQSHRTPKRRRKPKHKQKVQERLCVRFKGEELKNHHFGVYCDRRQLPVFKQFLTDREVQKQRKDTEKFMGGIFTLRSARLVWKEDTERLQRKRASTTSLLWLKFLFAMQREETVTDKELDSWIISFLCINTIFPWQSHRLYLHCTIDSRLLTAEGTKEVIAQKTAATQQYLEQFKPETATPKPQAVERVEEERQTPQARGGTTVKKKETTLARSKNPPPARPSRLLYKGRSDIAAVVVVSRFAIVAVAIVNTQTQEILEFQKIKDLLTEHRSDVLEERLKKHQGMLKGGRSLEQLQLQQYRLVKRWRKHRKKNLTQRQEEQKRGLYKRSNQESNLAQYLNRLLAKRIVQLCQTYQVGMIVLPELGNIGENFECEIQAKARQKFPGDNVQLQKQYLKELRMRMHRWNYKNLLHAIRQYATPARIPVTTRWQPKEGALRDKAAVMARAVPPGVP

SEQ ID NO: 551 - protein, 397 aa, Geminocystis herdmanii
MGRNLTNDSWLEILNFVSDTIPQTDEEAKQWQDQLLRQSKSVPYPVMFNTNEDLRWSKNKKGRLCVTFNGLGKLVFEIYCDQRQLKWFERFYEDQEVKRKGKNQHSSSLFTLRSGMLLWQEHEGKQEPWQNNHLTLYCALDTCFETAEGTELVRQKKVKEVVNLIDAMNNKSERTKTQDAFIKRKQSTLARLDNSFPRPSKPLYQGNQNIVVAVSMSLEYPATIAVFNMSSQEVLTYRSTKQLLDNNYQVLNRQRKQKQRLSHQRHKTQRQNSSDFFTQQESELGQYLDRLLAQSIVSIATQYQASTILLPNLKNIRDSIQAEIEAKAEAKIPNCKEAQKKYLKNYRINIHHWSYGRLIDSIQLQALKLDILIQEVKQPIRGSPQEKAKQMAILTLE

SEQ ID NO: 552 - protein, 397 aa, Geminocystis sp.
MGRNLTNDSWLGMLNLVSNTIPQTDEEAKQWQDQLLRQSKSVPYPVMFNTNEDLRWSKNKKGRLCVTFNGLGKLVFEIYCDQQQLKWFERFYEDQEVKRKGKNQHSSALFTLRSGMLLWQEHEGKQEAWQNNHLTLYCSLDTCFETAEGTELVRQKKVKEVVNLIDAMNNKSERTKTQDAFIKRKQSTLARLDNSFPRPSKPLYQGNQNIVVAVSMSLEYPATIAMFNMSSQEVLTYRSTKQLLDNNYHLLNRQRNQKQRLSHQRHKTQRQNSSDFFTQQESELGQYLDRLLAQSIVSIAKQYQASTILLPNLKNIRDSIQAEIEAKAEAKIPNCKEAQKKYLKNYRINIHHWSYGRLIDSIQLQASKLDILIQEVKQPIRGSPQEKAKQMAILTLE

SEQ ID NO: 553 - protein, 364 aa, Cyanothece
MLKRLQEQINSRLPQGRDVTNENWLETLKIACCTDPENIEEARSWQDNLLTKSSSIPFPINYETNEDLTWSKNEKGRLCVQFNGISDLKFEIYCGNRQLKWFQRFYEDQQIKKSSKNQHSSALFTLRSGRILWQEETGKSQPWNVHRLTLQCTLDTRLWTQERTEEVKQEKAEEIAKVLTSMNEKGDLTKNQQAFIKRKQSTLDRLENPFPRPSQPLYQGKSNILVGVSMELKKPATIAVIDGMTRKVLTYRNIKQLLGKNYPLLNRQRRQKQLQSHQRNVAQQKEAFNQFGDSELGQHIDRLLAKAIISIAQEYQAGSIVVPKLKDIREAIQSEIQTKAEAKIPNCIEAQAEYAKKYRIQVHQ

SEQ ID NO: 554 - protein, 393 aa, Nostoc carneum
MSQKTIQCRLIASESTRQKLWKLMAELNTPLINELLEQLSKHPDLEKWRKNGKLPSNVVYQICQPLKTHPSFKGQPSRFYLSAIHVVDYIYKSWLAIQKRLQQQLDGKLRWIEMLNSDAELVEISGCSLEAIRTKAAEILAMTTLESSSNTSVTKTKNTKKSKNSNSSASNSDRSLSHKLFDAYQETDDILSRSAISYLLKNGCKLNNKEEDPEKFAQRRRKVEIQIQRLTDKLTSRIPKGRDLTNSKWLETLFTATTTVPEDNTEAKRWQDILLRRSSSVPFPVVFETNEDLVWSTNEKSRLCVHFNGLSDLTFEVYCDSRQLHWFKRFLEDQQTKRKSKNQHSSGLFTLRNGRLAWQQGEGKGEPWQLHRLTLYYRQDRCAPSNKGADVLL

SEQ ID NO: 555 - protein, 781 aa, Leptolyngbya ohadii
MAIKTLRLLLCFDENTRKQLWDLSVRHTLLINQLLVELPKQSKFESWRKKGSIPRKEIQLQLTHLKNKKFVHLKEEGVFEDIPARMLTSAVLSVQYMFASIFARQRKLHFQCEGKKTWLAIQEYDLDLAQSTDFTPEQIRDRAKQFLEEVEQRRQELREENQAEQDLPSVMSLLFQLFKETETPLEQRAIAYLLRNDCKVKVKKKKKKEGGEVEEAEVEDRDAILLRLSKKRIQIQRFEEQMAVELPIGRDPLGYRTDQLIQSAALFYPEGEFEAWQKEFAVRLANLSSDLETLPYPVLFGSNTDLYWSFETNTQPEEPKTSLCEIVNPNGTPSSRRKPKRRRYKKRKKLNTARICVRFKGFSGIQGKTYCDRRDLATLRQWVTDLEENKRRSKEDKFSLALLPLRSACLLWEPDKQHAGEEKPWQSHRLYLHCTIDTRLLTAEGTEQVRQEKLTKVNRYLRQLRIEEQADEILSCSPPPIDDEDEEQVVIENEENTQINKKNRTTRDRLIRNSPPPRPSQVAHRGDPDIAMKIAFSRQEIVGTAVMDLQSQQVLEYCTPRELLSEQRQEVLKQRSAKLHSQPKRQQKAQDKAEAVQQSEGKKSCSPYKPKINPKQLQLQPYRLINRWRRLRDQNIRDRQTEQQQGLYRPSKAEANLSQYLNRLLARRIIQRCQHWKVSIIVLPELGDLRESVESEIKAKAKQKFCDDNVYRQQQYKKEHRMGFHRWSYKNLSQCIRACAVEVGISVVPGRQPRLGTLQEKVIAVSSDRLPRPESVDSPAA

SEQ ID NO: 556 - protein, 356 aa, Scytonema hofmanni
MNWLNLKNKPGRIFVKFNGLKKNIINPEFYICCGSRQRNYFQRFCQDWQVWHDNEETYSSGLFFLRSARLLWQERKGIGAPWKVNRLILQCSIETRLWTEEETELVRTEKIVKTEKTIRKMEQERDLTQKQLTHLQRERTQRQKLNNPFPGRPSQPLYQGKSNIIVGVSFGLDKPATVAVVDAANNKVLAYRSTKQLLGKNYNLLNRQRQQQQRLSHERHKAQKQFALNDFGESELGQYVDRLLAKEIIAIAKTYKAGSIVIPKLRDMREQISSEIQSRAEKKCPGYKEAQQKYAKEYRMSIHRWSYGRLIESIKSQAAKAGISTEIGTHQIRGSPEEKARDLAVFAYQERRAALV

SEQ ID NO: 557 - protein, 800 aa, Leptolyngbya ohadii
MRTITFRLCASEETRKIFWYLCQEHTLLVNALSHKVQQSKEFQTWQEKGWLPNKKLKLLNKEVLEEKTAFQVQVLDQTKLPDLPSRFIASAIRANQQTWGSWIAQQRRRYMSLTGKQDWLQLQECDLDLSQTTDFTFAQICTEVREVLASVTAQIAAEEQKKQNQKKRSRQTTKAKRTVKKQKKVSESRRITEALFKLLKKKQNALTMRAIAYLLRNNATVQEDEENPQEIALKLDQKRIEIERLKTQLQSQFPKPRDPTGAIADRYINEALEKPSFATSWKILVLFCLLITNQELPGLSLQFHSHLLQQLQHPDLSREAQQAEFKSWEEGCLERMTKLATVLKSLPLPISFDSSDDLYWSVEPKQQKAVEPKETTPAPTDGQPRRSPKRKRKNRRKIQVQERIVVRFKGLREHKFGVQCSHRDLAILQQCQREWERYGSLPDDKKFSLGLFPARAARLLWRKDKQQRKPSANSPGEKSQVEEWRQYRLYLHITIDDRLLSAEGTEEVRQEKLIKAQDDQKTMRKRKSPRKKLEEAELTQEQKEKKAKDGAIAKKRVASTQARLSDPTRLKRPSRKPYQGQSHIQVRVCFNQQERVSLAVFDTQQQQVLEYVSVRDLLYDHSAEKHHQHFISNPKRKGKRTLEQMQLEQYHLLDRLRKQQVKNHQRRMRAQKQGYYKYSKSESNLGEYLDRLLAARIGQLAVQWQASSVVIPDLGNLRESVEAKLQAWADLIFPKMEEVQQKTTKKIRVSFHGWSYGRLARCIRSRAARDGLAIVIGQQPQQGSLQEKARAVAPANSTTA

SEQ ID NO: 558 - protein, 735 aa, Nostoc sp.
MSVITIQCRLVAEEDTLRTLWELMANKYTPFINELLVQLGQHPEFETWLKKGEVPKETIERINKSLSTQEPFAGQPGRFYTSAITLVKEIYKSWFTLQQRRLRQIEGKERWLKIFKSDIELQQESQCDLNIIRTKASEILNSCAEQLTQDKNQQSKKKGKNTKKNKNESSASTLMNLLFNLYETSDDCLYRCAIAYLIKNNCQVSYLEEEPEQYIKRRHRKEIEIERLRDKLKSRIPNGRDLTGKDWLSTLNKVNNEIPKDENEFKLWQKNLLKVHNSMPFTVDYRTNTDLDCLLGFLNKETNIQKIILCQMYCLKLALKEGLYSFIKYLFADVNSILDKSNELLELLQHSNNKHLIWQLYLMKLSLKSGLDTFIKYMYAKILNLIYKQCKYLVQFNGLKEELNSPEFYICCDKRQLHYFKRFYQDWQNWHHNEEKYSSGLFLLRSARLFWQERTGKGKPWQIHHLILQCSIDTRLLTKEGTEIVRLEKINQADKTISNMEKKGELSKNQLSRLKRELTTRQKLNHSFPDLPSKPLYQGKPNILVGVSLGLGKPVTLAVVDAANQKVLTYRNVKQLLGKKYNLLNRQQQQQQYFSHKRHKAQKDNAPNSFGESELGQYVDRLLANAIVAIAKTYSAGSIVLPKLRDMREIIQSEVQARAEEKIPGYKKGQQEYAKQYLISVHRWSYGRLIETIESQATQAGILIEISSQPSRGNLLDKARDLALFAYQERQLAIV

SEQ ID NO: 559 - protein, 493 aa, Cyanothece sp.
MPTSSKTAIKFEGEPEDKEAYLLRRTQKEIQIQRLEAQIHSCAPHPRLNDDSLWLDALNQSLTGITEVKDLQQIQRQLLQKFPHLPYPVFYNTNTDLEWSINHQGRIRVSFNGLKKKGITLEIACDERQLPYFQRILSDYQCFKRKDLPVPVPGGLMLLRSAQLIWKPIEGKGQPWNTHHLYLHCAINNQLWSKTGMANIQQELIQETQKQLNKCFAKEEQNPLTNNQKKNILRLESSLQRLKTFDIAYLNPFQSHSYQGNPHIIVGVAIGLKTPITIAIVDLQTQATLGFRSPKQLLKRRRQILVAKAKTEDKIRFSPRKKREITDYELFQDYLHKKHSNKHERHKAQKKFADTQFGEANAGLYFNRLFAQAIVEVAHSYQASVIVLPDLTNIREAIESEVRARAELKYPGNKTQQQRYAKDFRVTVNQWNYNQLGQCINYAAKKAGLKIAILKQTIKGSSQQKARQIALTYWEKQQQTQTPFNVQTPNNLV

SEQ ID NO: 560 - protein, 311 aa, Cyanobacterium sp.
MKKANKNKFSSALFTLRSAMIIWKEDDGKGELWDKHKLYLHCTLDTDYWTVEGTQVVAQRKQKEVLNIIDGMKEKDDLRDTQKKFIQRKQTTLARLNNIFPRPSKSIYQGNPDLYMGVAMGLQEPVTIAVVDVGEGKAILHRNIKQLLGDDYHLLRRRRNEKQKLNHQNHKARKRANFQQKGESNLGEYVDRLIAKSILKIAQEYEVSTIIVPRLSQMRSITEAEIQLRAEERIPEYKEGQRKYAKDYRVQVHQWSYGRLIDNIKGNSSKLGIVVEEGTQPKQGTFTDKALQLALSTSKTNHKANPTKINS

SEQ ID NO: 561 - protein, 443 aa, Nodosilinea nodulosa
MFKLYDETEQSTSRDKAAIIYLIKNGCKIPSCQENPKKFEENRLNKQKSIERIERKLEGKTPKIRKFPLYPIAFYSSDDLRWSLIKREDPKTKDIKERIFVTFKGMGRNRIFEICCGRRQLPIFQIFLEDWQLYQGNEKEYSLDMVLLRSASLVWRKCKESSSKEAANSLMDAYEPYLKVTIDIDNLTTEGAGVIRDEKLKDVERRIQNYGKLAEDKDLTPNQKTNLKQLKSRETGLGNCFPRPSKPAYEGNANIAIGISFCRQKVIAAAIVDLKKGKAIVYRTAQQLLGKDYSQIPEYRHRQRTNRNKRRKLQLQGKNASITEAGQGVHLNRVLAKAFVRLAEEYNAGVIVLPKTDGLREIIQSGIEAMAEQKYPKDKSRQRQFLKEYRISVHNWDYFRLRRSIEERAAKVGIPVKVGCQPSKGYLPQKAQQVALSVLERVV

SEQ ID NO: 562 - protein, 292 aa, Cyanobacterium sp.
MIIWKEDDGKGELWDKHKLYLHCTLDTDYWTVEGTQVVAQRKQKEVLNIIDGMKEKDDLRDTQKKFIQRKQTTLARLNNIFPRPSKSIYQGNPDLYMGVAMGLQEPVTIAVVDVGEGKAILHRNIKQLLGDDYHLLRRRRNEKQKLNHQNHKARKRANFQQKGESNLGEYVDRLIAKSILKIAQEYEVSTIIVPRLSQMRSITEAEIQLRAEERIPEYKEGQRKYAKDYRVQVHQWSYGRLIDNIKGNSSKLGIVVEEGTQPKQGTFTDKALQLALSTSKTNHKANPTKINS

SEQ ID NO: 563 - protein, 632 aa, unidentified
MTILFDRHEQSQDLLERRAIAHLLKNGCQVNDAEEDLEALKLRLEKKRIQIARLEKQLERRLPDGRDPTGERFASNLAQAIAFADHLTFVPAKFWINWYQVLQRNPNDESDLVIPFLGYVYHQQAGDAGFDAWEQGDSERAALVSTLYETLPYPILFGSAGDVYWSLKQVDPNPGTTRQKQQSHRTPKRRRKPKHKQKVQERLCVRFKGEELKNHHFGVYCDRRQLPVFKQFLTDREVQKQRKDTEKFMGGIFTLRSARLVWKEDTERLQRKRASTTSLLWLKFLFAMQREETVTDKELDSWIISFLCINTIFPWQSHRLYLHCTIDSRLLTAEGTKEVIAQKTAATQQYLEQFKPETATPKPQAVERVEEERQTPQARGGTTVKKKETTLARSKNPPPARPSRLLYKGRSDIAAVVVVSRFAIVAVAIVNTQTQEILEFQKIKDLLTEHRSDVLEERLKKHQGMLKGGRSLEQLQLQQYRLVKRWRKHRKKNLTQRQEEQKRGLYKRSNQESNLAQYLNRLLAKRIVQLCQTYQVGMIVLPELGNIGENFECEIQAKARQKFPGDNVQLQKQYLKELRMRMHRWNYKNLLHAIRQYATPARIPVTTRWQPKEGALRDKAAVMARAVPPGVP

SEQ ID NO: 564 - protein, 282 aa, Phormidesmis priestleyi
MAWQEGRGEGEPWNLHRLVVSCAIDTDSWAQEGTEQIRQKKASECAEIIACNKVKKNLSKDQEAFLKRRETMLALLDNPFPRPSRPLYQGQPSILAGVSYGLDKPATLAIIDIQTGKAITYRSIRQLLGENYKLLNRYRLQQQRNAHQRHKNQQKGAFNRFGESNSGKHLDRLIAHEIVAIAQKYQVSSLILPDLSDIREIVQGEVQARAEQEIPGSIELQRQYALQYRASVHRWRHAQLSQCIGSQAAQVGISIEVVKQPFTGTPQEKPKNLAIAAYQSRK

SEQ ID NO: 565 - protein, 529 aa, Lyngbya confervoides
MERRAICHLLRHDLKVIEEEDTPDTIQHVIDRKRIEIERLTEQLQSRLPKGRDPNHERFVEKLEIAVALPDCSPEHWDPEEFDEWRIQKQISELNTLPYPILFGSASDLYWDILDNTTSATTVSAQKKSRKSKRPNERLQVRFKGLDEHKLRIQCDRRQLKIFRQFSTDYISNKLLPKDEKFGEGLCALRSACLIWKADPEASANRKNRQKASLRKDSRLRELLEQNKVCLIDYPWETHRLYLHCTFDSRLLTQQGTEQVRLQKLEAAQKSVEKIKERQAGDPSITLTENEKARFKAKQTSISRLERNRPPERPECQIYQPNPNIVLGVSLSRHEPVTVVVFNKEKNQVLECCSTESLLKRRGIISPRNKQSIVKLQHEQQQLLRRWRRQRHYNLYQRPEEQKQGDYHQHDAESQLGDYLDRLIAARVTELAVRRQAIAIVLPGLQNIREGVESDIQARAKKKHPHHKKLQAQYAKQYRREFHRWSFGRLGQYITEAAKQQGIVIYKGWQPKHGNEQEKAMAVITSATT

SEQ ID NO: 566 - protein, 286 aa, Geminocystis sp.
MIIWKEDDGKGELWDKHKLYLHCTFETYCLTAEGTSAIAQEKQEEVTKIINIMKAKEELTDTQKGFIRRKNSTLGKLNNTFLRPSKPLYQGKSNIYLGIAMGLEQPVTIAIVDIETDKVITYQNPKQLLGVDYRLLRRQRTEKQKLSHQSHKARKRFNFQQKGESNLGEYIDLLIAKAILTVAQEYQVSKIIIPRLKDMRSITEAKIQLRAEKRIPEYKEGQKKYAQDYRVQVHQWSYGRLIEHVRAIALKVGIVVVEAKQPKQGTFTEKALQLVLSNTEKNLKKK

SEQ ID NO: 567 - protein, 287 aa, Nostoc sp.
MLWQQGEGKGEPWKVHKLALHCTYDARLWTAEGTEEVRKEKTDKAQKRVSKAEKNEKLDNAQQTQLNKDKSSLSRLNNSFNRPGKLIYQGQSNIIVGISFHPIELATIAIVDINTKKVLACNTVKQLLGNGFHLLSRRRRQQVHLNKERRKAQKKDSPCNIGESKLGEYIDKLLANRIVEIAKSYQAGCIILPRLKDIKEIRTSAIQAKAETKIPGDVNGQKLYVKEYNRQIHNWSYNRLQESIKSKAAELKISIEFGIQPHSGTLEEQARDLAFYAYQSRNHTLGR

SEQ ID NO: 568 - protein, 330 aa, Phormidesmis priestleyi
MSFITVQCRLVASEEIRQQLWHLMADKNTPLVNKLLKSVSQHDDFEVWQRNGTVPDKSVRELCNPLKVHPQFEEQPGRFYTSASLIVTYTYQSWLELQRKRRRSLDGRQRWLNVVKSDAELVQMSGCNIHTIQNKAKEILAQLNVQSPGAQNQPKQKRKKKQNSKANGDLMSALFQAYETVDDALSRCAIAHLLKNDCQVCEQEEDPEAFAQRIHGKQRRIKELEAQLASRLPKGRDLTGEEFLEVLSTATAKVPDDTIEQMLWQAKLLAKPATLLYPIIFGSQTDLRWSTNEKGRICVAFKAREQTRGGTLASKLPHLTLLFRYSALEG

SEQ ID NO: 569 - protein, 300 aa, Scytonema hofmanni
MSVITIQCRLVAEDDTHRQLWELMAEKNTPLINELLEQLAQHTDFDKWLKQGEVSKEAIETIQKSLITQERFAGQPGRFYTSAVTLVKEIYKSWFALQQQRQRKIEGKERWLKMLKSDIELQQESQSSLDIIRNKANEILNSFVAKFTQPIKQPSKTKKGKKKKKTKDSTLFKALFDLYDKTEDSLSKCAIAYLLKNDCQVSELDEEQVQYAQRRRRKEIEIQRLREQLKSRKPKGRDLTGEKWLTTLEEATNQVPLDEFEAKSWQASLLKVTSDIPYPVDYETNTDLDWLIYSYPFRGG

SEQ ID NO: 570 - protein, 269 aa, Lyngbya sp.
MSIITVHCRLVAPQNVRQQLWKLMSDRNTPLVNELIAQISQHPDFETWRRKGKIPAGIVKKLCEPLRSDPRFEGQPGRFYTSAISLVDYIFKSWLAVQQRLQRKLDRKIHWLSMLKSDEELVAESNHTLEEIRAYATEILSSVETQKNQPSPKKSPRKSPRKGKIKKNKGSQSPTDILFETYNKTEDILSRSAICYLLKNRLKMSEKPEEIEKFSQRYRKKEIEIQRLKEQLEGRLPQGRDLTGQKWLETLITATTTVPKDNPEAKSYY

SEQ ID NO: 571 - protein, 260 aa, Leptolyngbya boryana
MNHLALYCTFDTRLMSAEGTLEAQQEKVAKTLKKLTHPNPDPRNHSTLDRLQNLPERPSRTPYVGNPEILVGISIGLADPITVAVVNGRTGEILAYRTPRALLGEQYHLLNRHRKEQQHRLQRHKNQQRGVAYQPSESELGQYVDQLLANSTIDLARTYQAGSIVVPNLKNVRDLLASEIQARAEQKCPGSVAAQKQYAKAYRQAIHQWSYNRLIQAICSQATQRGITVEVGSQPLKGNPQELAKDIAIAAYYARAITAK

SEQ ID NO: 572 - protein, 211 aa, Phormidesmis priestleyi
MLALLDNPFPRPSRPLYQGQPSILAGVSYGLDKPATLAIIDIQTGKAITYRSIRQLLGENYKLLNRYRLQQQRNAHQRHKNQQKGAFNRFGESNSGKHLDRLIAHEIVAIAQKYQVSSLILPDLSDIREIVQGEVQARAEQEIPGSIELQRQYALQYRASVHRWRHAQLSQCIGSQAAQVGISIEVVKQPFTGTPQEKPKNLAIAAYQSRK

SEQ ID NO: 573 - protein, 453 aa, unidentified
MVKYTLLVNRLLEQVGQLSEFKQWQEKGSISKEPVKQLCDALKKHHAEFQGLPHRFYISAKLMVTYTFESWLALQQRRRRKIDGKRRWLNRVEDDIELAKVTDFSPEMIQNRARKILAEIHPSNPVEPEPETSSDNEINEGENCQEEEEMNQPKSLLSCLFDLYDSTEDALTLRAIVHLLKNNGEVNEEDEDPKKLELRLAAKREEIQRLEKQLQGRLPKGRDPTGETTTRFLEEAIKLPEHPTAYPPRFLLNAFYCYALLPMPYIQYGVYLLNAILDEARIVESDFITWRDTIAEHLVNAAKRPNSLPYPLIFGSTSDLVWESESKRKGPNAPDTEGALEQSGAKSSRKRPSKRKRTRLKTQSDERITVRFHGMSQYRFKIYCDRRQLPIFRQFLTDYCTHKALDEENKFSMGLFALRSASLIWKKDKQRPHKRNSSEPVEPLSPWQTHRLY

SEQ ID NO: 574 - protein, 825 aa, Leptolyngbya frigida
MQMRTIKTDSIVRITQRRKRKGVTEDLPSFDEAAWCRLCEFSYKHTLLVDTIVSQIKQHHKLINWIRSSQELQRQDDTTQETEAKQGQNGLPEGLVKALCDALASTPQFSKMSGRFYTSAIDRVEELFKGWFAAHQKLIHKIRGKRRWLAVVESDAALAETSNFSQQEIEIRAAQILAELEAHNGTNAGSNDHVDFNTLFQKFDETEETLARRAIIHLLKNGGKTHAEVKKPRKRKRKGKSISTQPLTLTERLEAQRVGIERLEKQLLGQLPRARNLFPEQAFEHHLEAVIAMPNSDATELERYYFLYFSLLLYLADANEYLQLERHLLTTLVLQWSKLGDLHYYRVLIYAFMLHAASAQQYLQLGSYLLQTIKLEAERVEAAFFAWHESITPKLHDFLREPKALPYPISFGYDDVRSWQMNQKGKIFFKLNGWGDLLFEVRCHHRQLPLIKTFLKDWQTKNASERKAQSSKKDPFTGSLMLLRSIELIWKPKEASDQKDAQLCSHCEVFQQSSEQGFWNECKLTIHWTFNAEALTRQGSEKMRQRKLELQLQQLQAKQAKLEQQQDRLDKLEQAAPEAAKSQEQLKRIRNLKKQIQQLQEDLAKLRPKLACLQAAQPFGRPDRPLYEGVPNIFVGVLLDLDTHLAVTVVDAMRRKRLALRSAPKISSEGYRLLQKYFRQRQEHSKQRQEDQQAQRYSHQTESGLGQQVDRLFAKGLVELAQAYKASTIVIPIKGGWRERLYSQLVARAKLKCNGNKQAMARYTKAHGERLHQWDYNRLSQAITDCAATHGIEVVLQKTVFETDVFQQAANLAIAAYDSLNSAQT

SEQ ID NO: 575 - protein, 246 aa, Leptolyngbya boryana
MSAEGTLEAQQEKVAKTLKKLTHPNPDPRNHSTLDRLQNLPERPSRTPYVGNPEILVGISIGLADPITVAVVNGRTGEILAYRTPRALLGEQYHLLNRHRKEQQHRLQRHKNQQRGVAYQPSESELGQYVDQLLANSTIDLARTYQAGSIVVPNLKNVRDLLASEIQARAEQKCPGSVAAQKQYAKAYRQAIHQWSYNRLIQAICSQATQRGITVEVGSQPLKGNPQELAKDIAIAAYYARAITAK

SEQ ID NO: 576 - protein, 252 aa, Phormidesmis priestleyi
MEQKRQEGISRLKKQLEEAKDPEELTEHQQAYLKRQQSTLTRLQCLPQRQGKPRYQGQPDIFVGVSIGLINPVTVAVVNVRTGHVLAYRSVRQLLGDNYRLFNRHRQQQQQNALKRHKNQTKGYTHQPSESELGQYVDRLLGKSIIELAQQFQASGIVLPHTQNLREHLAAEINARAERKSDSKQVQNKYAKQARISIHRWSYDRLLTAIRAQAEKADMTTETATQPRQGTPQHKARDVAIAAYHFRQVSSN

SEQ ID NO: 577 - protein, 204 aa, Calothrix sp.
MRYLQTGNLHILVGVSLGLKKPATVAAVDVVSNKVLAYRSVKQLLGQNYKLLNRQRQQQQRLAQKRHESQKKQAPNQLGESELGQYLDRLLAKSIINFAVTYQASSIALPKLRDMREIIQSEIQAKAETKISGYKEGQQKYAKEYRMSVHRWGYGRLIDNIQAQAAKAGITIETPSQQTKGSPQEQAKDLAICAYKKRQAMLNK

SEQ ID NO: 578 - protein, 222 aa, Geminocystis sp.
MICYHTNTFNKTFLLVMAHVTIQCRLIASGDTRQFLWQLMTEKNTPLINEILLRIKQHPDFPDWRIKKKLPKYFLARQIAELKNNYPFEGQPSRFYASVNKIISYIYKSWFEVQKTLDWKLQGNVRWLEMLLPDTELIKHFDNSLESLQQQATLILDSIDSTVNKDQISTILFEKHDKTKKPDIRSAIIYLLKNACAIPKKPETTEKYQDLKRKVEIKITRL

SEQ ID NO: 579 - protein, 324 aa, Anabaenopsis circularis
MTRYCQNNSTQPILRTISCYLSGREEALRKAWEETAQVNTPLIVDLIKAVPEQPEFETHKETGTITKKKIKELRQSLTQDSDRTYSSADSLVKEVYASWLKLYQTRKIQKEGKEYFLKNILKSDAELVEKSNCELHTIRCKAKEILSQVEEFIDKINNSELQITQTRSAKKKNNQNNNSINTILNKLFSKKINKSVKQSLNYTLYEIHRESSDSLTQCAVAYLIKNGNKVNEAEENLVQLNKRRAAKEVEIKRLETQIQNTRLPNGRDITGAKSSQAFNNLINQVPNDDEEFAEWTATFLKKISNLPYPINYLYGDLTWYKNEK

SEQ ID NO: 580 - protein, 304 aa, Anabaenopsis circularis
MSGREEALRKAWEETAQVNTPLIVDLIKAVPEQPEFETHKETGTITKKKIKELRQSLTQDSDRTYSSADSLVKEVYASWLKLYQTRKIQKEGKEYFLKNILKSDAELVEKSNCELHTIRCKAKEILSQVEEFIDKINNSELQITQTRSAKKKNNQNNNSINTILNKLFSKKINKSVKQSLNYTLYEIHRESSDSLTQCAVAYLIKNGNKVNEAEENLVQLNKRRAAKEVEIKRLETQIQNTRLPNGRDITGAKSSQAFNNLINQVPNDDEEFAEWTATFLKKISNLPYPINYLYGDLTWYKNEK

SEQ ID NO: 581 - protein, 234 aa, Phormidesmis priestleyi
MAILQSDDELTIASQSDINTLRSKASELLMQLNHSDSQDNEPQPKKARSKKKGKKESKQPGSAISSTLFTLYGETEEVLTRCAIAYLLKNGCKLPDRFEDPKKFAKRRRKTEIRLERLIKTLERTRFPKGRDLSEHTWLETLTKAEGCVPKDDNEAADWQAKLLTEPATLPFPVNYETNEDLHWFLNEKGRLCVNFNGLGEHSFEIYCDQRVRPTAPFSSLVLYAKIFVTLRSN

SEQ ID NO: 582 - protein, 173 aa, Cyanobacterium sp.
MTQITIQCRLIASADTRQFLWMLMSQKNTPLINEILTRIRENPDFSQWEEKGKLPKNFISQQIAELKNDSCFQGQPSRFYASVGKIIDYIYKSWFQIQRINQFKLEGNTRWLKMLKSDAELIESFDGSIEALQNQAQQILSGVDITSTQNRTADFLFQEYNKTKDPQTQSAIA

SEQ ID NO: 583 - protein, 178 aa, Geminocystis herdmanii
MVQVTIQSRLIASADTRQFLWLLMSKKNTPLINEILTRIKHHPDFPQWREKGRLPKNFIAQQIQELKNDSRFQGQPSRFYASVGKIIDYIYKSWFKVQKSYKIQLEGNSRWLEMLKPDSLLIESFDGSMEALQNQAQQILDNIETTSTQEGIVDYLFQKYEKTEDCRMRDAIAQRHRR

SEQ ID NO: 584 - protein, 139 aa, Anabaena sp.
MSVITIQCRLVAEEDSLRQLWELMTEKNTPFINEILLQIGKHPEFETWLEKGSLPAELLKTLGNSLKTQEPFTGQPGRFYTSAIALVDYVYKSWFALQKRRKNQIQGKQRWLKMLKSDQELEQESQSSLEVIRTKVNQN

SEQ ID NO: 585 - protein, 208 aa, Myxosarcina sp.
MGVSIGLQQPVSVAVINVPTGEVLLDRDTKQLLNKPVQQKPKQGKQAKRHTQYGFLLRRRQQQQENDFKRQQAQIKAGDNRFGESNLGEYVDRLLAKAIVEIAINYRVSSIVMPDLTNIREILESEIAARAEAKIPGVKKAQKLYAKKYRQNIHRWSYARLCEAIAFKAARHNIAIEYDKQVAFKTLSVMPAKDLALSVYHSRQQKHS

SEQ ID NO: 586 - protein, 264 aa, Leptolyngbya sp.
MPLATPIETGARSEIPKDARTKAQIRELKNLRKAIQDLQADLAKPRPKLDCLQNSPSFDRPDRPLYEGVPNIFVGVLLDLDKHLVVTVVDAMRRKVLALRNARSISKEGYDLLQRYFRQRREHSKQRQADQKAHRRVHQTESGLGQQVARLFAKGIVELAQQYKASTIVIPETDGWRDRLYSQLVARAKIKCNGSKKAMARYTKAHGEKLHQWDYSRLSQAIVDRATTDGLKVMQQKTVYEEDVFQQVANLAIAAYDFLNLGER

SEQ ID NO: 587 - protein, 132 aa, Hassallia byssoidea
MSQITIQCRLVASESSRQQLWELMAQLNTPLINELLRQVSQHPEFETWRQKGKHPTGIVKELCQPLKIDPRFIGQPGRFYTSAIALVNYIYKSWFALMKRSQYQLEGKIRWLEMLNSRPLAKVGQEDSVCER

SEQ ID NO: 588 - protein, 249 aa, Nostoc sp.
MTQKNTPLILQLLKSVSEQPEFEANKEKGEITKKEIVELRKGLKKNPEFEEQSGRLRSSAESFVKEVYSSWLTLYQKRKRQKEGKEYFLENILKSDVELVGESNCDLETIRSKAQEVLTQPEEFIKQLTINDEDVKPTKSARKRVNKNIYNKSTDAEQREDSSSPNNVDENKLETLTNVLYKIHKQTQDILTRCAVAYLIKNHNKISELEEDVQKLKKRRNEKKVEIKRLENQIQDNRLPSGRDKLLRI

SEQ ID NO: 589 - protein, 130 aa, Anabaena sp.
MAEKNTPLINELLSQIGKHPEFETWRQKGKHPTGIVKELCEPLKIDPRFIGQPARFYTSATASVNYIYKSWFALMKRFQSQLDGKLRWLEMLNSDTELVEASGVSLDILQTKSAEILAQFAPQNPAKTQP

SEQ ID NO: 590 - protein, 128 aa, Anabaena sp.
MSAPNQFGDSELGEYIDRLLAKEIIAVAQTYKAGSIVIPKLGDMREQIQSEIQSKAEQKSDIIEVQKKYAKQYRVSVHQWSYGRLIANVQSQANKAGIAIEEGKQPIRASPQEKAKELAINAYQSRKA

SEQ ID NO: 591 - protein, 157 aa, unidentified
MAGVSFGLDKPATLAILDITTGQTIAYRSIRQLLGSDYKLLNRQRQRQHQKARQRHSEQLKFAPNRVSEGSIGDYIDSLITKAIIQIAQQYNASSIVLPDLANIREVIQSEIQARAEEKSSLKEVQDKYAREYLARVHRWSESEIPREFAKSLKQLR

SEQ ID NO: 592 - protein, 223 aa, Cyanothece sp.
MSSLSVIRARLLASEEKLSYLWQLMAQPYSQLIQLLLDYIANHPDFPTWLDKFRLPDTLIKEFITTHQTKYLCQELPGRFRQSAVTLVKNIYKSWFAHKKSKLLSLQGKKRFLSMLKSDEQLLLESGYDLYTLTSHAQNLLQQVQLELEELWQQEGIKPEDEQSIFGKITNKLYELHDKTQSIPKRCVIAYLIKNGNQIRGRTRRQRSLPTTSHPKRNPNSTP

SEQ ID NO: 593 - protein, 126 aa, Cyanobacterium sp.
MSHQNHKAKKRANFQQKGESNLGEYVDRLLAKSILKIAQEYKVSIIVVPRLKQMRSITEAEVQARAEEKIPEYKERQRKYAKDYRVQVHQWSYGRLIDNIKGNSSKLGIIVEEGTQPKQGRVLLEN

SEQ ID NO: 594 - protein, 133 aa, Cyanobacterium sp.
MTHITVVQCRLIAPEGTLQHIWAMMAQQQTPLINERLHNINTHPDINTWLTANQLPSKLVETLAQPLKTQPPYQELPGRFITSAITLVKEMYASWFAVQTQKRLSLDGKKRFLSLLQSDEQLLQDSQTDFDTW

SEQ ID NO: 595 - protein, 189 aa, Lyngbya confervoides
METREMSQPNLPAYMKTIMCCLCASPETRRYFWETIVSYTLLVNELLEAVPNRPEFPQWQRRGTIDREAVRIVLKPLKTKPDYAGLPKRFLTSAELIVCYVYKSWLALQKRRQWQLEGKRRWLAAIEGDLKSILSSDLSLETVQATARQILEQAEQDLEPPPSEITKKGKKSKQHTAFLTLVRCSSSNL

SEQ ID NO: 596 - protein, 255 aa, Acaryochloris marina
MRSFEGKSLNTLKETQKTYLKRTQSSINRLQNASLRRPHVSPCIGNPELTMGVSLYCGLPLQASIVNNQTRKLVATITAPQLLKLEGYQDKLKPFKRSQFAYLIGRVHRQRVYWRKIKKKEFSKGRLRRSKRLENLGKKCDQLIAYHLIQWAQTHQVGDIVLPSPHGIQDHIEARVQSLAQLKFPNNKQLQKRYAKAIRLRYPRWSYTRLIQCIADCAERREMKVNILKFYKNAGPFEQSVEIAYAHLQYEAPSS

SEQ ID NO: 597 - protein, 583 aa, Leptolyngbya sp.
MSMKTIRSDAIVKLDPKPRGRKKNLEDLPPFDTAAWCRLCERTYHHTLLIDQISEQIKQDPDVINWIRATQDVKAQTSITTDTDQDTDTEQGHSWLPKELVQKLCDRLKETPQFKGISGRIFTSATERVEEIYKSWIATHQKLIRQIRGKERWLTIVKSDAGLAENSNFSQLEIESRAEQVLSEIEAENESEDESDDARNRRVFNTLFDKFDTTEDVLSRRAIIHLLKNGGKVHWEPRKPRRRKGNQDKSSQPMTLEERLAAKQIEIDRLEKQLLSQLPRARNLFPDWAFEEALDDLLTLPDPDLARHNQYYFLAFSLLIHQSDPAQNIRFKQHLLKSMSFLWEKPNSLLYYRILIFSFLLYTTSKQKHLQFGHYLLRAIKVEAERVESQFYDWQASITPKLSEFLREPKSLPYPISFGYEGVRAWQTNREGKIFFKLNGWGDLIFEVRCHRRQLPLIKTFLRDWQTKDQCEEEDQYSGSFMLLRSIELIWKPRDDNGQGDTQLCSQCEVFQQYPGKGFWNECKLSIHWTYDSDALTRQGLEKIRQRKLEPQLKKLDKKQEDLEEKQKLLQCLEAIPQILHHS

SEQ ID NO: 598 - protein, 581 aa, Leptolyngbya sp.
MKTIRSDAIVKLDPKPRGRKKNLEDLPPFDTAAWCRLCERTYHHTLLIDQISEQIKQDPDVINWIRATQDVKAQTSITTDTDQDTDTEQGHSWLPKELVQKLCDRLKETPQFKGISGRIFTSATERVEEIYKSWIATHQKLIRQIRGKERWLTIVKSDAGLAENSNFSQLEIESRAEQVLSEIEAENESEDESDDARNRRVFNTLFDKFDTTEDVLSRRAIIHLLKNGGKVHWEPRKPRRRKGNQDKSSQPMTLEERLAAKQIEIDRLEKQLLSQLPRARNLFPDWAFEEALDDLLTLPDPDLARHNQYYFLAFSLLIHQSDPAQNIRFKQHLLKSMSFLWEKPNSLLYYRILIFSFLLYTTSKQKHLQFGHYLLRAIKVEAERVESQFYDWQASITPKLSEFLREPKSLPYPISFGYEGVRAWQTNREGKIFFKLNGWGDLIFEVRCHRRQLPLIKTFLRDWQTKDQCEEEDQYSGSFMLLRSIELIWKPRDDNGQGDTQLCSQCEVFQQYPGKGFWNECKLSIHWTYDSDALTRQGLEKIRQRKLEPQLKKLDKKQEDLEEKQKLLQCLEAIPQILHHS

SEQ ID NO: 599 - protein, 99 aa, Tolypothrix campylonemoides
MSQITIQCRLVASVNTRQQLWKLMAEKNTPLINELLSQVAQHPEFETWRQKGKHPTGIVKELCQPLKTDPRFIGQPARFYTSAIALVNYNIESRKPIGF

SEQ ID NO: 600 - protein, 131 aa, unidentified
PEDQKHDNYRQQDAESALGDYLDRLLAARVIQLAQKWQAGSIVLPSLGNIREIVESSVQAEAERRYPKHKELQDKYAKQYRLEFHRWSYGRLLKYLKECARQHGLTIRQERQPKQGSEQEKALALIASAFL

SEQ ID NO: 601 - protein, 141 aa, Geminocystis herdmanii
MSQKNTPLISELLLELSQHEDLEQWCELGKLPSGLISKLCDQLKQRAEFEGQPSRFYYSAITLVDYIYKSYLRTQRRLRFQLQGQQRWFEMFKSDTELKNETNFSLTDIRVKARELFDKDLKDSSPDDYFKTYESTSDLLT

SEQ ID NO: 602 - protein, 131 aa, Euhalothece sp.
METWRQKGKLPAGIVSKLCKPLKEDSRFSGQPGRFYTSATKLVEYIYQSWLALQQRLQWRLNGQQHWLEILKSDQDLCQQADCSLETLCHQASEILASFQPSASNKKRNRKSKKIVLEKVCLMLMTMQKIV

SEQ ID NO: 603 - protein, 132 aa, Anabaenopsis circularis
MEASDNEEAKLSGSLVTLRSAHLLWQQGEGKGEPWKVNKLVLHCTYDARLLTAEGTEEVRQVKTDKAQNEVNEAESNENLDNEQQKRLNKNKSSLSRLKNSFARPSKPAYQGQSNIPLFCQFPDKMDRRKEK

SEQ ID NO: 604 - protein, 98 aa, Cyanobacterium sp.
MSIPSGRDLEGKKWLETLILASTTMPINESESNSWFSALKKNSPSIPYPVIYETNEDLKWSLSDQNRLHVRFNGLSDHTFKIYCDSRQLPYFRRFYKA

SEQ ID NO: 605 - protein, 172 aa, Nodosilinea nodulosa
MSNMRTSECRLVSSYWERPSKAKPDSIALASDDTKAYLWSLSVGSTHLCQELNKRISNHELFEDWVQNAEIPDAEIKKIWKELKEGEMFKHIPERFCRSGLLTIQNIYSSWLSGRRKLQDRLKGLEYWLSIVKSDIELVSESGLDIEEIQVRAEEIINDLQAEAQASSDSQK

SEQ ID NO: 606 - protein, 106 aa, Stanieria sp.
MELAQQDRVSAIAVPKIEDIREITQAEIKAKAEAKIPGYEEGQKKYALAYRINIHNWSYGRLIENISTQANKLGIAIVEVKQPIRGSPTQKAQAMAISAHQAFNKT

SEQ ID NO: 607 - protein, 205 aa, Acaryochloris marina
MGVSLYCGLPLQASIVNNQTRKLVATITAPQLLKLEGYQDKLKPFKRSQFAYLIGRVHRQRVYWRKIKKKEFSKGRLRRSKRLENLGKKCDQLIAYHLIQWAQTHQVGDIVLPSPHGIQDHIEARVQSLAQLKFPNNKQLQKRYAKAIRLRYPRWSYTRLIQCIADCAERREMKVNILKFYKNAGPFEQSVEIAYAHLQYEAPSS

SEQ ID NO: 608 - protein, 83 aa, Merismopedia glauca
MSQITVQCRLVATEATRRCLWELMAIQNTPLINELLQQISLQDDFETWRSQAKLPSGTVERICQPLKSDPRFIGQPSRFYTSA

SEQ ID NO: 609 - protein, 86 aa, Tolypothrix sp.
MREQVQSEIQAKAEQKSDLIIVQKKYAKQYRVSVHQWSYGRLIANIQTQAAKVGIVIEESKQPITASPQEKAKELVIAAYHSRKIN

SEQ ID NO: 610 - protein, 110 aa, Anabaena sp.
MSRNNKKNSTNPIIRTIRCHLNAKEDVLRQVWEEMTQKNTPLIVQLLEDVSEQPEFDTKKETGEISKKEITELRKSLTKDSDLEKQSGRFRSSADSFVQEVYSALASLLW

SEQ ID NO: 611 - protein, 88 aa, unidentified
MREHLAAEINAKAERKSDSKEVQDKYAKQVRISIHRWSYDRLLSTISSQANKLGLTLETMAQPPHGTPQEKARDVAIAAYHSRQVSSN

SEQ ID NO: 612 - protein, 61 aa, Anabaena sp.
MSQITIQCRLVASETTRQQLWQLMAEKNTPLINELLSQIGKHPEFETWRQKGKQPTYNEKG

SEQ ID NO: 613 - protein, 107 aa, Phormidesmis priestleyi
MLLRKEYIFEVCCDRRQLQTFQVFLNDWQTYSSDKNKYPITLFAFRSAALIWRQSTENGISKLQPYLKCTVDHKRLSAKGAEPRAEEIAKVRKNSQIIRRNSKVEKS

SEQ ID NO: 614 - protein, 50 aa, Cyanothece sp.
MSQITIQCRLVAKEPIRHTLWRLMTDLNTPFINELLQKVAQHPDFEKWKQ

SEQ ID NO: 615 - protein, 76 aa, Anabaena sp.
MTQKNTPLIVQLLEDVSEQPEFDTKKETGEISKKEITELRKSLTKDSDLEKQSGRFRSSADSFVQEVYSALASLLW

SEQ ID NO: 616 - protein, 78 aa, Stanieria sp.
MRVAMGLDKPATVAIVDGNTGKVIVYRSIKQLLGENYRLLNRQRQQKQALSLFCHFPKTFVISKVYNPYQQNDSLVIY

SEQ ID NO: 617 - protein, 74 aa, Stanieria sp.
MGLDKPATVAIVDGNTGKVIVYRSIKQLLGENYRLLNRQRQQKQALSLFCHFPKTFVISKVYNPYQQNDSLVIY

SEQ ID NO: 618 - protein, 72 aa, Phormidesmis priestleyi
MSELLLFDTYEVTEDSLSRRAVIHLLKNGGEVNEEIEDPEKLQQRLVTKREEIQRLEAQLASRLPKGREPNR

SEQ ID NO: 619 - protein, 74 aa, Aphanothece hegewaldii
MSDQQSQNHEITIQSLLKAPEATLRILWQLMVNVTELINSILHHINTHPDFDTWLTEWELPASILNSFIRNAKT

SEQ ID NO: 620 - protein, 148 aa, Trichormus azollae
MTYEFVFLPVGNADSIIMHPDGSSTVVIDLHKIPLLLNWFENKKQTNISRILFIRHEHRYYFPSLEDLVTFLENRRRRGIVTEISPPYHVLRNAKAGSIMLPKLGDMRENIQSKIQTIAEAKYPGSVEIQRKYAKQYEMSINGVMADL

SEQ ID NO: 621 - protein, 61 aa, Nostoc flagelliforme
MSNYQIHYWSYNRLQKYIKSKAAELKISIEFGIQPHYGTLEEQARDLAFCAYQCRINTFGR

SEQ ID NO: 622 - protein, 379 aa, Archaeoglobus profundus
MELTLKMKVREKTKWKIQALRDAMDSFRQAVNDWIDVAWKHKITDRTLHSLAYKKLREKYPNLYSNSLQDAMNWAIQIVKTELKVNPDVKPKFDSFMISFKNVDFKFENDGFVIPLNGKRVYVPVYVPKKYYKWLVNGKFGRLYFKEEDGEIYAYLTVKVEDKPAYEPKLWFGVDLGVQNLVVVADNKGREVLRFDGETVNHYKELLEKERARRQRRQMKYLNNRKFRLGSKHRNFSKYINHIIAKEIVRKAKEYQACIVLEKLRGVKRRSAKMPKWVRKLLHRWSYHDLIQKIKYKAKLEGVPVIEVSPRNTSKTCSECGYVYKRFKNQRLFHCPNCGLIIDRDLNASTNIARKGMKEFNKRAFLPALKGEASSPQRR

SEQ ID NO: 623 - protein, 72 aa, unidentified
MRDRSFAQHGGQVGEQEEDPEAFAQMIHRKQKEIERLEAQLVSRLPKGRDLTGEEFLETLATATTTQCVEAA

SEQ ID NO: 624 - protein, 82 aa, Phormidesmis priestleyi
MDTLSQESIPPWKTHRLYLQCSIDSDLLTAEGTEKVRPRKISETRKTLDNARKKEQELLVQTFRSDLTEQDKQELEKGATSI

SEQ ID NO: 625 - protein, 379 aa, Archaeoglobus profundus
MKLTLKMKVREKTKWKIQALRRAMETFRDAVNDWIDVAWKHKIADRTLHEIAYKELRQKYRNLYSNSLQDAMNWAIQIVKTELKLNPNKKPEFKTLMISFKNVDFKFENNGFVIPLNGKRVYVPVYVPKKYYKWLVNGKFGRLYFKEEDGEIYAYLTVKVEDKPVYEPKSWFGVDLGVHNLAVVADERGRKILRFDGEIVNRYKELLEKERARRQKRQMKEFNNKEHKYGCKHRSFSRYVNHVVSKEIVRKAKEYKACIVLEKLRGVKRRGARKPKRVRKLLHRWSYHDLIQKIKYKAKLEGVPVIEISPRNTSKTCSNCGFVYKRFKDQRLFHCPKCGIIIDRDLNASINIARKGREEYKKRAFLSALKSEASSPQWL

SEQ ID NO: 626 - protein, 45 aa, Richelia intracellularis
MSENIQSQAVKTGILIEVGQQPIRGSPQKQARELGLFAYQYRMAT

SEQ ID NO: 627 - protein, 226 aa, Hydrogenivirga sp.
MGTAEFFVGVDLGLRKLAVVSTSDGRINKFFDGGYVRAVSEKYQALRKRLQSKGTPSAKRHLKKLSQREKRFRTAINHKVAKEVVELVPAGGVIVLEKLKGIRKRVKVGKQNRRWIHSWNFAQLQRFIEYKAKAKGIKVVYVDARYTSQKCSKCGHISKKNRKGQAHFVCERSGYQLNADLNAGRNIVKNYLASLEGKSGHGEASPSVWDAVNRADVGSVGCAMHG

SEQ ID NO: 628 - protein, 84 aa, Anabaena sp.
MAQFAPQNPAETQPAKSKKGKKSPTSDSERNLSKNLFDTYSNTEDNLTRCAISYLLKNGCKISNKDFNTFQHPSRSGLRCTHKS

SEQ ID NO: 629 - protein, 406 aa, Streptomyces sp.
MFCVKIVAQVKLLPASAHDADALAATLRACNRAANTASEVAFTKDLKRRNTLQDAVYHRIKADFDLGAQAAVRTIKKVCDAYAALKGNIKAGNLGPKGSKRRTRAESRPVGFRDDAAQPFDDRILTWNLDQRTVSVWTVAGRLKGIPFVCSPEAMTLLASRKGESDLVMRDGTFFLIATIDVPEPLVSEPDGSLGVDLGIVNIATTSDGQIMAGRRLNRYRKRHRDLRRKLQKKRTKAAKRALKRMRRREARHAAHTNHIIAKRIVATAERTSRGIALEDLGGIRQRVTARKDQRARLHSWAFAQLGTFVEYKARRAGVAVVHVGPRNTSRQCSECRHTHRTNRVDQARFVCRSCGIVLHADHNGSRNIAHRGEAVWQRGAVKRPSTAQRYTGRRGPTRQPVALHL

SEQ ID NO: 630 - protein, 403 aa, Streptomyces sp.
MKIVAQVKLLPASAHDADALAATLRACNRAANTASEVAFTKDLKRRNTLQDAVYHRIKADFDLGAQAAVRTIKKVCDAYAALKGNIKAGNLGPKGSKRRTRAESRPVGFRDDAAQPFDDRILTWNLDQRTVSVWTVAGRLKGIPFVCSPEAMTLLASRKGESDLVMRDGTFFLIATIDVPEPLVSEPDGSLGVDLGIVNIATTSDGQIMAGRRLNRYRKRHRDLRRKLQKKRTKAAKRALKRMRRREARHAAHTNHIIAKRIVATAERTSRGIALEDLGGIRQRVTARKDQRARLHSWAFAQLGTFVEYKARRAGVAVVHVGPRNTSRQCSECRHTHRTNRVDQARFVCRSCGIVLHADHNGSRNIAHRGEAVWQRGAVKRPSTAQRYTGRRGPTRQPVALHL

SEQ ID NO: 631 - protein, 374 aa, Mariprofundus ferrinatatus
MMRTASIKLDVTAEQSASLRDLQSAYVDACNKLVPVASDHRCWNRVALHALAYTLLRSTTPLGSQMVCNAIYSVCKAYKAQKELGRIRKDKPVPIIGFKKSSIHFDKRTYTIKGDMVSLYTLGGRISVPMIMGQHQHEMLRSGMPKEAELICRKGKWYFNLVVEKEDTEKLTSGPVVGVDVGENNLAATSIGKVYGGGDLRHRRDKHLALRRRLQSNGSRSAKQKLRQVSGKEQRRVKHINHETSKSIVQEAQKTGASKITMEDLNHIRDNIKAGKRVRTRLHRWAFRQLQTFIQYKAEAVGITVEFVNPAYTSQTCSACGSLGNRDRHRFECLCGLRAHADLNASRNLARIGSGIPLSKAFVNTPDVPSGIDA

SEQ ID NO: 632 - protein, 288 aa, Thermococcus sp.
MLDDHLFKLDLEAGVIKLSAPGGRIPLKFYPAKYHEKFKSWRVGQAWLVKTPKGVFINVVFSKEVEVGEPETFVGVDLNENNVTLSLPNGGFVQIITHEREIRTGYFVKRRRIQKKMRAGRKRKELLEKYGERERNRLNDLYHKLANKIVELAEKYGGIALEDLTEIRDSIRYSAEMNGRLHRWSFRKLQSIIEYKAKLRGIKVVFVNPAFTSSLCPICGEKLSPNGCRVLKCKCGFEADRDVVGSWNIRLKALKMWGVSVPPESQPMKLGGWKPARYEINTLHTLYG

SEQ ID NO: 633 - protein, 349 aa, Vulcanibacillus modesticaldus
MEQTVKIKLLPTKEQEYHLINISREYIKTVNTLVADMVQAEKILKLSSKDVHVSMPSAVKNQAIRDAKSVYRKVKKLKRVPILKKSVCIWNNQNYKIKESVIEFPVYINGKSKRIAVKAILTEYQHNLLKNQLGILRITKKSNKWIAQIAVKIPGPTQNNSDIVMGVDLGLKVPAVAVTSTGKTRFFGNGRQNKYIRRKFKSQRRELGKSKKLNAIRKLNDKETLWMKDKDHKISRTLVDFAIKNNVSVIRLEKLSNIRNTARTSRKNEKNLHTWSFYRLAQYIEYKAKLAGIKVEYVDPKYTSQICPMCGKRNHTKDRKYQCSCGFKTHRDRVAGINIINAPVIDGVA

SEQ ID NO: 634 - protein, 394 aa, Thermococcus paralvinellae
MISYVYDRNITSFYRLKNAKYKELRNRYLYLPSHYIYTACQMATSIFKSYRKKRRKGKAKGKPVFKKDVIMLDDHLFKLDLENGIIRLSTPNGRISLEFYPAKYHEKFKDWRVGQAWLVRTPKGVFINIVFSKEIEIGEPKSFIGIDLNENNVTLSIPNGEFVQIITHEREIRTGYFVKRRKIQKKIRTGKRRKALLQKYGEREKNRLNDLYHKIANVIVEFAKRYGGITLEDLTEIRESIMYSAKMNGRLHRWSFRKLQSIIEYKAKLNGIKVVFVNPSYTSSRCPICGNKLSPKGHRILECSNCGLKTNRDVIGSWNIRLKALKMWGVSVPPESQPMKTGGWKGKFQNGIEFSTIKAEYFFDNPPIWHSQKFSVHALFDVQTTIRRSEYGRF

SEQ ID NO: 635 - protein, 393 aa, Pyrococcus sp.
MPSETIKLTAKFKLKNPPRELDDLFSTYHKIVNYLITYAFENNVTSFYRLKKETYKNLRKEYSSLPSHYLYTACQMATSIYKSYRKRKRKGKARGKPVFKKEVIMLDDHLFKLDLEKRVIKLSTPSGRIILEFYPAKYHEKFKGWRIGQAWLIKTPKGVFVNVVFSKEVEVGEPKAFVGVDLNENNVTLSLPNGEFVQIITHEREIRTAYYLKRRRVQRKIRAGRRREELLEKYGERERNRVNDLHHKLANKIVELAEKYGGIALEDLTEIRESIRYSAEMNGRLHRWSFRKLQSMIEYKAKLRGVKVVFVNPAYTSSLCPVCGGKLSPNGHRVLKCSNCGFEADRDVVGSWNIRLKALKMWGVTVPPESHPMKMGGWKPTRYEINAPHTTNG

SEQ ID NO: 636 - protein, 388 aa, Thermococcus celer
MPSETIKLAAKFKLKNPPNGLDGLFQTYREIVNTLITHAHENNITSFYRLKKETYKKLRKEYSELPSHYLYTACQMATAIYKSYRKRKKKEKAKGKPAFKKEVIMLDDHLFKLDLKGEVKLSTPGGRVSLEFYPARYHEKFRGWKVGQAWLVKTSKGVFVNVVFSKEVEVGEAKSFVGVDLNENNVTLSLPDGEFVQVITHEREIRTGYYVKRRKIQKKLKAGKRREKLLEKYGGREKNRLNDLYHKIANKIVELAEEYGGIALEDLTNIRESIRYSAEMNGRLHRWSFRKLQSIIEYKAKLRGVSVVFVDPAYTSSRCPVCGGKLSPNGYRGVKCECGFEADRDVVGSWNIRLRALKMWGVSVPPESHPMKMGGWKVGRNDVYKSYG

SEQ ID NO: 637 - protein, 380 aa, Chloracidobacterium thermophilum
MLRTASIRLNVGPDQAAALAALQAAYADACNRLVPTVVEHRCWNRVALHHLAYARLRKETPLGAQMVCNAIFSVCKAYKAQKELGRIRKDAPVPAVHFNRASVHFDKRTYAIKGECLSLYTLSGRIAVPMVLGEHQRRILASGKAKEAELVCRKGRWYFNLVVESEDSDPIASGRVMGVDVGENHLAATSTGKVWGGGQLRHKRNGYLALRRRLQSNGSQSAKQKLRQVSGKERRRITHINHETSKAIVAEALRFGASKIVMEDLTHIRDRIQAGKRMRARLHGWAFRQLQSFVEYKAKAAGIAVEYVDPAYTSQTCSCCGALGRRIKHRFVCNKCGLRAHADGNASRNLARIGSGAPLPRAAVNTPDVGDVSHNCCVSQ

SEQ ID NO: 638 - protein, 396 aa, Thermococcus celer
MPNETIKLTAKFKLKEIPDGLDGLFQTYREIVNTLITHAHENNITSFYRLKKETYKSLRKEYPELPSHYLYTACQMAAWIYKSYRKRKKKGKAKGRPVFRKEVIMLDDHLFKLDLDGKIIKLSTPNGRISLEFYPARYHEKFRGWKVGQAWLVKTPKGVFVNVVFSTEVEVGEAKTFVGVDLNENNVTLSLPDGEFVQIITHEREIRTGYFLKRRRIQKKFRAGKKREKLLEKYGGREKNRLNDLYHKIANKIVELAEEYGGIALEDLTNIRDSIRYSAEMNGRLHRWSFRKLQSIIEYKAKLRGVSVVFVDPAYTSSRCPVCGGKLSPNGYRRVKCECGFEADRDVVGSWNIRLRALKMWGVPVPPESHPMKMGGWKVSRNDVYKSYGQPERVPY

SEQ ID NO: 639 - protein, 389 aa, Thermococcus celer
MPNETIKLTAKFKLKEIPDGLDGLFQTYREIVNTLITHAHENNITSFYRLKKETYKSLRKEYPELPSHYLYTACQMATAIYKSYRKRNKKGKAKGRPVFRKEVIMLDDHLFKLDLDGKIIKLSTPNGRISLEFYPARYHEKFRGWKVGQAWLVKTPKGVFVNVVFSTEVEVGEAKTFVGVDLNENNVTLSLPDGEFVQIITHEREIRTGYFLKRRRIQKKFRAGKKREKLLEKYGGREKNRLNDLYHKIANKIVELAEEYGGIALEDLTNIRDSIRYSAEMNGRLHRWSFRKLQSIIEYKAKLRGVSVVFVDPAYTSSRCPVCGGKLSPNGYRRVKCECGFEADRDVVGSWNIRLRALKMWGVPVPPESHPMKMGGWKVGRNDVYKSYG

SEQ ID NO: 640 - protein, 419 aa, Thermococcus nautili
MRTSVAVNRIWVGQRPIHPTDIPLGIINTNYMQTLINFVVVVIIMCGIKLTQTFKLMKPNKRKRELLDATIERFKECVNAWISEIEQLGEYPTRKNVHSFAYKKIREQFKDLHSNVVQEAMNRAIEVYRAWLKTKGQKPVFTADVVSFKNVDVKIDRHFINVPLINKERVWLPMHVPKKLRKFLKMKHGRVQISKVDDEYYAQISFEVPEPKPYEPKGWLGVDIGINHIVVISDDKGKINKFYDNAIAWKKSVEYRRARLQFLKDKRTKKGAWRILKRLSHKEKNKMAYINHKIAKEIVELAKHYHYGIAIENLKGIRHHYNAKRHRKRLHKWAYGDLIDKIVYKAKLNGVPVVFVDPRNTSRTCSKCGYLVEKGVKGRWFRCPKCGFQLDRDLNAARNIAKRAFRLAPWGASSSQRRW

SEQ ID NO: 641 - protein, 393 aa, Thermococcus celericrescens
MPSETIKLTAKFKLKNPPEELNDLFSTYREIVNYLISYAFENNITSFYRLKKETYKSLRKEYPKLPSHYHYTATQMATMIYRSFRKRKKKGKASGRPVFKKEVIMLDDHIFKLDLGAGIIKLSTPSGRIVLEFYPAKYHEKFKEWKVGQAWLVRTPKGVLINVVFSREVDVGEPKTFVGVDLNENNVTLSLPNGEFVQIITHERELRTGYFLKRRKIQRKLRTGKRRKELLEKYGQRERNRLNDLYHKLANKIVELAEKYGGIALEDLTEIRDSIRYSAEMNGRLHRWSFRKLQSIIEYKAKLKGIKVVFVNPAFTSSLCPVCGEKLSPKGHRVLKCPNCGFEADRDVIGSWNISLRALKMWGVSVPPESPTMKAGVGKVSRNDAYELYKSYG

SEQ ID NO: 642 - protein, 393 aa, Thermococcus sp.
MPNETIKLTAKFKLKGTPDGLDDLFSTYREIVNFLITYAFENNITSFYRLKKETYKSLRKEYPELPSHYLYTACQMATAIFKSFRKRKKKGKTRGRPVFKKEVIMLDDHLFKLDLENKIIKLSTPNGRIQLEFYPAKYHEKFKDWKVGQAWLVRTPKGIFLNVVFSREVEISEPNAFVGVDLNENNVTLSLPNGEFLQIITHEREIRTGYFVKRRKIQQKIQAGKKRKELLEKYGEREKNRLNDLYHKLANKIVEVAEKYGGIALEDLTEIRESIRYSAEMNGRLHRWSFRKLQSIIEYKAKLKGVKVVFVNPAFTSSLCPICGEKLSPNGHRVLKCSNCGFEANRDVVGSWNVRLRALKMWGVTVPPESPTMKTGVGKVSRNDVYELYTSYG

SEQ ID NO: 643 - protein, 375 aa, Thermococcus nautili
MCGIKLTQTFKLMKPNKRKRELLDATIERFKECVNAWISEIEQLGEYPTRKNVHSFAYKKIREQFKDLHSNVVQEAMNRAIEVYRAWLKTKGQKPVFTADVVSFKNVDVKIDRHFINVPLINKERVWLPMHVPKKLRKFLKMKHGRVQISKVDDEYYAQISFEVPEPKPYEPKGWLGVDIGINHIVVISDDKGKINKFYDNAIAWKKSVEYRRARLQFLKDKRTKKGAWRILKRLSHKEKNKMAYINHKIAKEIVELAKHYHYGIAIENLKGIRHHYNAKRHRKRLHKWAYGDLIDKIVYKAKLNGVPVVFVDPRNTSRTCSKCGYLVEKGVKGRWFRCPKCGFQLDRDLNAARNIAKRAFRLAPWGASSSQRRW

SEQ ID NO: 644 - protein, 213 aa, Candidatus Wildermuthbacteria bacterium
MFQTAEIPEENIKDVEEFLGVDFGLRHIATLSTGEKMSGKDLENYRIKRQRVRSSLQSKCTTNARKVLKRLSGKERTTARIVNHTIAKTIVEKAKAENKGIALENLKGIRERSLKKGRVFRSRVGRWNFSFLRQAIEYKARLAGIPVVLVNPRHTSQRCFRCGNLGSRKGESFKCACGFIEHADVNAARNIAFLALPVNQGEKSAMCPVLSHG

SEQ ID NO: 645 - protein, 389 aa, Streptomyces glauciniger
MVTSVKIVTQVKLLPEAGQAAALRSTLRTVNELANWVADVAFAHDVPREYELRKHTYAHLKAQGLGAQAAQHVIKKVRDAYTTLHANLLGGNLGKPGSKRRIKAESKPIAFRPQAAQPYDDRCLSWQYDQQTVSIWTTAGRIKNVRFACSAGALKTLQQYRKGESDLIERDGIFYLVAVCEVPEAVPYEPDGIIGVDLGIVNIATTSTGYQAAGRRLNRYRKRQLALRSKLQKKRTRSAERRLKERRSREARHVKNTNHVIAKTIVTEAERTSAGIALEELKGIRQRVRLRKPQRVTLHSWAFAQLADFIVYKARRAGVPLVYVDPAYTSQMCCECGHTDKRNRVDQGLFICRNRGVVAHADRNASHNIAARGAVVWTAGRESRVPATP

SEQ ID NO: 646 - protein, 377 aa, Lachnospira multipara
MQLSETLKLYMTNEQKALVVMTMNEYISTVNSLVSVAISGISISKYTTADVKANLPSALTNQCIRDAKSIVKKHNKACRDADRKNAKFANQGKDIKIVATVPTLKKPCCYINNQNFKINGDYIEFPVMVKGKSKRLSVKTKMTDNQKSVFANSKLGTMRIVYKGNKIVAQVVYETVEPTYDSEGNVMGVDLGIKCPAVSYTSDGNIKFYGNGRKNKYMRRHYKYLRKKLQKAKHINAVKRINDKEQRIMRDIDHKISHDIVKTAVTHNVKTIKLERLANIRSTTRTSRKNNHSLHNWSFYRLAQFIEYKAKLAGIAVEYVNPAYTSQTCPVCGHVHHANDRIYACKCGFHIHRDILGAMNICNSTEYVGDNDIRHTA

SEQ ID NO: 647 - protein, 351 aa, Streptomyces griseoluteus
MAFAKGLKRRNVLQKEVCFALKANYDLGAQPAVRVVKKVCDAYATLKANIRAGNLGREGSKSRLRAESKPIVFRGDAAQPFDDRILTWNLDARTVSIWTVAGRIKYIPFVCSDQAFDLLASRKGESDLVMRDGVFFLIATLDIPEPEVSEPDGFLGVDLGIVNIATTSDGEIMAGRGLNRYRQRHRDLRQKLQKKRTKSAKRVLKRVRRREARHAANTNHIIAKQLVATAERTSRGIALEDLSGIRQRVTAKKDQRARLHSWAFAQLGGFVEYKARRAGVPVVFVDPRNTSRQCSECRHTHRTNRVTQARFVCRSCGTVKHADHNGSRNIAHRADAVWKRGAVNRPGSGAS

SEQ ID NO: 648 - protein, 397 aa, Desulfurobacterium thermolithotrophum
MNMKLQRTLKLVLKPTEEQKQTLLETIEQYKFAYNYTCKVGWSAKTWNGIELHKLTYYTVREKTSLPSQLVISARVVATESLKSAIKRKKKGLKSKCPQSNNPAIRYDRRSYTVWLEREEVSLATVKGRQKFKVKVPDYFKQYLDWRVTSANLKYDKRLKKFFLNITCEKEFPDVEPVNYFVGVDLGLRNLAVVSTPDGKINKFFDGGHIRAVSERYFALRKRLQSKGTPSAKRHLKTLSQKEKRFRTAINHRIAKEIVSLVPAGGVIVLEKLKGIRKRIKVNKQNRRWIHSWNFAQLQQFIEYKAQAKGIRVVYVDARYTSQKCSRCGHISRSNRIDQSHFVCKHCSYSLNADLNASRNIVKNYLASLQRGEVGTGSGISLPVGRCQPSQCSGATC

SEQ ID NO: 649 - protein, 393 aa, Desulfurobacterium thermolithotrophum
MNMKLQRTLKLVLKPTEEQKQTLLETIEQYKFAYNYTCKVGWSAKTWNGIELHKLTYYTVREKTSLPSQLVISARVVATESLKSAIKRKKKGLKSKCPQSNNPAIRYDRRSYTVWLEREEVSLATVKGRQKFKVKVPDYFKQYLDWRVTSANLKYDKRLKKFFLNITCEKEFPDVEPVNYFVGVDLGLRNLAVVSTPDGKINKFFDGGHIRAVSERYFALRKRLQSKGTPSAKRHLKTLSQKEKRFRTAINHRIAKEIVSLVPAGGVIVLEKLKGIRKRIKVNKQNRRWIHSWNFAQLQQFIEYKAQAKGIRVVYVDARYTSQKCSRCGHVSRSNRIDQSHFVCKHCSYSLNASRNIVKNYLASLQRGEVGTGSGISLPVGRCQPSQCSGATC

SEQ ID NO: 650 - protein, 397 aa, Desulfurobacterium thermolithotrophum
MNMKLQRTLKLVLKPTEEQKQTLLETIEQYKFAYNYTCKVGWSTKTWNGIELHKLTYYTVREKTSLPSQLVISARVVATESLKSAIKRKKKGLKSKCPQSNNPAIRYDRRSYTVWLEREEASLATVKGRQKFKVKVPDYFKQYLDWRVTSANLKYDKRLKKFFLNITCEKEFPDVEPVNYFVGVDLGLRNLAVVSTPDGKINKFFDGGHIRAVSERYFALRKRLQSKGTPSAKRHLKTLSQKEKRFRTAINHRIAKEIVSLVPAGGVIVLEKLKGIRKRIKVNKQNRRWIHSWNFAQLQQFIEYKAQAKGIRVVYVDARYTSQKCSRCGHISRSNRIDQSHFVCKHCSYSLNADLNASRNIVKNYLASLQRGEVGTGSGISLPVGRCQPSQCSGATC

SEQ ID NO: 651 - protein, 397 aa, Desulfurobacterium thermolithotrophum
MNMKLQRTLKLVLKPTEEQKQTLLETIEQYKFAYNYTCKVGWSAKTWNGIELHKLTYYTVREKTSLPSQLVISARVVATESLKSAIKRKKKGLKSKCPQSNNPAIRYDRRSYTVWLEREEVSLATVKGRQKFKVKVPDYFKQYLDWRVTSANLKYDKRLKKFFLNITCEKEFPDVEPVNYFVGVDLGLRNLAVVSTPDGKINKFFDGGHIRAVSERYFALRKRLQSKGTPSAKRHLKTLSQKEKRFRTAINHRIAKEIVSLVPAGGVIVLEKLKGIRKRIKVNKQNRRWIHSWNFAQLQQFIEYKAQAKGIRVVYVDARYTSQKCSRCGHISRSNRIDQSHFVCKHCSYSLNADLNASRNIVKNYLASLQRGEVGTGSGISLPVGRCQPSQCSGATW

SEQ ID NO: 652 - protein, 392 aa, Thermococcus sp.
MSSETIKLTAKFKLKEIPEGLDDLFSTYREIVNYLITYAYEANITSFKRLKKETYKELREKYPQLSSHYLYTACQMATSIYKSYRKRKRKGKAKGKPVFKKEVIMLDDHLFKPDLEKGVIKLSTPKGRIQLEFYPAKYHEKFKDWKVGQAWLIKTPKGAFINAVFSKEVEVRESKAFVGVDLNENNVTLALPNGEFVQIITHEREIRTGYFVKRRKIQKKLKTGKRRRELLEKYGEKERNRLNDLYHKLANKIVELAVKYGGIALEDLTEIRDSIRYSAEMNGRLHRWSFRKLQSIIEYKAKLKGIKVVFVNPAFTSSLCPICGGKLSPNGHRVLKCRCGFEADRDVVGSWNIRLKALKMWGVSVPPESHPMKMGGWKVSRNDIYELYKSYG

SEQ ID NO: 653 - protein, 349 aa, Streptomyces scabiei
MAFARDLKRRNGLQDAVYHRIKADFDLGAQAAVRTVKKVCDAYATLKANLRAGNYGPEGSKRRAKVEAKPIRFREGAAQPYDDRILTWNLDARTVSVWTVAGRIKGIPFVCAPGAMRLLASRKGESDLVMRDGMFFLVATIDAAEPEAYEPDGFLGVDLGIVNIATTSDGEIMAGRQVNRYRQRKRDLRTRLQKKRTKSTARVLKRQRRKESRYATQRNHIIAKKLVATAERTSRGIGLEDLSGIRQRVTARKDQRARLHSWAFAQLGAFVEYKAKRAGVPVVHVDPRNTSRQCSECWHTHRTNRTGQARFACRSCGIVLHADHNGSRNIAHRADAAWKRGAVNRPSTA

SEQ ID NO: 654 - protein, 389 aa, Candidatus Korarchaeum cryptofilum
MPLETVKLTASFKLDGSFPESLFSTYREVLGQLLDYAWEKGVTSFKRLKAEKYCELRARYPSLPSHYIYTACQMACSIYKSFRKLKRRGATKAEKPVFKKEVIMLDDHLFSLDLEGWEASIAVGGSRVRLKLLHGTYHEKFKGMRVGQAWLVKRGNDLYLKAVFSKVVEVAEMDERAVAVDVNENNVTFGTMERVVNVETRERIIRTAYFLKRRRLQSKPRLNEKPLLAKYRGRERRRVEAIYHEVANRIIDEAKKVKASTIVLEDLTNIRERIKRSKELNGRLNRWSFRKLQRIVEYKAKLAGLNVVYVEARGTSSLCPICGERLSPNGHRRLKCRCGLEEDRDVVAVKNLLRKYRMDVGASSVHPEGPPMTTERDEEYEGGRDESLF

SEQ ID NO: 655 - protein, 377 aa, Sharpea azabuensis
MQLSETVKLYMTGEQKSLIVATMTEYINTVNSLVSDAANGISISKYTTADVKANLPSALTNQCIRDAKSIVKKYNKACRDADRKNNKLAKQGKNITVTATLPVLKKTCCYVNNQNFKINGDYIEFPVMVNGKSKRLSVKTKMSDKQKSVFANSKLGTMRIVYKGSKIVAQVVYETIEPTYTTEGNVMGVDLGVKCPAVSYISDGSVKFYGNGRKNKYMRRHYRCLRKKLQKAKHIDAVKRINDKEQRIMKDIDHKLSHDVVETAVAHNVKTIKLERLANIRSTTRTSRKNNHSLHNWSFYRLAQFIEYKAKLAGIAVEHVNPAYTSQTCPVCGHVHHANDRNYTCKCGFHIHRDILGAMNICNSTEYVGDSNIRHTA

SEQ ID NO: 656 - protein, 368 aa, Dethiobacter alkaliphilus
MITMQITVKIKLQPTKKQADLISATKNEYIRLVNQIVSEYVEADENLKYSSKDVKAFLPSALKNQAIQDARSIFVKYKKQRIANDRLEPENQREIKVPILKKPVSIWNNQNYSLQSNILSFPVWLDGKSKRIAVNAVLTEYQLNKLTGKLGSLRITEKSGKYIAQIAVDAVEEHTDADKTMGVDVGLKIPAVAVVEGGKTKFFGNGRQNKFIKRKHRSTRRKLGQLKKLSAIRKRHDKEQRWMKDQDHKVSRQIINFAKEHNVGTIHLEKLSGIRQTARTSRKNEKNLHNWSFYRLAQYIEYKATLAGMKVKFVDPKHTSQKCPQCCALNKAKDRNYQCGCGFIAHRDRVGAINIISATVADGHSLPA

SEQ ID NO: 657 - protein, 365 aa, Dethiobacter alkaliphilus
MQITVKIKLQPTKKQADLISATKNEYIRLVNQIVSEYVEADENLKYSSKDVKAFLPSALKNQAIQDARSIFVKYKKQRIANDRLEPENQREIKVPILKKPVSIWNNQNYSLQSNILSFPVWLDGKSKRIAVNAVLTEYQLNKLTGKLGSLRITEKSGKYIAQIAVDAVEEHTDADKTMGVDVGLKIPAVAVVEGGKTKFFGNGRQNKFIKRKHRSTRRKLGQLKKLSAIRKRHDKEQRWMKDQDHKVSRQIINFAKEHNVGTIHLEKLSGIRQTARTSRKNEKNLHNWSFYRLAQYIEYKATLAGMKVKFVDPKHTSQKCPQCCALNKAKDRNYQCGCGFIAHRDRVGAINIISATVADGHSLPA

SEQ ID NO: 658 - protein, 390 aa, Thermovibrio ammonificans
MNMKLQRTLKLVLKPTEEQKQILLETLEQYKFAYNYTCRIGWEAETWNGVQLHKLTYYTVRNKTSLPSQLVISARVVATESLKSAIKRKKKGLKSRCPESKNPVIRYDKRSYTVWLNREEVSLATVGGRQKFKVKIPDYFKQYLDWKVTSTNLKYDKKLKKFFLNITVEKDFPDVEPVDFCVGVDLGLRKLAVVSTPDGKINRFFNGGHIRTVSERYFALRKRLQSKGTPSAKRHLKKLSQKEKRFRTAVNHKIAKEIVALVPAGGVIVLEKLKGIRQRIKVNKQNRRWIHSWNFAQLQQFIEYKAQAKGIRVVYVDARYTSQKCSRCGYISRSNRIDQSHFVCKHCGFSLNADLNASRNIVKNYLTSLHRGEVRTGAGISAPVGRCQPS

SEQ ID NO: 659 - protein, 388 aa, Thermovibrio ammonificans
MKLQRTLKLVLKPTEEQKQILLETLEQYKFAYNYTCRIGWEAETWNGVQLHKLTYYTVRNKTSLPSQLVISARVVATESLKSAIKRKKKGLKSRCPESKNPVIRYDKRSYTVWLNREEVSLATVGGRQKFKVKIPDYFKQYLDWKVTSTNLKYDKKLKKFFLNITVEKDFPDVEPVDFCVGVDLGLRKLAVVSTPDGKINRFFNGGHIRTVSERYFALRKRLQSKGTPSAKRHLKKLSQKEKRFRTAVNHKIAKEIVALVPAGGVIVLEKLKGIRQRIKVNKQNRRWIHSWNFAQLQQFIEYKAQAKGIRVVYVDARYTSQKCSRCGYISRSNRIDQSHFVCKHCGFSLNADLNASRNIVKNYLTSLHRGEVRTGAGISAPVGRCQPS

SEQ ID NO: 660 - protein, 393 aa, Thermococcus sibiricus
MPSETIKLTAKFKLKETPDGLDELFSTYRDIVNSLITYAFENNITSFKRLKKEKYEELRKDYPELPSHYHYTACQMASSIYKNYRKRKRRGKANGRPVFKKDSIMLDDHLFKLDLEKGIIKLSTPKGRITLEFYPAKHHGKFRGWKVGQAWLVRTPKGVFINVVFSKEVEVKEPEDFVGVDLNENNITLSLSDGEFVQIITHEREIRTGYFVKRRKIQKKVKVGKKRQRLLEKYGERERNRLDDLYYKLANKIVELAEKYGGIALEDLTGIRESIRYSAEMNGRLHRWSFHKLQSIIEYKAKLKGVKVVFVDPAYTSSLCPICGGKLSPNGHRVLKCSNCGFEADRDVVGSWNIRLRALKMWGVTVPLESPPMKTGGGKVIRYDSFTCFKSSG

SEQ ID NO: 661 - protein, 351 aa, Paenibacillus forsythiae
MQTVTIQIRIFPAHPSVLVDMGNEYIRTVNELTEQAEASGTFPKLTSKTVHANLPSAVKNQLIRDAKSLFQKSKKNKKRPILKKRVYYVNNQNYAIGDDSLSFPVVMDGKVQRLVVPALLSDRERDMLSNSKHGLLRVVQKSAKWFVQVSIVRPTEQAAGDGIMGVDLGLKVPAVVVTSSGKTRFCGNGRKNKFIRRKYNTHRRKLGKLKKQSAIRKQRDKESRYMKDQNHKISRQIVNMAIQEKVSIIKLEKLADIRKTTRTSRKNAKNLHSWSFYQLQTFITYKAALAGIKVIEVNPAYTSQTCPSCGQRNKAKDRAYQCDCGYTAHRDRVGAINIMHKPVADGNSLSA

SEQ ID NO: 662 - protein, 393 aa, Thermococcus peptonophilus
MPSETIKLTAKFKLKNPPEGLNDLFSTYREIVNYLISYAFENHITSFYRLKKETYKSLRKEYPELPSHYHYTATQMATMIYRSYRKRKKKGKAKGKPVFKKEAIMLDDHLFKLDLDAGIIKLSTPKGRIELEFCSAKYHEKFKDWKIGQAWLVRTPKGVFINVVFSREVEVREPEAFVGVDLNENNVTLSLPNGEFVQIITHEKEIRTGYFVKRRKIQKKLRAGKKRKELLEKYGQRERNRRDDLYHKLANKIVELAEKYGGIALEDLTEIRDSIRYSAEVNGRLHRWSFRKLQSIIEYKAKLKGIKVVFVNPAFTSSLCPVCGEKLSPNGHRVLKCPKCGFEADRDVVGSWNIRLKALKMWGVSVPPESPTMKTGVGKVSRSDAYELYANYG

SEQ ID NO: 663 - protein, 363 aa, Mesotoga sp.
MQITVKIKLEPTREQDTLLQATTQEYIRLVNHIVADFVKSDTPLKYTSKTVVAELPSAVKNQAIQDAKSVFEKYKKNVCANARLKPEDQKEVRVPILKKPVGIWNNQNYSLKENILSFPVLIADKSKRIEVKAVLTDYQRERLNGKLGSLRITQKSGKYIAQIAVEMDEEQSKTSNKIMGVDLGLKNPAVAVVEGGKTKFIGNGRQNKFIKRKHRSVRRKLGELKKLKAIKKRHDKEQRWMKDQDHKISRRIVNSAKENHVAVIRMERLTNIRNTAKTSRKNEKNLHTWSFYRLAKYIEYKAILAGIKIEYVNPEYTSQKCPKCGKRNKANDRKYVCGCGFKTHRDRLGAINIISATVADGVA

SEQ ID NO: 664 - protein, 399 aa, Methanocaldococcus sp.
MSNEYLETIKLTARFKIKQTPNEIVGLFSTYKTIVNELLNYAFENNITSFKRLKSEKYKELREKYQKLPSHYLYTACQITTSIFKSWRKRHRKGRASKKPDFKGSVIMLDDHLFRLDLDNGLARISTPKGRVEVELFVSEYHKKFKDWKVGQAWIVRRKDAYYLNVVFSKNVLIKEGESVVGVDLNENNVTIATTNGIIQIITNERTVRTSYYVKRRKIQKKVENEDKKKELLEKYGNRERNKITDIYHKVVNKIIEIAKSVNGVIALEDLKEIRNKIKYSKKLNGRLHRWSFRRLQEVIKYKAKLNGIKVIFVNPHYTSSRCPICGGKMSPNGHRVLKCEDCGCILDRDVVGSLNIMLRGFKLLFNKPKDVGSPVPPESPLLGEDSPLQIIQQIIQMF

SEQ ID NO: 665 - protein, 382 aa, Staphylothermus hellenicus
MTGKFKIKENVEIDRLFKIYREIVNYLINYAYENNITSFYKLKSKTYRNLREKYPNLPSHYIYTACQIATSIYRSYRKKKRRGEARNKPVFKKDSIMLDDHLFKLDIEKGVLKLSTPKGRITLKVYVSNYHMKFKDWRTGQAWLVKKDNGIFLNVVFSREVEIGEPKDFIGVDLNENNVTIALPNGFARFETREREIRTAYYVKRRKIQKKIRAGKKRKKLLEKYGKRERNRLNDLYHKLANKIVELADGYGIALENLKNIRKSIRYSKEINGRLHRWSFRRLQSIIEYKAKLKGIKVVYVDPSYTSSLCPICRGKLSPNGHRVLKCMRCGFEADRDIIGSLNIRLKALKMWGVSVPPESPSMKPERGRLAVIINTYNKSYG

SEQ ID NO: 666 - protein, 392 aa, Thermococcus sp.
MLSGTIKLTAKFKLKNPPEGLDDLFSLYREIVNFLLTYAYENNITSFYRLKKETYKELRGKYPQLPSHYLYTACQMATSIYKSYRKRKRKGKANGKPVFKKEVIMLDDHLFKLDLEAGVIKFSTPSGRIPLEFYPAKYHEKFESWRVGQAWLVKTPEGVFINVVFSREVEVGEPETLVGVDLNENNVTLSLPNGGFVQIITHEREIRTGYFVKRRKIQKKLRTGKKRKELLEKYGLRERNRLNDLYHKLANKIVELAEKYGGIALEDLTEIRDSIRYSAEMNGRLHRWSFRKLQSIIEYKAKLKGVRVVFVNPAFTSSLCPICGEKLSPNGCRVLKCLNCGFEADRDVVGSWNIRLRALKMWGVSVPPESHPMKPEGGSLPVTKLTPYTLYG

SEQ ID NO: 667 - protein, 360 aa, Armatimonadetes bacterium
MDHVETVRLHPPDPAQLIAWLERFNAAANWLSGVAFRERLWHWLPLQRRAYREVRERFQIPAAATVVVIRKVAYAYRNKQRRQHQATFRRRGAIPIYKHRYKRDGTVSMYGFRIPFTARPQAWLSSRHQAVLCYRRGKFILHQVVEVDVPPPAPVQDYLGCDLGTVNLLTDSEAEAYSGQAVEEKRRIYVHRRARLQKRGTRAARRKLRQISGRQGRYQRDVNHRIAKRVVAKAQRLCCGIALEDLRGIRDRIKARRRQRARLHNWAFGQLRQFIVYKAAKAGIPVVFVDPANTSRTCPVCGHVDKRNRRSQAAFSCRRCGHEEPADVIAARNVRAWARGDAPMVASARAATSPHPTSRG

SEQ ID NO: 668 - protein, 392 aa, Staphylothermus hellenicus
MLNRRSETVKMTGKFKIKENVEIDRLFKIYREIVNYLINYAYENNITSFYKLKSKTYRNLREKYPNLPSHYIYTACQIATSIYRSYRKKKRRGEARNKPVFKKDSIMLDDHLFKLDIEKGVLKLSTPKGRITLKVYVSNYHMKFKDWRTGQAWLVKKDNGIFLNVVFSREVEIGEPKDFIGVDLNENNVTIALPNGFARFETREREIRTAYYVKRRKIQKKIRAGKKRKKLLEKYGKRERNRLNDLYHKLANKIVELADGYGIALENLKNIRKSIRYSKEINGRLHRWSFRRLQSIIEYKAKLKGIKVVYVDPSYTSSLCPICRGKLSPNGHRVLKCMRCGFEADRDIIGSLNIRLKALKMWGVSVPPESPSMKPERGRLAVIINTYNKSYG

SEQ ID NO: 669 - protein, 257 aa, Haloterrigena salina
MGTLHYDEQEDDFYLHIVIQKEVEEREGDRILGVDLNLKNVAVTSTGSFYDGGKLLWGQNHYFRVRRSLQDKGTRSAKQALARLSGRENRFVLDRLHTISRRIVEEARHYDCSYIAVEDLTHIRERMDASDDQLKRQMHQWAFRELQEMIQWKATEYGIRVESVNPAFSSQTCSKCGHQSSTNRNSDGWFECNECGYEIDGDYNASKNIGMRLLSLPEGKRPSGLGDGHLALKSGTVTLNGDYTAYDTVSAEGESHA

SEQ ID NO: 670 - protein, 392 aa, Thermococcus sp.
MPSETIKLTAKFKLKTEPEGLEDLFSLYQEIVNFLITYAFENNITSFYRLKKETYKSLREQYPELPSHYIYTACQMATSIYKSYRKRKRRGKANGKPTFKKKVIMLDDHLFKLDLEGGFIKLSTPSGRLELEFYRAKYHEKFREWKIGQAWLVKNPKGVFLHVVFSKEVEVRESKAVVGVDLNENNVTLSLPDGNFIQIITHEKEIRTGYFVKRRKIQRKLRAGKKREELLEKYGRRERNRLNDLYHKLANKIVELAEKYGGITLEDLTEIRDSIRYSAEMNGRLHRWSFRRLQAIIEYKAKLKGVSVVFVDPAYSSSLCPICGGKLVPNGHRVLKCECGFEADRDVVGSWNIRLKALKMWGVSVPPESPPMKTGGGKPTRYEINALHALYW

SEQ ID NO: 671 - protein, 385 aa, Streptomyces sp.
MKIVTQVKLVPETDQAAALRSTLRTVNDLATWVSDVAFVNDVPREYDLRRHTYAHLKSEGLGAQAAQHVIKKVRDAYTTLHANLRAGNLGKPGSKRRRKAESKPITFRPEAAQPYDDRCLSWQYDTQTVSIWTTAGRIKNVRFACSADAFKVLQHYRKGESDLIERDGIFYLTATCEIPEAETYEPDRFIGVDLGIVNIATTSTGYQAAGRGLNRYRKRQLALRSKLQKKRTKSAKRRLKERSRREQRHVKNTNHIIAKTIVTEAERTSAGICLEQLKGIRQRVRLRKPQRVALHSWAFAQLGDFIVYKAKRAGVPLVFVDPSYTSQTCAECGHVDKRNRVDQRLFICRKCGVVAHADRNASHNIATRGETVWNAGRESRVPATP

SEQ ID NO: 672 - protein, 358 aa, Gracilibacillus timonensis
MSQTITIKVKLIPTKEQASILSEMSKTYISVINTLVSEMVDEKKSTKKSSKDISVSLPSAVKNQAIKDAKSVFKKGKKSKYKVIPILKKTVCVWNNQNYSFDSTHISMPIMMDGKAKKIPIRALFMDKDNRNMDLLKHKLGTLRITKKANKWMAQISVTIPTVQGTGLKVMGVDLGLKVPAVAVTDDEKVRFFGNGRQNKYVKRKFRSERKALGKRKKLNAIRNSKDKEQRWMKDQDHQVSRAIVNFAKDHRVSVIRLEQLANIRQTARTSRKNEKNLHSWSFYRLSQFIEYKANLEGIKVEYVNPAYTSQTCPTCFEKNKAQDRKYTCKCGFKKHRDLVGAMNIRYAPVIDGNSQSA

SEQ ID NO: 673 - protein, 404 aa, Pyrococcus furiosus
MPSETIKLTAKFKLKEIPNGLDVLFSTYREIVNFLISYAYENNITSFYRLKKETYKNLRKEYPELPSHYHYTAIDMATKIYRGYRKRRGKAKGKPVFKKEVIMLDDHLFKLDFEKRIVKLSTPSGRIELEFYPAKYHEKFKGWKVGQAWLVKTPKGLFINVVFSREVEIREPENFIGVDLNENNVTLCLPKGEFIQIITHEREIRTGYFVKRRKIQKNLRVGKKREELLEKYGSRERNRVDDLYHKLANKIVELAEKYGGIALEDLTEIRDSIRYSAELNGRLHRWSFRKLQRIIEYKAKLRGIKVIFVNPAYTSTLCPICGGKLSPNGHRVLKCKCGFEADRDVVGSWNVRLKALKMWGVTVPPESHPMKKGGWKVSRIDITQITADQNGYFMRRLRRALLLQ

SEQ ID NO: 674 - protein, 408 aa, Haloterrigena salina
MEVQRTVRVKLDVPDERRDHLHQTIEQFDTAVNYSIENGRNDDGYFITAKTNIHDQVYHDLRDVTDLPANLCVRAYSKAVEMIKSTVADWKNGNSRPVPSFDQPIVVYDKRILTINERSATLSTVESRVEVGFDIGEYQADYLDDDDYEKRMGTLHYDEQEDDFYLHIVIQKEVEEREGDRILGVDLNLKNVAVTSTGSFYDGGKLLWGQNHYFRVRRSLQDKGTRSAKQALARLSGRENRFVLDRLHTISRRIVEEARHYDCSYIAVEDLTHIRERMDASDDQLKRQMHQWAFRELQEMIQWKATEYGIRVESVNPAFSSQTCSKCGHQSSTNRNSDGWFECNECGYEIDGDYNASKNIGMRLLSLPEGKRPSGLGDGHLALKSGTVTLNGDYTAYDTVSAEGESHA

SEQ ID NO: 675 - protein, 388 aa, Streptomyces diastatochromogenes
MLLVKVVTQVKLIPDAAQAPAIAATLYTFNSEANWVSEVAFMNGVPREYALRKLAYAQLKERGLGAQVAQHVIKKVRDAYTTLHAGLRAGNLGRPGSKRRRKAEAKPVVFRPEAAQPYDDRCLSWQYDAQTVSIWTTAGRLKNVRFACSADALKMLQQYRKGESDLIERDGVFYLVAVCEVPEAERYEPDGFIGVDLGIANIATTSTGYQAAGRGLNRYRKRQLALRAKLQKKRTKSAKRRLKERSRREARHVKNTNHIIAKTIVTEAERTSAGISLEELKGIRQRVRLRKPQRVALHSWAFAQLGDFIVYKARRAGVPVVYVDPAYTSQQCCECGHIDKKNRASQALFTCRNCGVVAHADRNASHNIARKGDAVWIAGRESRVPATP

SEQ ID NO: 676 - protein, 401 aa, Methanotorris formicicus
MSNEYLETVKLTARFKIKEIPNELTNIFPTYKTIVNNLLNYAFKNNITSFKRLKSEKYKDLRGKYKKLPSHYLYTACQMATSIFKSWRKRHRKGKASKKPDFKGSVIMLDDHLFKLDLDKGLARISTPYGRVEVELYSSDYHKKFKDWKVGQAWIVRKKNDYYLNVVFSKNILIKEGENVVGVDLNENNVTIATDENIIQIITNERTIRTSYYVKRRKIQEKIRLGDKKKELLEKYGERERNKIVDIYHKVANKIIEIAKKVGGVIALENLKEIREKVNYFKKLNGRLHRWSFRKLQEFIKYKAKLNGVRVVFVNPHYTSSRCPICGGRMSPNGHRVLKCECCGCIADRDVVGSLNIMIRGFKAIKPKDVGSSVPPESYPMKLGGWKVIRYACFNCFKISG

SEQ ID NO: 677 - protein, 388 aa, Actinobacteria bacterium
MLLVKVVTQVKLIPDAAQAPAIAATLYTFNSEANWVSEVAFMNGVPREYALRKLAYAQLKERGLGAQVAQHVIKKVRDAYTTLHAGLRAGNLGRPGSKRRRKAEAKPVVFRPEAAQPYDDRCLSWQYDAQTVSIWTTAGRLKNVRFACSADALKMLQQYRKGESDLIERDGVFYLVAVCEVPEAERYEPDGFIGVDLGIANIATTSTGYQAAGRGLSRYRKRQLALRAKLQKKRTKSAKRRLKERSRREARHVKNTNHIIAKTIVTEAERTSAGISLEELKGIRQRVRLRKPQRVALHSWAFAQLGDFIVYKARRAGVPVVYVDPAYTSQQCCECGHIDKKNRASQALFTCRNCGVVAHADRNASHNIARKGDAVWIAGRESRVPATP

SEQ ID NO: 678 - protein, 385 aa, Actinobacteria bacterium
MKVVTQVKLIPDAAQAPAIAATLYTFNSEANWVSEVAFMNGVPREYALRKLAYAQLKERGLGAQVAQHVIKKVRDAYTTLHAGLRAGNLGRPGSKRRRKAEAKPVVFRPEAAQPYDDRCLSWQYDAQTVSIWTTAGRLKNVRFACSADALKMLQQYRKGESDLIERDGVFYLVAVCEVPEAERYEPDGFIGVDLGIANIATTSTGYQAAGRGLSRYRKRQLALRAKLQKKRTKSAKRRLKERSRREARHVKNTNHIIAKTIVTEAERTSAGISLEELKGIRQRVRLRKPQRVALHSWAFAQLGDFIVYKARRAGVPVVYVDPAYTSQQCCECGHIDKKNRASQALFTCRNCGVVAHADRNASHNIARKGDAVWIAGRESRVPATP

SEQ ID NO: 679 - protein, 397 aa, Thermococcus litoralis
MPIETIKLTAKLKLKEIPNGLDALFPTYREIVNFLISYAFENNITSFYRLKKETYKSLRKEYPELPSHYHYTATQMATMIYKSYRKRKKKGKANGKPVFKKEVIMLDDHLFKLNLEAGVVKLSTPSGRIELEFYPAKYHEKFGDWKIGQAWLVRTQKGVFINVVFSREVEVREPETFVGVDLNENNVTLSLPNGEFVQIITHERELRTGYFVKRRKIQKKLRAGKKREELLEKYGRRERNRLDDLYHKLANKIVELAEKYGGIALEDLTEIRDSIRYSAEMNGRLHRWSFRKLQSIIEYKAKLKGVRVVFVDPAYTSSLCPVCGGNLSPNGHRVLKCECGFEADRDVVGSWNISLRALKMWGVTVPPESQPMKMGGWKVSRADVYELYKLRLTRTDV

SEQ ID NO: 680 - protein, 388 aa, Streptomyces hokutonensis
MIVVKIVTQVKLMPEAQQAAALSATLRTVNDLACWVSAVAFAHGVPREYELRKHTYPRLKAEGLGAQSAQHTIKKVRDAYTTLRANIRAGNLGKPKSKRRRKAESKPITFRPDAAQPYDDRCMSWQYDQRTVSIWTTEGRLKAVRFVCSADALKVLQQYRKGESDLIERDGVFYLVATCEVPEAETYEPDGFIGVDLGIVNIATTSTGYQAAGRALNRYRKRQLALRAKLQKKRTKSAKRRLKERSRREARHVKNTNHIIAKTIVTEAERTSAGISLEELKGIRQRVRLRKPQRVALHSWSFAQLGGFIVYKAKRAGVPLVFVDPAYTSQTCAECGHVDKRNRIDQGLFICRGCGVVAHADRNASHNIATRGEIVWNAGRESRVPATR

SEQ ID NO: 681 - protein, 275 aa, Halorubrum sp.
TSNKLSNSDPRAVIGFNKAVRTVWAGEEWELHFVCKVEIDVAEAPGEKTVGVDLGINNFAALAYEDGHSDLYPLNCLKQDDYYFSKRIARCDDSNSEQATQLNQKKSARRTHYFHTLSKHIVQRCVEEGVGTIVVGDLSGIREDDDTDESKNWGKHGNLDLHSWAFDRFTDLLEYKAEMEGIVVEEVSEEDTSKSCSCCGRKRDANRAERGLYVCDDCGTVANADVNDAENIRQKVSPSSPNLSVNGSNGWLAQPSTFLFDKEAGAFAPQERVTS

SEQ ID NO: 682 - protein, 348 aa, Bacillus sp.
MLPTKEQIQLLKQSSHEYIKVINTLVIEMVEAKKSTKKTTKDVPAILPSAVKNQAIKDAKSVFQKVKKAKYQIVPVLKKPVCVWNNQNYSFDFTHISIAFIVNGKSTRLKVRALLVDKDNRNFDLLKHKLGTLRITKKSNKWIAQISVTIPLDEKPGTKIMGVDLGLKVPAVAVTDDEKVRFFGNGKQNKYMKRKFRTARKKLGIKKKLSAIRQLDDKEQKWMKDQDHKVSRAIVDFAKDHNISVIRLEQLTNIRQTARTSRKNEKNLHTWSFYRLAQFIEYKAALVGIRVEYVNPAYTSQTCPTCTEKNKAKDRKYVCNCGFNKHRDLVGAMNIRYAPVVDGDSQPA

SEQ ID NO: 683 - protein, 309 aa, Streptomyces sp.
MAFDRDLKRRNGLQEAVYHRIKADFDLGAQAAVRTIKKVCDAYATLKANIKAGNLGPEGGKRRIRAENRPVRFREGAAQPYDDRMLTWNLDERTVSIWTVAGRLKGIAFVCSPEAMKLLASRKGESDLVMRDGMFFLTATVDVPEPAPYEPTGFLGVDLGIVNIATTSDGQIMSGRQVNRYRKRHRDLRTTLQKKRTKSATRRLKSIRRRESRYATQRNHIIAKKLVHTAERTLRGIGLEDLSGIRQRVTARKDQRARLHSWAFAQLGAFIEYKARRAGVPVVHVDPRNTSRQCSECWHTHRSNRIDQA

SEQ ID NO: 684 - protein, 318 aa, Paenibacillus riograndensis
MSQTLTIKIKLLPTREQASMVKNQAIKDAKSVFKKAKKSKFTIVPVLKKPVCIWNNQNYSFDFTHISMPLMMNGKVAKTPIRALLIDKDNRNLGLLKHKSGTLRITQKSEKWIAQISVTVPTSEKTGTKIMGVDLGLKVPAVAVTDDDQTCFFGNERQNKYIRRKFQSKRKKLGQRKKLNAIVKLDDKEQRYMKDQDHKISRAIVQFAVEHQISVIRLEQLANIRQTARTSRKNEKSIHMWSFYRLSQFIEYKAKLAGVKVEYVNPAHTSRTCPKCSEKNKAQDRKYICSCGFETHRDRVGAMNIRYAPVIDGNSQSA

SEQ ID NO: 685 - protein, 426 aa, Halorubrum tropicale
MAKQVVTRTHTASIQNQSRVQDDLDSLGFAASKLWNVGRWTCSRIWDEIDHIPNHTELTTYLKTHERYADLHSQSSQRVLQELAEAFNGWYGKRRNGDTRANPPGYRKHGDEHPRSTVMFKAAGFKLDTQYNRVRLSKGSNLKEYWSDFILCKYQTRPDIDLSTVENVQQVRAVWTGEKWELHFVCKVEVEVAEAPGEKAVGVDLGINNFAALAYEDGHSELYPLNCLKQDBYYFSKRIARCDDSNSEQATRLNQKKSAXRTHYFHTLSKHIVERCVEQGVGTIVVGDLSGIREEDDSDESKNWGKHGNLDLHSWAFDRFTDLLEYKAEMEGITVEEVSEEDTSKSCSCCGRKRDANRVERGLYVCDECGTVANADMNGAENIRQKVSPSPAMDGGDRSNGWLAQPSTFLFDKETGAFAPQERATW

SEQ ID NO: 686 - protein, 360 aa, Bacillus pseudomycoides
MSQTITVKVKLVPTKEQVKLLEESGHEYIKVINALVSEMVEAKKSTKKSTKDIEANIPSAVKNQAIKDAKSVFSTKVKKSKYKIIPVLKKPVCVWNNQNYSFDFAHISIPFMVKGKSTRLKIRALLADKNNRNFDLLKHHKLGTLRIMKKSHKWVAQISVTIPTNENTGTQIMGVDLGLKVPAVAVTDDDKVRFFGNGRQNKYIKRKFRSVRKKLGEQKKLNAIRNFDDKEQRYMKDQDHKVSRAIINFAKENNISVIRLEQLTNIRQTARTSRKNEKNLHSWSFYRLSQFIEYKANLEGIKVEFVNPAYTSQTCPVCSEQNKAQDRKYKCKCGFEKHRDIVGAMNIRYVTVIDGNSQSA

SEQ ID NO: 687 - protein, 393 aa, Thermococcus litoralis
MPSETIKLTAKFKLKEIPNGLDVLFSTYREIVNYLIGYAFENNVTSFYKLKKETYKSLRKEYPDLPSHYHYTATQMATMIYKSYRKRRKKGKAKGKPVFKKDAIMLDDHLFKLDLKAGVIKLSTPMGKIKLEFYPAKYHEKFGDWKIGQAWLVRTQKGVFINVVFSREVEVREPXXXXGVDLNENNVTLSLPNGEFVQIITHEKDIRXGYFVKRRKIQKKLRTGKKREELLEKYGRRERNRLNDLYHKLANKIVELAEKYGGIALEDLTEIRDSIRYSAEMNGRLHRWSFRKLQSIIEYKAKLKGVRVVFVNPAYTSSLCPVCGGKLSPKGHRVLKCSNCGFEADRDVIGSWNISLRALKMWGVSVPPESQPMKMGGWKVIRYDSFMCFKSGG

SEQ ID NO: 688 - protein, 355 aa, Nitrosopumilales archaeon
MILTYNIKHERDFSSELIQAKKIADFAIRTKSNSSKDVRHLGLKSAIANQILRKYRKSGIKKTSSVNLTVPGQSVKFDNTEKLAKISCLNLELDCMYLPEFKKIRQIEIGKTLAHVSVEISEPETRASEKFIGIDCNTTGHAAVIAIPHTGKIHKLGKSAIHTHTKYKQIRKKLQKKGKFSLLKKIKDKESHILKNINHHISKKIIQIAVSEKSGIRFEDLKGIRKNKKYSRKFRYSLNSWSYYQLQQFTQYKAKKQGIEVAYVAPAYTSQTCSRCGSLGDRDGKKFQCVCGHADHADVNASFNIGKPVSHCLIDPTRIKSKSQLHKESDLCKGSTDTPQTAMSEMMITVEPMKL

SEQ ID NO: 689 - protein, 371 aa, Halobacillus hunanensis
MATKTILVKLKHVTKKKHKQFMDEQAVYASCVNHCVERLLNGEKLSSENISFPLKSAIRNEGIRRARKAVSDFKKGLAKTIPVFRNSLTIKINNQNWNTVDQNGRWYIAFTSNQGKKALPVVETKDVQSYFPFLTTKTREFRGTIELLRKGRRWYVAIPIQVSSDLDLENSHPSVTKPLMDYTSIGVDLGLRHLVVLSEPTSGKRQFFSGKEVGYKRRHFRSLRRSLGKKKAQRAMERVGQKESRWMKDYNRKLAKDIVTFAQQFEKPMIKLEQLDNIRKTCRSMNRADKTIHSWAFYQLKQCIKERAATFNIPVVDIDPHQTSQTCFACKHAERSNRKRDFFTCKKCGHKAHADLNASRNIATSTNLAAS

SEQ ID NO: 690 - protein, 407 aa, Halomonas sp.
MTVAYTHWPTVGASQGNQAVKIIEALIHPTAKRPQVRYTYFANRYYKFPSYLRRVAIMDAVGQVRSFVTRFDQWRCGQRKHPHAKPPRLTSSTKTFPSLYGSQCAKINADATHAFIKVRWQNDWIWMRFGLKGTCRFRGKGKAKSPLLTTNGRQWQLSLPEQFEPPKPVKGAPDRVLAVDVGINTAATWAVVDTQGTVHARGFISRTDKDREYRLMARIRQTAKKHTRHGSRLPPGFCRRDHQRLSHLADNQAHQISRQLVNLAVDHHCQAIAVENLKGWRPKAGQKRTPMKARFHRWFHRQLVARIGSKAVEVGLRCVAVYARGTSRHAFDGSGQVKRDKSNYSQCTFRSGKRYHADLNAAYNIAARGHVVFQGGQRKPTARVRSQMSTHIPRTPVTLSTLWPQSA

SEQ ID NO: 691 - protein, 380 aa, Thermoactinospora rubra
MRLVVQVKPLPTPEQAAALEATLHTVNRAATLVARIAHQQRCFRNFDLRKHAYARIKAEFGLAAQAAQHVIKKVADAYRTLHANLAVGNLGKPGSRRRRAAETRPIVFRSRAAQPYDDRCLSWQHATRTVSIWTVAGRLKAVAFTGSARQLALLAEHRRGESDLIWREGAWYLYATVEVPDRPVAAPDGFAGVDLGIANIATTSDGIRHSGKHLNALRHRHRELRRRLQAKKTKSAKRLLKRRRRKEARLAAQVDHAIAKQIVTEAERTGRGIALEDLGGIRERVRLRKPQRVTLHSWSFHQLGAFITSKAARAGVAVIFVKAAYTSQECSACHHIDKRNRPDQATFSCTSCGFAEHADVNAARTIASRGETGWAVSHAA

SEQ ID NO: 692 - protein, 391 aa, Sutterella wadsworthensis
MSVRKPSGITLKGLNISKGAGKLVRRKVDVRTVCIALEVDADASEKMHQTRRLYGQACNLLVPIVVSDTDRKKRLWQRYNLHKAAYPMVRTKMSVLGAQLACNVMRSVSSMYQSWISNHPNFSKDKKMVLPSISFRNPVVHLDKNTIRFFNNYTEASVYTVNGRVGVRLRPGKFQLSQLAGFLAEELAGTSKENRIYRLGECNLVWKCGIKGTPSRWELHIAIEKKLKEVSLDNLSLNQVMGVDVGENNAAALSTGRIFKAGKMKDDRDKYLSSRARFQRNGSRSARQALRKASGREKRHVEQINDEISKSIIEDAAERNIRLIVLEDLTNIRERIKAGLKVRARLHRWPFRELQQKIVDKACRAGIEVIFADPRYTSQTCPHCNAIGRSA

SEQ ID NO: 693 - protein, 393 aa, Pyrococcus kukulkanii
MPSETIKLTAKFKLKKTPKGLDDLFSAYREIVNFLITYAFENNITSFYRLKKGTYKELRKKYPQLPSHYIYTACQMATSIFKSYRKRKRKGKANEKPVFKKEVIMLDDHLFRLDLEKGVIKLSTPKGWLNLKFYPAKYHEKFKDWKVGQAWLVKTPKGVFINVVFSKEVEIREPKAFVGVDLNENNVTLALPNGEFVQVITHEREIRTGYFVKRRRIQKKIRTGKRRKELLQKYGEREKNRLNDLYHKIANIIVGFAERYGGIALEDLSGIRGSIRYSVELNGRLHRWSFRKLQSIIEYKAKLKGVRVVFVNPAHTSSLCPICGGKLSPNGHRVLKCKKCGFEADRDVVGSWNIRLRALKMWGVSVPPESPPMKTGGGKPTRYEINTLHTLNG

SEQ ID NO: 694 - protein, 165 aa, Sharpea azabuensis
RKNKYMRRHYRCLRKKLQKAKHIDAVKRINDKEQRIMKDIDHKLSHDVVETAVAHNVKTIKLERLANIRSTTRTSRKNNHSLHNWSFYRLAQFIEYKAKLAGIAVEHVNPAYTSQTCPVCSHVHHANDRNYTCKCGFHIHRDILGAMNICNSTEYVGDSNIRHTA

SEQ ID NO: 695 - protein, 427 aa, Sutterella sp.
MSVRKPSGITLKGLNISKGAGKLVRRKVDVRTVCIALEVDADASEKMHQTRRLYGQACNLLVPIVVSDTDRKKRLWQRYNLHKAAYPMVRTKMSVLGAQLACNVMRSVSSMYQSWISNHPNFSKDKKMVLPSISFRNPVVHLDKNTIRFFNNYTEASVYTVNGRVGVRLRPGKFQLSQLAGFLAEELAGTSKENRIYRLGECNLVWKCGIKGTPSRWELHIAIEKKLEEVSLDNLSLNQVMGVDVGENNAAALSTGRIFKAGKMKDDRDKYLSSRARFQRNGSRSARQALRKASGREKRHVEQINDEISKSIIEDAAERNIRLIVLEDLTDIRERIKAGQKVRARLHRWPFRELQQKIVDKACRAGIEVIFVDPRYTSQTCPHCNAIGTRQKHRFVCKNCGYRAHSDLNGGRNLQRLGCLLITQGLV

SEQ ID NO: 696 - protein, 361 aa, Armatimonadetes bacterium
MNQVETVRLHPPDPAQLIAWLERFNAATNWLSGVAFRERLWHWLPLQRRAYREVRERFQLPSAATVVVIRKVAYAYRNTQRRQHQATFRRRGAIPVYRHQYKRDGTVSLYGFRIPFTARPRVELSSRHQAVLCYRRGKFVLHQVVEVDVPAPAPVQDYLGCDLGTTNLLTDSEEEAYSGRAVEEKRRIYVHRRARLQKRGTRAARRKLRKISGRQRRYQRDVNHGIAKRVVAKAQRLCCGIALEDLRGIRDRIKARRRQRARLHNWAFGQLRQFIVYKAAQAGVPVVFVDPANTSRTCPVCGHVDKRNRRSQAEFNCRRCGHAGPADVIAARNIRAWARGDAPMVASARAATSPPPYVEGG

SEQ ID NO: 697 - protein, 374 aa, Methylobacter sp.
MKRTISIKLDPTTEQSALLDALQAEFARACNIVVGFSAPVKCSNRVALHHLCYYQVREQVPALGSQMVCNAIANVAQSYKSLVANEPKLRKEEWPVINFRQTASVHFDKRTYSFKNDTLSLFTLDGRIAVNYIFGKHQANLLNSGLTKEAELLKRKGQWYFNLVIDIPDAAPSTGNGSMGVDVGENNIAATSTGKVFGGGELRHKRDKFLAHRKRLQRNGSNSAKQLLKKISGKEVAHVKHVNHEISKAIVQEAIAANASEIRLEDLTNIRDNIKAGRRVRTRLHRWSFRQLQDFVAYKAQAVGIEIKYINPAYTSKSCSVCDAIGTRVKHKFSCKNCGHLSHSDVNAASNIAKFDRLFSPSRGVVSRPNVERF

SEQ ID NO: 698 - protein, 295 aa, Thermoactinospora rubra
MLKLAPDAEQAQSLLATMRACNAAANRAAEVAYDQRILTFKGRDWVSILTLTGRILVPVAYQGRWLSASGTTMRGQADLVCRDGTLYLAVVIDVPEPPKDGEPDGWLGVDLGIVNLATDSTGQAHSGKAVRAVRYRNLMLRRRLQQKATKSAKRLLKKRRRAEARFARNTNHVISKHLVGKAQDTRSGIALEDLQGIRDRVTVTRAQRADLHSWGFHQLRAFITYKAAIAGVPVRLVDPRNTSRTCPACGHCAKRNRPHRDSFLCVACGFAGPADHIAAINIGRRAVSHAADDAA

SEQ ID NO: 699 - protein, 393 aa, Thermococcus eurythermalis
MPSETIKLTAKFKLKGTPDGLDDLFSTYREIVNFLITHAFENNITSFYRLKKETYKGLRKEYPELPSHYLYTGCQMATAIFKSFRKRKKKGKARGRPVFKKEVIMLDDHLFKLDLENKTVKLSTPSGRIQLEFYPARYHEKFKDWKVGQAWLVRTSKGVFLNVVFSKEVEVKEPKAFVGMDLNENNITLSLPNGEFLQIITHEREIRTGYFVKRRKIQRKIRSGKRRKKLLEKYGEREKNRLNDLYHKLANKIVEVAEKYGGIALEDLTEIRESIRYSAEMNGRLHRWSFRKLQSIIEYKAKLRGVKVVFVNPAHTSSLCPVCGGKLSPNGHRVLKCSNCGFEADRDVIGSWNIRLRALKMWGVSVPPESPTMKTGVGKVSRNDVYELYTSYG

SEQ ID NO: 700 - protein, 358 aa, Exiguobacterium sp.
MSQVVTVEVRIYATRRQDAILKRMGKTYIQTANRVVANMVASEDGKRWSSKDIDTPLPSAVKNQLAGDAVGIYKKARKEEFKRIPVLKKPVCVWNNQNYSFDFESISFPVWMDGKSVKMRFRAPMVDKDNRNTRLLANKLGTLRVTKKGRKWIAQISVHVPTVPRTGVRMMGVDLGLKVPAVAVTDDDTTRFFGNGRKNKYMKRKFRAERKALGKKKKPRAIKRRNQKEQRWMRDKDHKVSRAIVDFARQKKISVIRLELLANIRQTARTSRKNNQNLHSWSFYRLASFIEYKAALSGIKVEYVNPAYTSQTCPSCSVRNKVRDRVYTCACGFKGHRDAVGAMNIRYAPVMDGNSPSA

SEQ ID NO: 701 - protein, 398 aa, Sutterella sp.
MRTVCIALEVDADASEKMHQTRRLYGQACNLLVPIVVSDTDRKKRLWQRYNLHKAAYPMVRTKMSVLGAQLACNVMRSVSSMYQSWISNHPNFSKDKKMVLPSISFRNPVVHLDKNTIRFFNNYTEASVYTVNGRVGVRLRPGKFQLSQLAGFLAEELAGTSKENRIYRLGECNLVWKCGIKGTPSRWELHIAIEKKLEEVSLDNLSLNQVMGVDVGENNAAALSTGRIFKAGKMKDDRDKYLSSRARFQRNGSRSARQALRKASGREKRHVEQINDEISKSIIEDAAERNIRLIVLEDLTDIRERIKAGQKVRARLHRWPFRELQQKIVDKACRAGIEVIFVDPRYTSQTCPHCNAIGTRQKHRFVCKNCGYRAHSDLNGGRNLQRLGCLLITQGLV

SEQ ID NO: 702 - protein, 129 aa, Sharpea azabuensis
MKDIDHKLSHDVVETAVAHNVKTIKLERLANIRSTTRTSRKNNHSLHNWSFYRLAQFIEYKAKLAGIAVEHVNPAYTSQTCPVCGHVHHANDRNYTCKCGFHIHRDILGAMNICNSTEYVGDSNIRHTA

SEQ ID NO: 703 - protein, 132 aa, Sharpea azabuensis
QRIMKDIDHKLSHDVVETAVAHNVKTIKLERLANIRSTTRTSRKNNHSLHNWSFYRLAQFIEYKAKLAGIAVEHVNPAYTSQTCPVCGHVHHANDRNYTCKCGFHIHRDILGAMNICNSTEYVGDSNIRHTA

SEQ ID NO: 704 - protein, 208 aa, Peptococcaceae bacterium
MGVDLGLIDLAVASILGSTLFFSGAELAYIRRHYAELRKKLQKKGAHKALRKLGNKEHRWIMAINHTISRRIIEFAKAHGVSVIRLEDLRGARWTKSQRKKQRKDAGRSLHSWAFFQLRQFIEYKAALAGIEVELVNPELTSLTCSRCGEVRTSRPAGRWYTCPRCGKVKHIDANAADNIAQAISGLSEEKRAKTILKPKTRRRTTAA

SEQ ID NO: 705 - protein, 266 aa, Streptomyces sp.
MGERTVSIWTVTGRMKHIAFTGSPVHLAVLEAYRKGESDLLYRDGRWYLIATCEVAEAELDAHPASFVGVDLGIVNIATTSTGARHSGRRLNRRREADRTLRAKLQRKGTKSAKRRAKKHAGKEARRARDINHKISKHIVAEAQRTGRGIALEDLGGIRERARLRKPQRVTLHSWSFHQLGAFIAYKAKRAGVPLVHVDPAYTSQECSQCHHIDRRNRPSQARFACQVCGFVEHADPNSSHNIAARGWWTWVRGAESQAPALTLIA

SEQ ID NO: 706 - protein, 443 aa, Halomonas sp.
MLIIRSDTLTLQVTSADQRQALANTLALYRRLVRDLMTVAYTHWPTVGASQGNQAVKIIEALIHPTAKRPQVRYTYFANRYYKFPSYLRRVAIMDAVGQVRSFVTRFDQWRCGQRKHPHAKPPRLTSSTKTFPSLYGSQCAKINADATHAFIKVRWQNDWIWMRFGLKGTCRFRGKGKAKSPLLTTNGRQWQLSLPEQFEPPKPVKGAPDRVLAVDVGINTAATWAVVDTQGTVHARGFISRTDKDREYRLMARIRQTAKKHTRHGSRLPPGFCRRDHQRLSHLADNQAHQISRQLVNLAVDHHCQAIAVENLKGWRPKAGQKRTPMKARFHRWFHRQLVARIGSKAVEVGLRCVAVYARGTSRHAFDGSGQVKRDKSNYSQCTFRSGKRYHADLNAAYNIAARGHVVFQGGQRKPTARVRSQMSTHIPRTPVTLSTLWPQSA

SEQ ID NO: 707 - protein, 379 aa, Actinomadura sp.
MKLVVQVKLLPDVATEAALRETLQLCNQAADHVSRRAHQSNVKTKAALQRLVYREVKGMGLSAQPAIHCVRKVAEAYAASADEPSTARHGRRPPRPLRAPVRFRKDAAQPFDDRCLSWRLDACTVSIWTVRGRMKNIRFACSTEQLSLLRHHRRGESDLVWRNDSFYLYATCEVPEADEYRPDGFLGVDLGIANIATASDGHRHSGRQLNQTRHRNRRLRSKLQKKGTKSAKRLLRKLSSREARFAADTNHRISAHVVTEAQRTSRGIALEDLTGIRERVRLRKPQRVTLHSWSYAQLGSFIAYKAKRAGVPVVYVDPRHTSQGCSACGHVDKRNRPSQAAFRCTSCGFAEHADVNAARNIAARGAASWAVSHAADDAD

SEQ ID NO: 708 - protein, 346 aa, Paenibacillus beijingensis
MQTVTVQIRIFPNDVSLLKEMGNEYIQTVNRLTEQAETAGVFPKLTSKDVEANLPSAIRNQAIRDARSIHKKTKKQGKRPILKQRAYYVNNQNYTIGQNTVSFPVMADGKVRRLTVSARIEEREQHVLDSGKSGLLKIVEKSGKWYVHLSIELQVKEAAGDITMGIDLGLKVPAVVVTSTGKTRFVGNGRQNKYIRRKYNSRRRKMGKLKKLSAIRKQQNKEHRYITDQNHKISRTIVNLAIEEQVSVIKVEKLTSIRQTTRTSRKNAKNLHNWSFYQLQKFIAYKAALAGIKVMEVNPAYTSQTCPACGKRNKATDRTYRCLCGFHSHRDRVGAVNIMRQPVTDG

SEQ ID NO: 709 - protein, 373 aa, Geobacter sp.
MKRTISIKLVTSPEQEARLLLLQTELARACNHLAGAAAVNRCSNRVKLHHRVYYTVREAMPALGSQMTCNAVAAVVRSYKSLVSNNPGLRKTDWPLITFKSSGSVHFDKRTYSIKGKAISLFTTEGRIIVPMKLGEFQGKYLDIGMPKEAELVCRKGRYYFNLVLDFPDPPKRTTGPVAGVDLGENTIAAISTGKIFGGGKLRHDRDKHLTLRSRLQRNGSQSARQLLKKVSGREARHVRHVNHEVSKAIIAEAVGNECGAITMEDLTNIRKRIKAGKRMRSRLHRWAWAQLQAFIAYKAEAAGIRVEFANPAYTSQTCSVCGCMGTRERHRFSCTCGNLAHSDLNASRNLARLGATAVAPTGAVNRPYVGTA

SEQ ID NO: 710 - protein, 426 aa, Halorubrum chaoviator
MAKQVVTRTYTASIRNQSRVRDDLGALGFAASKLWNVGRWTCSRIWDEIGHIPNHTELTAYLKNHERYDDLHSQSSQRVLQELAEAFSGWYGKRRNGDTRANPPGYRKHGEKHPRSTVTFKTAGFKLDTEYNRVRLSQGSNLKEYWSDFILCKYQTRPDVDLSTVEGVKQVKAVWSGDKWELRFICKVEVDVSESSGEKTVGIDLGITNFAALAYEDGHSELYPLNGLKQDDYYFSKRLAQCDDSNSAQATRLNQKKSNRRTHYFHTLSKHIVQRCVEDDVGTIVIGNLSGIREDDENGESKNWGKHGNLDLHSWAFDRFTELLTYKAEMEGITVEEVSERDTSKSCSCCGRKRKANRVERGLYVCDNCGTTANADVNGAENIRQKVSPSSPNLSVNRSNGWLAQPSTFLFDTETGAFAPQERVTS

SEQ ID NO: 711 - protein, 428 aa, Streptomyces sp.
MKLVIRVKLLPTPHQASALQATLHTCNEAANHASRHAFTTGIKRNRELRTQIYTQIKERFSLGAQAAQLAIKKACNAYASLRGSLKAGHLGRPGTKRHTRATNKPITFRPDAAQPYDDRMLSWQTEQRTVSIWTVHGRMKHIPYTGQEDQLLLLAHRRQGQSDLLHHNGQWYLLATIDVPEPPQNPAPHDFIGVDLGIENIATTSTGRRHSGRKINRTRENDRRLYRRLAKKKTRSAKRRAKRHAGKQARRTRDINHKISKHIVTEAQRTGRGIALEDLSGIRERARLKKPQRVTMNSWAFGQLGSFIAYKARKAGVPLVHVSPAYTSQECSQCHHIDKRNRPSQAVFACRSCGFVEHADLNASHVIGRRGWWVWVCGAESQVPALTLVVQGWMRRSAEAIGEGELQAGVSDRQRTRTLVHGAMMRRA

SEQ ID NO: 712 - protein, 440 aa, Vibrio breoganii
MKIVRSDRLNINTNTHQSEALRATLNVYRKYVRDLMVLINARWRKFQHHSGNEIIAAVESLIHPTKKRPEIKHHYFHHHYYKFPSYLRRVAIMDAMGQVRSFHSRFNDWLDSGCKNRPPKLTCATATYPSLYAGQCIKFSNCGTKADIKVFKSNDWVWIAVKLNGKERFSGKKLSPLLVLKNKKWLLSVPVKMDVSLKPKVNFSGKVLSVDVGINTTATCAVVDKSGTVHGRYFLNRSDKDREYRLMNRIRAKARKQTRHGNKLPSGFCKNDHRRLKQLADNEAHQISRRIVSLARDSECDAIAVEDLKGWRPSAGKKRSTMKAKFHRWYHRMLIDRLESKAIELGIRLINVYARGTSSNAYDGSGKVKRDKGNYALCQFVTGKRYNADLNAAYNIAARGILKFFYPKVREKLWKSGKPNACPLTGSPFVLSSIWLLSQT

SEQ ID NO: 713 - protein, 376 aa, Streptomyces sp.
MPDAVQAPAIAATLHTVNDLANWVSDVAFTCGVPREYELRKHTYARLRAEGLGAQAAQHVIKKVRDAYTTLHANLRAGNLGKPGSKRRRKAESKPVTFRPQAAQPYDDRCLSWQYDAQTVSIWTTAGRIKGVRFTCSARALKVLQQYRKGASDLIERDGVFYLIATCEVPEAEQYEPDGWIGVDLGIVNIATTSTGYQAAGRQINRYRKRQLALRAKLQKKRTKSAKRRLKERSRREQRHVKNTNHIIAKTIVTEAERTSAGISLEELKGIRQRVRLRKPQRVALHSWAFAQLGDFIVYKARRAGVPVVFVDPAYTSQQCSECGHIDKKNRTSQALFTCRNCGVVAHADRNASRVLARRGQNAWTAGRESRVPATP

SEQ ID NO: 714 - protein, 366 aa, Salimicrobium flavidum
MATKTFLVRLKSLSKKKHKQFVCEQQTFASCVNHCVERLQSGEKLSSKNVPFDLKSAIKNEGIRKAKKAVSDVKKGLAKTVPTFRSSLGIKINNQNWNTVEKNGRWYIAFTTNEGKKTFPVVETEYVHTYFPFFTYQNREFRGTIEVLRKGRDWYVAVPVQVSSELDAEKTHKPYEAYTPVGVDLGLRHLAVLSEPVSGIRQFFSGKEVGFKRRHFRSLRRSLGKKKAQRALEHVGKKESRWMKDYNRKLAKAIVDFARQFDNPMIKMEQLDDIRKTCKSLKRADRTIHSWAFYQLKQFIREKAADYNIPVVDINPYQTSQECFLCGYAEKGNRHMDTFHCKKCGHSNHADLNASNNIATSTSLAV

SEQ ID NO: 715 - protein, 385 aa, Streptomyces sp.
MKIVTQVKLMPDAVQAPAIAATLHTVNDLANWVSDVAFTCGVPREYELRKHTYARLRAEGLGAQAAQHVIKKVRDAYTTLHANLRAGNLGKPGSKRRRKAESKPVTFRPQAAQPYDDRCLSWQYDAQTVSIWTTAGRIKGVRFTCSARALKVLQQYRKGASDLIERDGVFYLIATCEVPEAEQYEPDGWIGVDLGIVNIATTSTGYQAAGRQINRYRKRQLALRAKLQKKRTKSAKRRLKERSRREQRHVKNTNHIIAKTIVTEAERTSAGISLEELKGIRQRVRLRKPQRVALHSWAFAQLGDFIVYKARRAGVPVVFVDPAYTSQQCSECGHIDKKNRTSQALFTCRNCGVVAHADRNASRVLARRGQNAWTAGRESRVPATP

SEQ ID NO: 716 - protein, 360 aa, unidentified
MQLTETVKLYPNKYQIELIKVTMTEYISTVNHLVLDAINGRAITKITTADVNAILPSALCNQCIRDAKSIIRKYNKALRNSNTKVRLPVLKKMCCYINNQNFRISDDCISFPVIINGKSKRISVKTKISKRQKSIFSSSKLGTMRIVVKGHDLVAQIVYDAKEDAASSNNNVMGVDFGIKCPAVSYCPDGSVKFYGNGRKNKYIRRHYNNLRKRFQKAKKPKAVVKINNKEQRIMKDIDHKLSREIVNTAKTHDVSVIKLERLQNIRSTTRTSRKNNHSLHTWSFYRLAQFIEYKAKLAGIKVEYVDPAYTSQICPICGSVHHANDRNYTCRCGFHTHRDLLGAINICNSTEYIGNRYTA

SEQ ID NO: 717 - protein, 204 aa, Anoxybacillus pushchinoensis
MAQVAVKVVEKQNNDENIMGVDLGLKVPVVAVTSNSKTRFFGNGRQNKYIRRKYKVLRQQLGKAKQLKKIKQIGNKEQRWMKDQDHKISRQIVNFAKENHVSVIRLEKLTNIRNTARTSRKNEKNLHTWSFYRLSKYIEYKANLEGIKVEYVNPKYTSQKCPKCQTLNKANDRKYVCKCCGYRTHRDRVGALNIMKAPMADGVA

SEQ ID NO: 718 - protein, 224 aa, Bacillus mycoides
MLKHKLGTLRITKKSNKWMAQISVTLPTNERAGTKILGVDLGLKVPAVAITDDDKVRFFGNGRQNKYRKRKFRSVRKKLGKDKKVNAIRRFDDKEQRWMQEKDHKISREIIDFAIANQISVIRLEQLTNIRQTARTSRKNEKNLHTWSFYRLAQFIAYKATIAGIQIEYVNPAYTSQSCPKCAEKNKARDRKYKCPCGFKTHRDIVGAMNIRYTTVIDGNSQSA

SEQ ID NO: 719 - protein, 351 aa, Paenibacillus sp.
MQTVTVQIRLFPRDPAIMKEMGNEYIHTVNHLTEQAEASGAFPKVTSKDVEANLPSAVRNQAIRDARSIHNKTKKQGKRPILKRRAYYVNNQNYSFGDSNVSFPVMMNGKVQRLTVSVRITEREQRLLFSNKLGLLRVVEKSGKWYVHIAVEIPTEPLTSGATMGIDLGLKVPAVVVTSTGKTQFVGNGRQNRYMRRKFQARRRKMGKLKKLSAIRKQQNKEHRYMKDQNHKISRKIVNMAIEEQVSVIKIEKLTNIRQTTRTSRKNAKNLHTWSFYQLQMFIAYKAALAGIKVLEVNPAYTSQTCPACSKRNKADDRTYQCLCGFHTHRDRVGAINIMRQPGADGNSLSA

SEQ ID NO: 720 - protein, 390 aa, Streptomyces sp.
MKLVIRVKLLPTPEQASALQATLHACNAAANHVSHTAFTTGTRRNRELRALTYTQVKTRWSLGAQAAQHVIKKTADAYAALTGNLKAGNLGKPGSKRFRKATEKPITFRPQGAQPYDDRMLSWQMPQRTVSIWTVAGRMKRLAFTGEETQLLLLAHHRQGESDLTSHNGHWYLLATVDLPESPTTPDPREFIGIDLGITNIATTSTGHRHSGRHLNRSRQNDRRNRDNLARKQTRSAKRRAKHRAGREARRTRDINHKISKHIVTEAQRTGRGIALEDLGGIRERARLKKPQRVTIHSWAFAQLGAFIAYKARRAGVPVVHVHPAYTSQECSRCHHIDKRNRPAQAVFSCRNCGFVEHADLNASHVIAGRGWWMWVCGAESQVPALTLIA

SEQ ID NO: 721 - protein, 382 aa, Methylocaldum sp.
MMRTASIRLELSAAQADALARLRASYADACNRLVPIVREYRLWNRVGLHQRTYTMLREATPLGSQMCCNAIFSVCKAYKAQKELGRIRKDAPVPGIRFDRASVHFDKRTYSLKGETVSLYTLDGRIEVPMRLGEHQRRILESGKPKEAELVFRKGKWFLNLVVESGDVEPVASGPVMGVDVGENNLAATSTGKVFGGEHLRDRRDRYLALRRRLQSNGSQSARQKLRQVSGKEARHVKHINHETSKAIVQAAIQAGVAKITMEDLTHIWERIKAGKRMRGRLHRWAWRQLQTFVEYKAKVAGIAVEYVSPAYTSQTCSCCGGLGKRSKHRFECPHCGLRAHSDCNASRNLARIGEIAVSPRAAVNTPDVGSVDMGNHVCASQ

SEQ ID NO: 722 - protein, 393 aa, Thermococcus sp.
MPSETIKLTTKFKLKETPEGLDGLFQTYREIVNFLITYASENNITSFYRLKKETYKSLRKEYPELPSHYLYTACQMATAIFKSFRKRRKKGKAKGKPVFKREVIMLDDHLFKLDLEKGTVKLTTPSGRIQLEFYPARYHEKFKDWKVGQAWLVRTPKGTFINVVFSKEVKVSEPKAFVGVDLNENNVTLSLPNGEFVQIITHEREIRTGYFVKRRRIQGKIRAGKRRRELLEKYGLRERNRLNDLYHKLANKIVELAEKYGGIALEDLTEIRESIRYSAEMNGRLHRWSFRKLQSIIEYKAKLRGVKVVFVNPAFTSSLCPVCGGKLSPNGHRVLKCSNCGFEADRDVVGSWNIRLKALKMWGVSVPPESLTMKTGVGKVIRYDWFTSSKSSG

SEQ ID NO: 723 - protein, 389 aa, Rhodococcus jostii
MKRVVKIKLAPTDAQARALHDTLMLCDTAAGVVSRVAQASEDRRAFALQKAVYHQLKALGLSAQPAVRTIKKVADAYATRGANLEAGNYGPGGGKRATDIAATAIGFRALAAQPFDDRCLSWQQQGSTISIWTSEGRLKAVRYVCAPWQRALLEHRCGETDLVFRDNMWFLHATVDVPAPEPVEPVVVEEFLGVDLGIVNLAVTSDDTAASADWSSGAVTARRGKYTRTRRTLQKVGSKSAKRKLRRRREKEHRYATDINHQISKTIVAQAQRTGRGIVLEDLSGIRERVRPAKAQRQQLHSWAYAQLRDFVTYKAASVGVPVEVINPRNTSRTCYPCGHVDKANRITQDRFVCRVCGHVDQADHNAALNIAYLGYVKYMTTTHGYWAA

SEQ ID NO: 724 - protein, 191 aa, Halanaerobium sp.
MGIDIGLRQLAVASVKNSQGKEINRQFHNGKQAGFIRKKYRMLRRKLGQSKKVKAIKNINDKEQRWMTDLNHKISRQLVNLAVQEQVGTIIMENLENIRNTAKSLNRADRNIHNWTFYQLQQFIEYKAELAGIKVEYINPKYTSQSCSRCAKVKKSNRKANLYSCECGNHIHSDLNAGRNITNKYLEQQSA

SEQ ID NO: 725 - protein, 414 aa, unidentified
MKHMQLSETVKLYPTEYQIELIRNTMSEYISTVNNIVSDYTNKDNGNIESVKEIKNIKSISKLTTADVKAKLPSALCNQCIRDAKSIVKKYDKACKEVEKAKKNKKNKKSKKNKNSKNVKEVEEIKEVKEVKKLKEIKVPVLKKLCCYINNQNFKIQDNYISFPVMIDGKSKRISVKTKMTDKQKLILSSHRLGTMRIVIKNINILVAQFVYEINEIEKVNESNNVMGVDLGIKCPAVSYCTDGSVKFYGNGRKNKYMRRHYANLRKWFQKAKKPTVVKRIKNKEQRIMKDIDHKISREIVNTAKKHKAKVIKLERLENIRSTTRTSRKNNPSLHTWSFYRLAQYIEYKAKLAGIEVEYVDPAYTSQKCLQCGNIHHAKDRKYICKCGYHTHRDLLGAINICNSTEYIGNRCIA

SEQ ID NO: 726 - protein, 382 aa, Verrucomicrobium sp.
MMRTASIKLDASPEQRAALAALQSAFANACQRLSAVVREHRVWNRVALHQRAYSEMRSSTPLGSQMCCNAIFSVCKAYKALKVTGRIPKDTPVPAISFQRASVHFDKRTYALKKNAVSLYSLGGRVIVPMRLGEHQRRILSFGRPKEAELAFRKGNWYFNLVVESDDKESIASGPVMGVDVGENNLAAHSLGGIFGGGRLCDRRDHHLALRRRLQSNGSRSAKQKLRQVSGKERRHVTHVNHETSKAIVREALEAGVSKITMEDLTHIRDRIKAGKRMRGRLHRWAFRQLQRFVEYKAKSAGIAVEYVDPAYTSQTCSSCKQLGRRTKHRFACPHCGLRAHSDLSASRNLARIGGTAVPPRAAVSTPNVGGADVGNHVCASQ

SEQ ID NO: 727 - protein, 371 aa, Nitrosococcus oceani
MKRTVSIKLVPTPEQAQALLELQSELAKACNLIVPFARDNRCWNRVALHHLAYYPVREATNLGSQMVCNALKAVADAYKVLKLKKSDDIPAIRFRETGSVHFDARTYRLKGDAVSLYTLTGRAIVKMSPGEFQAQYLAAGKPKEGKLVRRGKQWFFNLVLDWPDTASAKGSGILGIDLGENNLASTSSGKILGGGPLRHVRDRHLALRRRLQSNGRQSARQLLRKVSSKERRHMRQVNHEASKAMVEEALKQGASTIVLETLTHIRKRIKGGKRLRFRLHRWAWRELQDFIAYKAEAAGIQVIYVNPAYSSKTCSACGCLGSRIQHKFSCSSCGHLAHSDRNAAVNLAKLARSIGIARPEVAPAHVAVPTH

SEQ ID NO: 728 - protein, 321 aa, Nitrosococcus oceani
MAYYPVREATRLGSQMVCNAVKAVADAYKVLKLGRHDEIPVIRFRETGSVHFDARTYRLKGDAVSLYTLTGRAIVKMSPGEFQAQYLAAGKPKEGKLVRRGKQWFFNLVLDWPDTAPAKGSGILGIDLGENNLASTSSGKILGGGPLRHVRDRHLALRRRLQSNGRQSARQLLKKVSGKERRHMRQVNHEASKAMVGEALKQGASTIVLETLTHIRKRIKGGKRLRARLHRWAWRELQDFIAYKAEAAGIRVIYVNPAYSSKSCSACGCLGSRIQHKFSCSSCGHLAHSDRNAAVNLAKLAKSIGIARLGVAPAHVAVPTH

SEQ ID NO: 729 - protein, 388 aa, Nocardiopsis sp.
MKLVVRVKLLPSPEQARALQATLRTCNEAADHASQVAQATGATNKYALQRAVYHELKARFGLSAQPTVRVLGKVCDAYTTRQANLKAGNLGRKGSPRRQRVESTPISFRPDAAQPFDDRCLSWQMDARTVSIWTVAGRMKNLGFVTSPEQLKLLTEYRQGESDLIYRDGQWFLAATCEVPEQEENPEPVGFMGVDLGIVEIATTSAGDRFSGRVLNRYRRKQNRLRAKLQRKNTKSAKRVLKRLRRREARRAREVNHQISKSIVERAERTDHGIVLEDLKGIRGRVRQAKRQRSALHSWSFAQLRDFIGYKARRVGVPVLVVDPAYTSQTCSECDHTSRRNRPTRNRFVCRQCGVVLHADVNASRNLAHRGQAVWTAGRTSTAPTPSR

SEQ ID NO: 730 - protein, 359 aa, Bacillus licheniformis
MSQTITVKVKLLLTKEQEEILNEMSHTYISVINQLVSEMVDNKKSTKKTSKHVTALLPGSVKNQAIRDSKSIFSKRVKKSNYKIIPILKKPVCVWNNQNYSFDFTHIHLPLTIDGKTKRTPIRALLVDKHNRNFDLLKHKLGTLRITKKSNKWIAQISVNISLIEKTGTKVMGVDLGLKVPAVAVTDDGKTRFFGNGRQNKYVRRKFKSKRKQLGKLKKLNVIRKLEDKEQRYMKDQDHKISRAIVNFAIDHNISVIRLEQLTNIRQTARTSLKNEKNLHNWSFYRLSQFIEYKANLEGIKVEYVNPAYTSQTCPKCSEKNKAQDRKYKCKCGFEKHRDLVGAMNIRYAPVVDGNSQPA

SEQ ID NO: 731 - protein, 126 aa, unidentified
MKDIDHKLSREIINTAKAHDVSVIKLERLQNIRSTTRTSRKNNHSLHTWSFYRLAQFIEYKAKLAGIKVEYVDPAYTSQICPICGRIQHAKDRNYICRCGYHTHRDLLGAINICNSTEYIGNRYTA

SEQ ID NO: 732 - protein, 384 aa, Nocardiopsis sp.
MRVKLLPSPEQARALQATLRTCNEAADHASQVAQATGATNKYALQRAVYHELKARFGLSAQPTVRVLGKVCDAYTTRQANLKAGNLGRKGSPRRQRVESTPISFRPDAAQPFDDRCLSWQMDARTVSIWTVAGRMKNLGFVTSPEQLKLLTEYRQGESDLIYRDGQWFLAATCEVPEQEENPEPVGFMGVDLGIVEIATTSAGDRFSGRVLNRYRRKQNRLRAKLQRKNTKSAKRVLKRLRRREARRAREVNHQISKSIVERAERTDHGIVLEDLKGIRGRVRQAKRQRSALHSWSFAQLRDFIGYKARRVGVPVLVVDPAYTSQTCSECDHTSRRNRPTRNRFVCRQCGVVLHADVNASRNLAHRGQAVWTAGRTSTAPTPSR

SEQ ID NO: 733 - protein, 359 aa, Bacillus mycoides
MSQTLTVKVKLIPTKEQIRLLEQSSHEYIKVINTLVSEMVEAKKSTKKSTKDIEANIPSAVKNQAIKDAKSLFVTKVKKSKYKIIPILKKPVCVWNNQNYSFDSNYISVPLMINGKSTRLKVRALLIDKNNRNLDLLTHKLGTLRITKKSDKWSAQISVTLPRSEKAGTKILGVDLGLKVPAVAITDNDKIRFFGNGRQNKYRKRKFRSARKKLGRDKKVNAIRRFNDKEQRWMQDKDHKISREIIDFAIENHISVIRLEKLTNIRQTARTSRKNEKNLHTWSFYRLSQFIAYKATLAGIKIEYVDPAYTSQSCPKCAEKNKAQDRKYKCSCGFETHRDIVGAMNIRYATVIDGNSQSA

SEQ ID NO: 734 - protein, 358 aa, Bacillus sp.
MSQTITVKIKLLPTKEQDLTLTEMSKTYISTINDLVSEMVKEKKSTKKTSKNIGASLPSAVKNQAIKDAKSVFKKAKKTKFETIPVLKKPTCIWNNQNYSLDFTHISLPIMIDGKAKKTPIRALLIDKENRNFNLLKHKLGTLRITKKSNKWIAQISVTTPTPQKTGFKVMGVDLGLKVPAVAVTDDGKVRFFGNGRQNKYKKRKFRSVRKALGKKKKLNAIRSSKNKEQRWMKDQDHKVSRAIVNFAKENEISVIRLEQLANIRQTTRTSRKNEKNLHTWSFYRLSQFIEYKAKLEGIKVEYVNPVYTSQTCPNCSEKNKAQDRKYKCKCGFEKHRDLVGAMNIRCAPVIDGNSQSA

SEQ ID NO: 735 - protein, 358 aa, Bacillus sp.
MSQTITVKIKLLPTKEQDLTLTEMSKTYISTINDLVSEMVKEKKSTKKTSKNIGASLPSAVKNQAIKDAKSVFKKAKKTKFETIPVLKKPTCIWNNQNYSLDFTHISLPIMIDGKAKKTPIRALLIDKENRNFNLLKHKLGTLRITKKSNKWIAQISVTTPTPQKTGFKVMGVDLGLKVPAVAVTDDGKVRFFGNGRQNKYKKRKFRSVRKALGKKKKLNAIRSSKNKEQRWMKDQDHKVSRAIVNFAKENEISVIRLEQLANIRQTTRTSRKNEKNLHTWSFYRLSQFIEYKAKLEGIKVEYVSPVYTSQTCPNCSEKNKAQDRKYKCKCGFEKHRDLVGAMNIRCAPVIDGNSQSA

SEQ ID NO: 736 - protein, 380 aa, Ectothiorhodospira sp.
MMRTASIRLEVSAEQASALAALRTAYADACNRLVPIVREYRLWNWVGLHQRTYSNLREATPLGSQMCCNVIFSVCKAYKAQKELGRIRKDEPIPEIRFDRLSVHFDKRTYTLKNDAVTLYTLDGRIKVAMRPGEHQRRILTSGQPKEAELVLRKGQWFFNLVVESGDAEPVASGPVMGVDVGENTLAAHSLGKVFGGDPLRDKRDRYLALRRRLQSNGSQSAKQKLRQVSGKEARRVKHINHETSKAIVQTAIQAGVAKITMEDLTHIRSRIKAGKRMRGRLHRWAWRQLQSFVEYKAKAAGIAVEYVNPAYTSQTCSDCGSIGKRSKHRFVCEHCGLRAHSDLNASRNLARIGSGAPLSRAAVNTPDVGNGINHALVSQ

SEQ ID NO: 737 - protein, 400 aa, Thermoproteus tenax
MRGCSPMTSVVLTVVGKVIEPNKGKTLELNRALEEYLKLVRWYVGFGITSKTKLHELTYEEAKKRFSLNTALIQTARDKAVEILKSFSERKAEGRAKADRPAVKRVSIRLDRRAFKLDKSSTKLTPYWLVVSLRRGVRIALPLAFGSRQKQFIEETLQGLWELDSVELVKRDGVWFAHFKIKKNVVTYGAEEAKTLIGVDLGEWNAVAAAAISRDSPSRPMRGQFWGGQRIRFVRGKYAHIRRSLQRKKRLDLVKRIGSKEGRTVNQMLHEIAKGVVEYAKQFPKPVIVMEDLEGIRDRMSGDNKLLNRRLHSWSFRKLQKYIEYKALLSGIPIVYVKPKNTSRTCHRCGFTVDEVKGREFRCPRCGLRYNRDLNAAINIALALTRGRGWGAVTPPRTPT

SEQ ID NO: 738 - protein, 354 aa, Paenibacillus sp.
MQSVTIKIRFFPNNSIELKSLSNEYIRVINLLTEQAEQAEQAGAFPKLTTKHVAATLPSAVINQAIRDAKSIFKKVKKDRKRPILKKPTYYINNQNYSIRDSSIAFPIIINNIVKKTVFPAVLTERDKKYLQYAKCGLMRIVEKSGKWFAQVSLEVPTEITTGEHVMGVDLGLKFPAVAVTSGGKTGFFGNARENKYRKRKFRSERKVLGKKKKLHAIRRLDNKEQRWMKDRDHKASRQIINFATKNQVSVIHLEKLTNIRKTTRTSRKNEKNLHTWSFYRLSQFIEYKANMAGIKVEYVDPAYTSQKCPSCSALNKATDRKYSCLCGFHTHRDKVGAMNIIHAPVIGGNSRSA

SEQ ID NO: 739 - protein, 358 aa, Bacillaceae
MSQTITVQVKLLPTKEQASILSEMSQSYISTINTLVSEMVAEKKSTKKSSKNISAALPSAVKNQAIKDAKSVFKKAKKNKYKVIPVLKKPVCIWNNQNYSFDLTHILMPIMVNGKATKTPIRALLVDKDNRNFDLLKHKLGTLRVTKKTNKWIAQISVTIPPIQGTDLKVMGIDLGLKVPAVAVTDDEKVRFFGNGRQNKYVKRKFRSERKTLGKRKKLNAIRNSKDKEQRWMKDQDHKVSRAIIDFAKENKISVIRLEKLANIRQTASTSRKNEKNLHNWSFYRLAKFIEYKANLEGMKVEYVNPAYTSQTCPKCFEKNKAQDRKYKCKCGFEKHRDLVGAMNIRYAPVIDGNSHSA

SEQ ID NO: 740 - protein, 376 aa, Streptomyces sp.
MPEAEQAAALSATLRAVNDLACWVSDVAFAHGVPREYELRKRTYPRLKAEGLGAQAAQHTIKKVRDAYTALRANVRAGNLGKEGSKRRRKAESKPITFRPEAAQPYDDRCLSWKYDQQTVSIWTTEGRLKGVRFVCSASALKVLQQYRKGESDLIERDGVFYLIATCEVPEAEPYEPGGFIGVDLGIVNIATTSTGYQAAGRRLNRYRKRQLALRAKLQKKRTKSAKRRLKERSRREQRHAKNTNHIIAKTIVTEAERTSAGISLEELKGIRQRVRLRKPQRVALHSWAFAQLGEFIVYKAKRAGVPLVFVDPAYSSRECAECGHIDRLNRISQATFVCRSCGIVAHADRNASHVLGRRGEDAWTAGRESRVPAIP

SEQ ID NO: 741 - protein, 126 aa, Clostridium sp.
MKDIDHKLSREIINTAKAHDVSVIKLERLQNIRSTTRTSRKNNHSLHTWSFYRLATFIEYKAKLAGIKVEYVDPAYTSQICPICGSVHHANDRNYTCRCGFHTHRDLLGAINICNSTEYIGNRYTA

SEQ ID NO: 742 - protein, 256 aa, Halorubrum distributum
VRTVWTGEKWELHFVCKVEVEVAEAPGEKAVGVDLGINNFAALAYEDGHSELYPLNCLKQDDYYFSKRIARCDDSNSEQATRLNQKKSARRTHYFHTLSKHIVERCVDEGVGTIVVGNLSGIREDDDSDESRNWGKHGNLDLHSWAFDRFTDLLEYKAEMEGITVEEVSEEDTSKSCSCCGRKRDANRVERGLYVCDECGTVANADVNGAENIRQKVSPSPATDGGDRSNGWLAQPSTFLFDKETGAFAPQERATS

SEQ ID NO: 743 - protein, 376 aa, Halobacillus hunanensis
MGGENMATKTILVKLKHVTKKKHKQFMEEQAVYASCVNHCVERLLNGEKLSSKDVSFPLKSAIKNEGIRRAKKAVSDFKKGIAKTIPVFRNSLNIKINNQNWNTVDKNGRWYIAFTSNQGKKALPVVETKDVQSYFPFLTSHTREFRGTVELFRKGRRWYVAIPIQVSSDLDLGNNHPSVTKPLTDYTSIGVDLGLRHLVVLSEPTSGKRQFFSGKEVGYKRRHFRSLRRSLGKKKAQRAMERVGQKESRWMKDYNRKLAQDIVTFAQQFERPMIKLEQLENIRKTCRSMKRADKTIHSWAFYQLKQCIKERAATFNIPVVDIDPYQTSQTCFACKHAERSNRNREAFHCKNCGHKAHADLNASRNIATSTNLAAS

SEQ ID NO: 744 - protein, 389 aa, Thermococcus celer
MPNETIKLTAKFKLKNPPNGLDNLIQTYREIVNTLITHAHENNITSFYRLKKETYKSLRKEYPELPSHYLYTACQMATAIYKSYRKRNKKGKAKGKPAFKKEVIMLDDHLFKLDLDRKIIKLSTPNGRISLEFYPAKYHEKFRGWKVGQAWLVKTPKGVFVNVVFSTEVEAQEPKSFVGVDLNENNVTLSLPNGEFVQIITHEREVRTGYYVKRRRIQRKLKAGKKRKKLLEKYGEREKNRLNDLYHKVANKIVELAEEYGGIALEDLTNIRESIRYSAEMNGRLHRWSFRKLQSIIEYKAKLRGVSVVFVDPAYTSSRCPVCGGKLSPNGYRGVKCECGFEADRDVVGSWNIRLRALKMWGVSVPPESHSMKMGGWKVGRNDVYKSYG

SEQ ID NO: 745 - protein, 358 aa, Bacillus thermoamylovorans
MSQTVTVKIKLLPTKEQALTLTEMSKTYISTINDLVSEMVKEKKNTKKTSKNIDVSLPSAVKNQAIKDAKSVFKKAKKTKFETVPVLKKPMCIWNNQNYSFDFTHIYLPIMIDGKAKKTPIRALLVDKDNRNFNLLKQKLGTLRITKKSNKWVAQISVTIPTVKKTGVKVMGVDLGLKIPAVAVTDDEKVRFFGNGRENKYKKRKFRSVRKALGKKKKLNAIRNSKNKEQRWMKDKDHKISRAIVNFAKENKVSVIRLERLANIRQTTRTSRKNEKNLHTWSFYRLSQFIEYKANLEGIEVEYVNPAYTSQTCPRCSEKNKAQDRKYKCKCGFEKHRDIVGAMNIRYAPVVDGNSQPA

SEQ ID NO: 746 - protein, 126 aa, Clostridium sp.
MKDIDHKLSREIVNTAKAHDVSVIKLEQLQNIRSTTRTSRKNNHSLHTWSFYRLATFIEYKAKLAGIEVEYVDPAYTSQICPICGSVHHANDRNYTCRCGFHTHRDLLGAINICNSTEYIGNRYTA

SEQ ID NO: 747 - protein, 358 aa, Gracilibacillus timonensis
MSQTITIKVKLIPTKEQASILSEMSKTYISVINTLVSEMVDEKKSTKKSSKDISVSLPSAVKNQAIKDAKSVFKKGKKSKYKVIPILKKTVCVWNNQNYSFDSTHISMPIMMDGKAKKIPIRALFMDKDNRNMDLLKHKLGTLRITKKANKWMAQISVTIPTVQGTGLKVMGVDLGLKVPAVAVTDDEKVRFFGNGRQNKYVKRKFRSERKALGKRKKLNAIRNSKDKEQRWMKDQDHQVSRAIVNFAKDHRVSVIRLEQLANIRQTARTSRKNEKNLHSWSFYRLSQFMEYKANLEGIKVEYVNPAYTSQTCPTCFEKNKAQDRKYTCKCGFKKHRDLVGAMNIRYAPVIDGNSQSA

SEQ ID NO: 748 - protein, 388 aa, Streptomycetaceae bacterium
MPGMKIVTQVKLIPEADQAAALSATLRTVNDLACWVSEVAFAHGVPREYELRKYTYPRLKAEGLGAQAAQHVIKKVRDAYTTLHANIRAGNLGKSKSKRRVKAGSRPITFRSEAAQPYDDRCLSWQYDAQTVSIWTTAGRLKSVRFVCSADALKTLREYRKGEADLIECDGVFYLIATCEVPEAETYEPDCFIGVDLGIVNIATTSTAYQAAGRGLSRYRKRQVALRAKLQKKCTKSAKRRLKERSRREARHVKNTNHIIAKTIVTEAERTSAGISLEELKGIRQRVRLRKPQRVALHSWAFAQLGDFIVYKAKRAGVPLVFVDPAYTSQTCAECGHVDKRNRVDQGLFICRGCGVVAHADRNASHNIATRGETVWNAGRESRVPATP

SEQ ID NO: 749 - protein, 253 aa, Verrucomicrobium sp.
MRLGEHQRRILSSGRPKEAELVFRKGNWYFNLVVESDDKESIASGPVMGVDVGENNLAAHSLGGIFGGGRLCDRRDRHLALRRRLQSNGSRSAKQKLRQVSGKEXRHVTHVNHETSKAIVREALEAGVAKIMMEDLTHIRDRIKAGKRMRGRLHRWTFRQLQRFVEYKAKSAGIAVEYVDPAYTSQTCSSCKQLGRRTKHRFACPHCGLRAHSDLNASRNLARIGGTMVPPRAAVSTPNVGGADVGNHVCASR

SEQ ID NO: 750 - protein, 353 aa, Paenibacillus sp.
MQPITVKIRFFPKDISGLKELSKEYIRIVNTLTERAEIEGSFPKVTTKNIEAALPSAVLNQVIRDAKSVFRITKKRKKRPVLKKPTYCINNQNYSLDQSSLAFPIMVNGKAKKTIFPALITERDKKILQAAKLGLMRVVEKSGKWFAQISLEVPTPSQKPTKEQLMGIDLGLKVPAVAVTNEGKTKFFGNGRENKFMKRKFRKTRKCLGEKKKLSTLRKLHDKEQRWMKDKDHKISREIVNFAVDNQVSIIRLEQLTNIRKTTRTSRKNEKNLHTWSFYRLAQFIEYKANMVGIKVEYVDPAYTSQKCPTCDSKNKVKDRKYACSCGYKTHRDRVGAINIIHAPVIGGNSQSA

SEQ ID NO: 751 - protein, 408 aa, Clostridium sp.
MQLSETVKLYPTEYQIELTRNTMSEYISTVNNIVSDYTNKDNGNIESVKEIKNIKSISKLTTADVKAKLPSALCNQCIRDAKSIVKKYDKACKEVEKAKKNKKNQKSKKNKNSKNVKEVEEIKEVKKLKEIKVPVLKKLCCYINNQNFKIQDNYISFPVMIDGKSKRISVKTKMTDKQKLILSSHRLGTMRIVIKNINTLVAQFVYEINEIEKVNESNNVMGVDLGIKCPAVSYCTDGSVKFYGNGRKNKYMRRHYANLRKWFQKAKKPTVVKRIKNKEQRIMKDIDHKISREIVNTAKKHKAKVIKLERLENIRSTTRTSRKNNPSLHTWSFYRLAQYIEYKAKLAGIEVEYVYPAYTSQKCPQCGNIHHAKDRKYICKCGYHTHRDLLGAINICNSTEYIGNRCIA

SEQ ID NO: 752 - protein, 358 aa, Gracilibacillus timonensis
MSQTITIKIKLIPTKEQASILSEMSKTYISVINTLVSEMVDEKKSTKKSSKDISVSLPSAVKNQAIKDAKSVFKKGKKSKYKVIPILKKTVCVWNNQNYSFDSTHISMPIMMDGKAKKIPIRALFMDKDNRNMDLLKHKLGTLRITKKANKWMAQISVTIPTVQGTGLKVMGVDLGLKVPAVAVTDDEKVRFFGNGRQNKYVKRKFRSERKALGKRKKLNAIRNSKDKEQRWMKDQDHQVSRAIVNFAKDHRVSVIRLEQLANIRQTARTSRKNEKNLHSWSFYRLSQFMEYKANLEGIKVEYVNPAYTSQTCPTCFEKNKAQDRKYTCKCGFKKHRDLVGAMNIRYAPVIDGNSQSA

SEQ ID NO: 753 - protein, 358 aa, Bacillus cereus
MYQAVTVKIKLLLTKEQASILNAMGKEYISTINALVSEMVAEKKTTKKTTKDVPVNLPSAVKNQAIKDAKSVFQKVKKGKCEIIPVSKKPICVWNNQNYSFDFTHISLPLTIEGKTKRVSVRALLIDKHNRNFDLLKHKLGTLRITKKSNKWIAQISVTIPTAEKIGTKIMGVDLGLKVPAVAVTDDEKTRFFGNGRQNKYVRRMFKSKRKKLGESKKLSAIRNFDDKEQRYMKDQDHKISRAIVNFAKENKISVIRLEQLANIRQTTRTSRKNEKNLHTWSFYRLSQFIEYKANLEGIKVEYVNPAYTSQTCPNCSKKNKAQDRKYKCKCGFEKHRDLVGAMNIRYAPVIDGNSQSA

SEQ ID NO: 754 - protein, 391 aa, Thermococcus zilligii
MPSETVKLTAKFKLKETPEELDDLFSTYREIVNFLITYAFENKITSFYRLKKETYGGLRKKYSKLPSHYLYTACQMATAIFKSYRKRKKKGKAKGKPVFMKDVVMLDDHLFKLDLEAGVVKLSAPSGRVQLEFYSAKYHERFKDWRIGQAWLVRSKKGVFLNVVFSKDVEIREPEAFVGVDLNENNVTLSLPDWKFVQIITHEREVRTGYFVKRRRIQKKLRAGRKKEKLLEKYGERERNRLNDLYHKLANKIVELAGKYGGIALEDLAEIRNSIRYSAEMNGRLHRWSFRKLQSIIEYKAKLKGLRVVFVDPAFTSSLCPVCGGKLSPNGDRVLKCGCGFEGDRDVVGSWNIRLRGLKMWGVTVPPESQPMSRGWKVSRNDIYELYKSYG

SEQ ID NO: 755 - protein, 358 aa, Bacillus cereus
MYQAVTVKIKLLLTKEQASILNAMGKEYISTINALVSEMVAEKKTTKKTTKDVPVNLPSAVKNQAIKDAKSVFQKVKKGKCEIIPVSKKPICVWNNQNYSFDFTHISLPLTIEGKTKRVSVRALVIDKHNRNLDLLKHKLGTLRITKKSNKWIAQISVTIPTTEKTGTKIMGVDLGLKVPAVAVTDDEKTRFFGNGRQNKYVRRMFKSKRKKLGESKKLSAIRNFDDKEQRYMKDQDHKISRAIVNFAKENKISVIRLEQLANIRQTTRTSRKNEKNLHTWSFYRLSQFIEYKANLEGIKVEYVNPAYTSQTCPNCSKKNKAQDRKYKCKCGFEKHRDLVGAMNIRYAPVIDGNSQSA

SEQ ID NO: 756 - protein, 358 aa, Terrabacteria group
MSQTITVKIKLIPTKEQASILSEMSKTYISTINDLVSDMVKEKKSTKKSSKHMDVPLPSAVKNQAIKDAKSVFKKVKKSKYEVVPVLKKPMCIWNNQNYSFDLTHISMPIVVNGKVKKTPIRALLVDKDNRSIDLLKHKLGTLRITKKSNKWIAQISVTVPTTQGTGLKVMGVDLGLKVPAVAVTDDEKVRFFGNGRQNKYKRRKFRSERKTLGKKKKLDAIRSSKDKEQRWMKEQDHKVSRAIINFAKENKISVIRLEKLANIRQTTRTSRKNEENLHTWSFYRLAQFMEYKANLAGIRVEYVNPAYTSQICPKCSEKNKVQDRKYKCKCGFEKHRDLVGAMNIRSAPVVDGNSQSA

SEQ ID NO: 757 - protein, 211 aa, Duodenibacillus massiliensis
MRFFLWRFSXSGEEHLKNLKADEIMGIDVGENNIAAVSTGRIWKAGALKDKRDRYMSQRKRLQRNGSQSARQHLKKASGRERRHVTHVNNVVSKEIVQEAAKRGIKLIALEDLTHIRDHIKAGKRIRSRLHRWSFRELQEMIVYKAAAAGIRCVFLDPRYTSQTCSQCGAPGKRHKHGFRCSQCGHLAHSDLNASRNLQGLCRQLSAQGLM

SEQ ID NO: 758 - protein, 359 aa, Bacillus mycoides
MSQTLTVKVKLIPTKEQSRLLEESSREYIKVMNMLVSEMVEAKKSTKKSTKDIEANIPSAVKNQAIKDAKSLFATKVKKSNYKIIPILKKPVCVWNNQNYSFDSTHISIPFKVNGKSTRLKVRVLLINKKNRNLDLLKHKLGTLRITKKSNKWMAQISVTLPTNERAGTKILGVDLGLKVPAVAITDDDKVRFFGNGRQNKYRKRKFRSVRKKLGKDKKVNAIRRFDDKEQRWMQEKDHKISREIIDFAIANQISVIRLEQLTNIRQTARTSRKNEKNLHTWSFYRLAQFIAYKATIAGIQIEYVNPAYTSQSCPKCAEKNKARDRKYKCPCGFKTHRDIVGAMNIRYATVIDGNSQSA

SEQ ID NO: 759 - protein, 358 aa, Bacillus sp.
MSQTITVKIKLLPTKEQDLTLTEMSKTYISTINDLVSEMVKEKKSTKKTSKNIGASLPSAVKNQAIKDAKSVFKKAKKTKLETIPVLKKPTCIWNNQNYSLDFTHISLPIMIDGKAKKTPIRALLIDKENRNFNLLKHKLGTLRITKKSNKWIAQISVTTPTPQKTGFKVMGVDLGLKVPAVAVTDDGKVRFFGNGRQNKYKKRKFRSVRKALGKKKKLNAIRSSKNKEQRWMKDQDHKVSRAIVNFAKENEISVIRIEQLANIRQTTRTSRKNEKNLHTWSFYRLSQFIEYKAKLEGIKVEYVNPVYTSQTCPHCSEKNKAQDRKYKCKCGFEKHRDLVGAMNIRCAPVIDGNSQSA

SEQ ID NO: 760 - protein, 117 aa, Paramaledivibacter caminithermalis
VNHKISKEIVNIAKEEKAIINLEELKNIRERIKYSKKMNKRLHNWNFYQLQTFIEYKANAEGLEVVYVKPNYTSQMCSACEHIDKRNRPNQSTFKCKACGYEANADYNTSVNIANVL

SEQ ID NO: 761 - protein, 358 aa, Bacillus sp.
MSQTITVKIKLLPTKEQDLTLTEMSKTYISTINDLVSEMVKEKKSTKKTSKNIGASLPSAVKNQAIKDAKSVFKKAKKTKLETIPVLKKPTCIWNNQNYSLDFTHISLPIMIDGKAKKTPIRALLIDKENRNFNLLKHKLGTLRITKKSNKWIAQISVTTPTPQKTGFKVMGVDLGLKVPAVAVTDDGKVRFFGNGRQNKYKKRKFRSVRKALGKKKKLNAIRSSKNKEQRWMKDQDHKVSRAIVNFAKENEISVIRIEQLANIRQTTRTSRKNEKNLHTWSFYRLSQFIEYKAKLEGIKVEYVNPVYTSQTCPNCSEKNKAQDRKYKCKCGFEKHRDLVGAMNIRCAPVIDGNSQSA

SEQ ID NO: 762 - protein, 242 aa, Escherichia coli
MIFTKIIRGFIRAELVFRKGLWFFNLVVEITDTTMVVSEKTMGVDMGENNLAAHSLGKLFGGEQLRDERDRHLALRRRLQSNGSQSAKQKLRQVSGKEMRRVKQTNHETSKVIVAAAAEAGIGTIILEDLTHIRDRIKAGKRVRSRLHRWAWRQLQTFIEYKARAVGIMVKYVNPAYSSQSCSCCGCLGKRHKHRFECPHCGFRAHSDLNASRNLAWIGETAVLPRASVNTPDVGSPSLAPQ

SEQ ID NO: 763 - protein, 390 aa, Streptomyces sp.
MKLVIRVKLLPTPEQASALQATLHACNAAANHVSHTAFTTGTKRNRELRALTYTQLKTRWSLGAQAAQHVIKKTADAYTALTGNLNAGNLGKPGSKRFRRATEKPITFRPEGAQPYDDRMLSWQMPQRTVSIWTVAGRMKRLAFTGQETQLLLLAHHRQGESDLINHNGHWYLLATVDLPENPTTPDPRGFIGIDLGITNIATTSTGHRHSGRRLNRSRQNDRRNRDNLAKKQTRSATRRAKRRAGREARRTRDINHKISKHIVTEAQRTGRGIALEDLGGIRERARLKKPQRVTIHSWAFAQLGAFIAYKARRAGVPVVHVHPAYTSQECSRCHHIDKRNRPTQAVFSCRNCGFVEHADLNASHVIADRGWWTWVCGAESQVPALTLIA

SEQ ID NO: 764 - protein, 274 aa, Ktedonobacter racemifer
MFKPVRCPRSQHCAVRYNVHTSTLDWQTQTVRLSTTQGKMSLAFTVPHFSERYRGCRITTADLLCCNGTWWLHVVVDVPEPVVQPHPEVIGVDLGLNRPAVTSTRHFLGTRRWKEIDRRIFRLKRKLQSNGSKSTKRHLKKLARKQMRFHRDCDHVLSKRLVQQAPPGSTIVLENLTNLREGVRHRKGEGQRRLHTWSFAQLYGFIAYKAQERGIVVERVDPRHTSQTCSRCGHQARNNRRSQSVFHCRACGYQLHADLNAAIVRRFGAYQISL

SEQ ID NO: 765 - protein, 445 aa, Natrinema versiforme
MAKQVVTRTYTAFIRNQSRVSDDLDSLGFAASKLWNVGRWTISRVWDELDYIPEHDELTAYLKSHERYDDLHSQSSQRVLQELAEAFNGWYSKRRNGDTRANPPGYRKHGDEHPRSTVTFKNKGFKLDTQYNRVRLSKGSNLKEYWSDFILCEYQTRPDIDLSTVESVQQVRAVWTGDEWELHFVCKVEVEVAESPGEKTVGVDLGINNFAALAYEDGHSELYPLNCLKQDNYYFSKRIARCDDSNSEQATRLNQKKSRRRTHYFHALSKHIVQRCVEEGVGTIVVGDLSGIREDEENGESKNWGKHGNLDLHSWAFDRFTDLLEYKAEMEGISVEDVPERGTSKSCSCCSRERKANRVERGLYVCDECGLVANADVNGAENIRQKVSPSPVTDGVDETLCVSSAHQNAKRSEDGDRSNGWLAQPSTFLFDKETGAFAPQERVTS

SEQ ID NO: 766 - protein, 208 aa, Methanosarcina sp.
MGVDVGINYLAVASTTDKKCEFFAGGELKNLRNTYKKMRARLQSKGTLSAKRVMKRLSGKEKRLMKDVNHCISKKIVEFALENNVSVIGLEDLTGIRDRTQYRVRKKQRYTHSSWAFRQLQTFIEYKAKQVGILVEYINPEYTSQTCSRCNHISKNNRKGLRFRCGACGFEMNADLNAARNIEHRTRDFRYSVESQGCLSTIHTNKMI

SEQ ID NO: 767 - protein, 358 aa, Bacillus cereus
MYQAVTVKIKLLPTKEQASILNAMGKEYISTINALVSEMVAEKKTTKKTTKDVPVNLPSAVKNQTIKDAKSVFQKVKKAKYKIIPVLKKPICVWNNQNYSFDFTYIRLPLMIEGKTKKVSVRALLIDKHNRNFDLLKHKLGTLRITKKSNKWIAQISVTIPTAEKIGTKIMGVDLGLKVPAVAVTDDEKTRFFGNGRQNKYVRRMFKSKRKKLGESKKLSAIRNFDDKEQRYMKDQDHKISRAIVNFAKENKISVIRLEQLANIRQTTRTSRKNEKNLHTWSFYRLSQFIEYKANLEGIKVEYVNPAYTSQTCPNCSKKNKAQDRKYKCKCGFEKHRDLVGAMNIRYAPVIDGNSQSA

SEQ ID NO: 768 - protein, 268 aa, Exiguobacterium sp.
VCVWNNQNYSFDFESISFPVWMDGKSVKMRFRAAMVDKDNRNTRLLANKLGTLRVTKKGRKWIAQISVHVPTVPRTGVRVMGVDLGLKVPAVAVTDDDTTRFFGNGRKNKYMKRKFRAERKELGKKKKPKAIKRRNQKEQRWMRDKDHKVSRAIVDFARQKKISVIRLELLANIRQTARTSRKNNQNLHSWSFYRLASFIEYKAALSGIKVEYVNPAYTSQTCPSCSVRNKVRDRVYTCACGFKGHRDAVGAMNIRYAPVMDGNSPSA

SEQ ID NO: 769 - protein, 376 aa, Streptomyces chartreusis
MPEAEQVAALLATLRTVNEAANWVSTVAFEQGVPREYELRKHTYAELKSRGLGAQAAQHTIKKVRDAYTTLKANIKAGNLGKPGSKRRKKAESTPIAFRPAAAQPYDDRCLSWQYDAQTVSIWTTAGRIRGMRFICSADGLKMLRQHRQGESDLVERNGVFYLIATCEVPEEKSYEPDGFIGVDLGIVNIATTSTGYQAAGRDLNRHRKRHGDLRTKLQRKGTKSAKRLLKKRNRRERRHVSNTNHIIAKTIVTEAERTSAGIALEDLGGIRQRVRLRKPQRVTLHSWAFAQLGESIAYKARRAGVPVVHVNPAYTSQMCCECGHVDKKNRVDQDLFTCRNCGVVAHADRNASHNIAQRGAVVWNAGRESRVPDTP

SEQ ID NO: 770 - protein, 376 aa, Streptomyces sp.
MPKADQAAALRSTLRTVNEAANWVSGVAFERGVPREYELRKHTYAELKAQGLGAQAAQHVIKKTRDAYTTLKANIKAGNLGKPASKRRRKAESKPIVFRPEAAQPYDDRCLSWQYDQQTVSIWTTAGRLRGVRFACSPDALRMLREHRKGESDLIERDGAFYLIAVCDIPEPEVYEPAGFVGVDLGIVNIATASTGYRAAGRGLNRHRKRQLDLRKKLQAKGTKSAKRLLKKRSRKEARHTANVNHIISKTIVTTAERTGSGIALEDLTGIRSRVRLRKDQRTSLHSWSFHQLGQYIEYKAKRAGVPLVYVDPAYTSQQCSECGHIDRKNRVDQATFACRSCGALMHADDNASHNIGRKAKTVWTAGRESRVPAIP

SEQ ID NO: 771 - protein, 351 aa, Paenibacillus sp.
MQTVTIQIRIFPTRPSVLVDMGNEYIRTVNELTEQAERSGTFPKLTSKTIHANLPSAVKNQVIRDAKSLFQRFKKTKKRPLLQKRVYYVNNQNYTIWGNHISFPVILDGKVQRFVVPVLLPDRERDMLSNGKPGLLRVVQKSAKWFVQISIERPTEPAEGHEVMGIDLGLKVPAVVVTSSGKTKFCGNGRKNKFVRRKYSTYRRKLGKLKKLSAIRKQNDKESRYMKDQNHKISRQIVNMAIQEQVSVIKLEKLTDIRKTTRTSRKNAKNLHHWSFYQLQMFIGYKATLAGIQVVEVNPAYTSQTCPSCGERNKAKDRTYQCDCGYTAHRDRVGAINIMRQPVADGNSLPA

SEQ ID NO: 772 - protein, 358 aa, Bacillus mycoides
MYQTVTVKIKLLPTKEQASILNAMGKEYISTINALVSEMVAEKKTTKKTTKDVPVNLPSAVKNQAIKDAKSVFQKVKKVKCKIIPVLKKTICLWNNQNYSFDFTYIRLPLMIDGKTKKVSVRALLIDKHNRNFDLLKHKLGTLRITKKSNKWIAQISVTIPTAEKTGTKIMGVDLGLKVPAVAVTDDEKTRFFGNGRQNKYVRRMFKSKRKKLGESKKLNAMRNFDDKEQRYMKDQDHKISRAIVNFAKENKISVIRLEQLVNIRQTTRTSRKNEKNLHTWSFYRLSQFIEYKANLEGIKVEYVNPAYTSQTCPNCSKKNKAQDRKYKCKCGFEKHRDLVGAMNIRYAPVIDGNSQSA

SEQ ID NO: 773 - protein, 426 aa, Haloquadratum walsbyi
MAKQVVTRTYIASIRNQSQVQDDLDSLGFAASKLWNVGRWTCSRIWDEIDHIPNHNELTTYLKTHERYDDLHSQSSQRVLQELAEAFNGWYGKRRNGDTNANPPGYRKHGDDHPRSTVTFKAAGFKLDTQYYRVRLSKGSNLKDYWSDFILCEYQTRPDVDLSTVENVQQVRIVWTGTEWELHFVCKVQIDVAEAPSENTVGVDLGINNFAALAYEDGHGELYPLNCLKQDDYYFSKRIARCDDSNSEQATRLNHKKSARRTHYFHTLSKHIVERCVEEGVGTIVVGDLSGIREDDDTNKSKNWGKHGNLDLHSWAFDRFTDLLEYKAEMEGITVEEASEEDTSKSCSCCGRKRDANRVERGLYVCDDCGTVANADVNGAENIRQKVSLSSLNLSVNRSNGWLAQPSTFLFDKETGAFAPEERVRS

SEQ ID NO: 774 - protein, 358 aa, Bacillus caseinilyticus
MSQTITVKIKLLPTKEQASVLQNMSQSYISTINTLVTEMVAEKKSTKKSSKDISALLPSAVKNQAIKDAKSVFKKVKKNKYKVIPVLKKPVCIWNNQNYSFDFTHISMPIMINGKATKTPIRALLVDKDNRNFDLLKHKLGTLRITRKANKWIAQISVTIPTTQGTGLKVRGVDLGLKVPAVAVKDDDRLCFFGNGRQNKYIKRKYRSERKALGKKKKLNAIRSSKEKEQRWMKDQDHKISRAIVNFAKDKKISVIRLEQLAYIRQTTRSSRKNEKNLHNWSFYRLSQFIEYKANLVGIKVEYVNPAYTSQTCPKCSEKNKALDGKYKCKCGFEKHRDLVGAMNIRYAPVVDGNSQPA

SEQ ID NO: 775 - protein, 371 aa, Nitrosococcus oceani
MKRTVSIKLVPTPEQAQALLELQSELAKACNLIVPFARDNRCWNRVALHHLAYYPVREATRLGSQMVCNAVKAVADAYKVLKLGRHDEIPVIRFRETGSVHFDARTYRLKGDAVSLYTLTGRAIVKMSPGEFQAQYLAAGKPKEGKLVRRGKQWFFNLVLDWPDTAPAKGSGILGIDLGENNLASTSSGKILGGGPLRHVRDRHLALRRRLQSNGRQSARQLLKKVSGKERRHMRQVNHEASKAMVGEALKQGASTIVLETLTHIRKRIKGGKRLRARLHRWAWRELQDFIAYKAEAAGIRVIYVNPAYSSKSCSACGCLGSRIQHKFSCSSCGHLAHSDRNAAVNLAKLAKSIGIARLGVAPAHVAVPTH

SEQ ID NO: 776 - protein, 393 aa, Thermococcus piezophilus
MPSVTVKLTAKFKLKTIPEGLDGLFSTYREIVNFLITYAFENNVTSFYRLKKETYRELREKYSQLPSHYLYTACQMATSIFKSYRKRKRKGKANGKPIFKKEVIMLDDHLFKLDLEKGLIKLSTPNGRIQLEFYPAKYHEKFGDWKVGQAWLVRTPKGVFLHVVFSRAVEVREPKAFIGVDLNENNVTLSLPNGEFLQIITHEREIRTGYFLKRRKIQRKIRAGKKRKELLEKYGQREKNRLNDLYHKIANKIVELAEEYCGIALEDLSEIRDSIRYSAEMNGRLHRWSFCKLQSIIEYKAKLKGIKVVFVNPAFTSSLCPICGGRLSPNGCRVLHCENCGFESDRDVVGSWNIRLRALKMWGVSAPPERQPMKMGGWKVTHYDSFICSKSSG

SEQ ID NO: 777 - protein, 413 aa, Duodenibacillus massiliensis
MSVQKRSKATSKGLNTSADGVRRVEGSGKCVRTACVRLELLDPAAHEKLVATQRLYAQVCNFVVPTVAADRTKRLWQRFTLHHAVYDKIKAKFPDLGSQYACNVIRSVSAAYKTELANHPAQLKSKDKKLKTLVFRHPSVHVDKNTLTFFPDGTVSISTISGRIRARLFPGPFQKELLASGKRKECNLVLHPRRGRKEAFWELHIAVESQGCSGEEHLKNLKADEIMGIDVGENNIAAVSTGRIWKAGALKDKRDRYMSQRKRLQRNGSQSARQHLKKASGRERRHVTHVNNVVSKEIVQEAAKRGIKLIALEDLTHIRDHIKAGKRIRSRLHRWSFRELQEMIVYKAAAAGIRCVFLDPRYTSQTCSQCGAPGKRHKHGFRCSQCGHLAHSDLNASRNLQGLCRQLSAQGLM

SEQ ID NO: 778 - protein, 358 aa, Bacillus cereus
MYQTVTVKIKLLPTKEQASILNAMGKEYISTINALVSEMVAEKKTTKKTTKDVPVNLPSAVKNQAIKDAKSVFQKVKKGKCKIIPVLKKTICVWNNQNYSFDFTYIRLPLMIDGKTKKVSVRALLIDKHNRNFDLLKHKLGTLRITKKSNKWIAQISVTIPTAEKTGTKIMGVDLGLKVPAVAVTDDEKTRFFGNGRQNKYVRRMFKSKRKKLGESKKLNAIRNFDDKEQRYMKDQDHKISRAIVNFAKENKISVIRLEQLVNIRQTTRTSRKNEKNLHTWSFYRLSQFIEYKANLEGIKVEYVNPAYTSQTCPNCSKKNKAQDRKYKCKCGFEKHRDLVGAMNIRYAPVIDGNSQSA

SEQ ID NO: 779 - protein, 413 aa, Duodenibacillus massiliensis
MSVQKRSKATSKGLNTSADGVRRVEGSGKCVRTACVRLELLDPAAHEKLAATQRLYAQVCNFVVPTVAADRTKRLWQRFTLHHAVYDKIKAKFPDLGSQYACNVIRSVSAAYKTELANHPAQLKSEDKKLKTLVFRHPSVHVDKNTLTFFPDGTVSISTISGRIRARLCPGPFQKELLASGKRKECNLVLHPRRGRKEAFWELHIAVESQGCSGKEHLKNLKADEIMGIDVGENNIAAVSTGRIWKAGALKDKRDRYMSQRKRLQRNGSQSARQHLKKASGRERRHVTHVNNVVSKEIVQEAAKRGIKLIALEDLTHIRDHIKAGKRIRSRLHRWSFRELQEMIVYKAAAAGIRCVFLDPRYTSQTCSQCGAPGKRHKHGFRCSQCGHLAHSDLNASRNLQGLCRQLSAQGLM

SEQ ID NO: 780 - protein, 413 aa, Duodenibacillus massiliensis
MSVQKRSKATSKGLNTSADGVRRVEGSGKCVRTACVRLELLDPAAHEKLAATQRLYAQVCNFVVPTVAADRTKRLWQRFTLHHAVYDKIKAKFPDLGSQYACNVIRSVSAAYKTELAKHPAQLKSEDKKLKTLVFRHPSVHVDKNTLTFFPDGTVSISTISGRIRARLCPGPFQKELLASGKRKECNLVLHPRRGRKEAFWELHIAVETQGCSGEEHLKNLKADEIMGIDVGENNIAAVSTGRIWKAGALKDKRDRYMSQRKRLQRNGSQSARQHLKKASGRERRHVTHVNNVVSKEIVQEAAKRGIKLIALEDLTHIRDHIKAGKRIRSRLHRWSFRELQEMIVYKAAAAGIRCVFLDPRYTSQTCSQCGAPGKRHKHGFRCSQCGHLAHSDLNASRNLQGLCRQLSAQGLM

SEQ ID NO: 781 - protein, 413 aa, Duodenibacillus massiliensis
MSVQKRSKATSKGLNTSADGVRRVEGSGKCVRTACVRLELLDPAAHEKLAATQRLYAQVCNFVVPTVAADRTKRLWQRFTLHHAVYDKIKAKFPDLGSQYACNVIRSVSAAYKTELAKHPAQLKSEDKKLKTLVFRHPSVHVDKNTLTFFPDGTVSISTISGRIRARLCPGPFQKELLASGKRKECNLVLHPRRGRKEAFWELHIAVESQGCSGEEHLKNLKADEIMGIDVGENNIAAVSTGRIWKAGALKDKRDRYMSQRKRLQRNGSQSARQHLKKASGRERRHVTHVNNVVSKEIVQEAAKRGIKLIALEDLTHIRDHIKAGKRIRSRLHRWSFRELQEMIVYKAAAAGIRCVFLDPRYTSQTCSQCGAPGKRHKHGFRCSQCGHLAHSDLNASRNLQGLCRQLSAQGLM

SEQ ID NO: 782 - protein, 235 aa, Halobiforma haloterrestris
MSEAPGEKTVGVDPGINNFAALAYEDGHAELYPLNCLKQDDYYFSKRIARCDDSDSEQATRLDQKKSRRRTHYFHTLSKHIVQRCVDEGVGTIVVGDLSGIREDDENGEAKDWGKHGNLDLHSWAFDRFTDLLEYKAEMEGITVEEVSERDTSKSCSCCGRKRDANRVERGLYVCDECDMVANADVNGAENIRQKVSPSPATDGGDRSNGWLAQPSTFLFDKETGAFAPQEPVTS

SEQ ID NO: 783 - protein, 385 aa, Streptomyces roseochromogenus
MKIVTQVKLMPEADQAAALLATLRTVNDLACWVSEVAFAQGVPREYELRKHTYPRLKAEGLGAQAAQHCIKKVRDAYTTLHANIRAGNLGKPKSKRRIKAESKPITFRPDAAQPYDDRCLSWQYDTQTVSIWTTAGRIKNVRFACSADALKTLREYRKGESDLIERDGDFYLIATCEVPEAETYEPDGFIGVDLGIVNIATTSTDHQAAGRGLNRYRKRQLALRAKLQKKRTKSAKRRLKERSRREQRHVKNTNHIIAKTIATEAERTSAGISLEELKGIRQRVRLRKPQRVALHSWAFAQLGDFIVYKAKRAGVPLVFVDPAYSSRECAECGHIDRLNRISQAKFACRSCGVVAHADRNASHVLARRGETVWNAGRESRVPATP

SEQ ID NO: 784 - protein, 359 aa, Bacillus cereus
MSQTLTVKVKLIPTKEQSRLLEESSREYIKVMNMLVSEMVEAKKSTKKSTKDIEANIPSAVKNQAIKDAKSLFATKVKKSNYKIIPILKKPVCVWNNQNYSFDSTHISIPFKVNGKSTRLKVRALLINKKNRNLDLLKHKLGTLRITKKSNKWMAQISVTLPTNERAGTKVLGVDLGLKVPAVAITDDDKVRFFGNGRQNKYRKRKFRSVRKKLGKDKKVNAIRRFDDKEQRWMQEKDHKISREIIDFAIANQISVIRLEQLTNIRQTARTSRKNEKNLHTWSFYRLAQFIAYKATIAGIQIEYVNPAYTSQSCPKCAEKNKARDRKYKCPCGFKTHRDIVGAMNIRYTTVIDGNSQSA

SEQ ID NO: 785 - protein, 362 aa, Paenibacillus sp.
MVKNKKRGGETLQTVTIQIRIFPTRPSVLVDMGNEYIRTVNELTEQAERSGTFPKLTSKTIHANLPSAVKNQVIRDAKSLFQRFKKTKKRPLLQKRVYYVNNQNYTIWGNHISFPVILDGKVQRFVVPVLLPDRERDMLSNGKPGLLRVVQKSAKWFVQISIERPTEPAEGHEVMGIDLGLKVPAVVVTSSGKTKFCGNGRKNKFVRRKYSTYRRKLGKLKKLSAIRKQNDKESRYMKDQNHKISRQIVNMAIQEQVSVIKLEKLTDIRKTTRTSRKNAKNLHHWSFYQLQMFIGYKATLAGIQVVEVNPAYTSQTCPSCGERNKAKDRTYQCDCGYTAHRDRVGAINIMRQPVADGNSLPA

SEQ ID NO: 786 - protein, 386 aa, Peptococcaceae bacterium
MKQTDEEKGQVITIKLKLFNSTKTKQDMYQTMADRTTDFANRYLGLDKPMRPKSSGDAKLHSEPLPAAVLCQAIRDIEAKKNAKSFKRLWPDFNNQNFRIEKETMQDGGAAWKVSFPTLEKRVGVPIQAEKYQVKYLELLLSGQAKQGTAQLIKCGRQWYIHLALTVSVKAEKKPPKYMGVDLGLIDLAVASILGSTLFFSGAELAYIRRHYAELRKKLQKKGAHKALRKLGNKEHRWIMAINHTISRRIIEFAKAHGVSVIRLEDLRGARWTKSQRKKQRKDAGRSLHSWAFFQLRQFIEYKAALAGIEVELVNPELTSLTCSRCGEVRTSRPAGRWYTCPRCGKVKHIDANAADNIAQAISGLSEEKRAKTILKPKTRRRTTAA

SEQ ID NO: 787 - protein, 267 aa, Halococcus sediminicola
MGTLHYREDEDAFYLHIVVMKEVEQREGVRVLGVDLNLKNVAVTSTGTFYDGGRLLWGQNHHFRVRRSLQDKDTRSAKQTLQQVSGRENRFVLDRLHTLSRRLVDEARNYNCAFIAVERLTNIRDRLDNGNDCIKRQMHNWAFRELREMLAYKAAEHGIRVEDVNPAFTSQTCSRCGHQSSTNRDSSTGWFSCNECGTEYDGDYNAAKNIGMRLVTLPSGKRPDGLGNGQLALKSGTLNGSGDYTAHDDVSADQESTDKPTTSVVGR

SEQ ID NO: 788 - protein, 413 aa, Duodenibacillus massiliensis
MSVQKRSKATSKGLNTSADGVRRVEGSGKCVRTACVRLELLDPAAHEKLAATQRLYAQVCNYVVPTVAADRTKRLWQRFTLHHAVYDKIKAKFPDLGSQYACNVIRSVSAAYKTELAKHPAQLKSEDKKLKTLVFRHPSVHVDKNTLTFFPDGTVSISTISGRIRARLCPGPFQKELLASGKRKECNLVLHPRRGRKEAFWELHIAVESQGCSGEEHLKNLKADEIMGIDVGENNIAAVSTGRIWKAGALKDKRDRYMSQRKRLQRNGSQSARQHLKKASGRERRHVTHVNNVVSKEIVQEAAKRGIKLIALEDLTHIRDHIKAGKRIRSRLHRWSFRELQEMIVYKAAAAGIRCVFLDPRYTSQTCSQCGAPGKRHKHGFRCSQCGHLAHSDLNASRNLQGLCRQLSAQGLM

SEQ ID NO: 789 - protein, 249 aa, Clostridium sp.
MIDGKSKRISVKTKMTDKQKLILSSHRLGTMRIVIKNINTLVAQFVYEINEIEKVNESNNVMGVDLGIKCPAVSYCTDGSVKFYGNGRKNKYMRRHYANLRKWFQKAKKPTVVKRIKNKEQRIMKDIDHKISREIVNTAKKHKAKVIKLERLENIRSTTRTSCKNNPSLHTWSFYRLAQYIEYKAKLVGIEVEYVDPAYTSQKCPQCGNIHHAKDRKYICKCGYHTHRDLLGAINICNSTEYIGNRCIA

SEQ ID NO: 790 - protein, 386 aa, Rhodococcus opacus
MKRVVKIKLAPTDAQAHALHETLVLCNTAADVVSRVAQAVEDRRAFALQKAVYHQLKALGLSAQPAVRTIKKVADAYATRGANLEAGNYGPRGGKRATDIAATAIGFRALAAQPFDDRCLSWQQQDSTVSIWTCEGRLKAVRYVCAPWQRELLEHRCGETDLVFRDNMWFLYATVDVPTPEPVVVQEFLGVDLGIVNLAVTSDDTAASADWSGGAVTARRTKYARTRRALQKVGSKSAKRKLRGRREKEHRYATDINHQISKTIVAQAQRTGRGIVLEDLSGIRERVRLAKTQRQQLHSWAYAQLRDFVTYKAVSVGVPLVVIDPRNTSRTCYPCGHVDKANRTTQDRFVCRMCGHVDQADHNAALNIAYLGYVQYTTTTRSHRAV

SEQ ID NO: 791 - protein, 195 aa, Methanotorris formicicus
MSKVKEKGPYKQTLWFGVDLGVYNLVVIADNKGESLRFDGEIVKGHKRRLKKKEFNKYTKVGNKISNYSRYINHVISKEIVKKAKQYNAGIVLEKLKGLKKSKLNNSTPKNIRRVLHIWSYADLIEKIEYKANLEGVPVVEVSPRNTSKTCSRCGYVNRRLKNERIFICSKCGLEIDRDLNAAINIAKKVASKQV

SEQ ID NO: 792 - protein, 392 aa, Thermococcus barophilus
MPSETIKLTAKFKLKEAPESLDYLFSTYRKIVNFLIIHAFENNITSFYRLKKETYKGLRKEYPELPSHYLYTACQMATAIFKSFRKRKKKGKANGRPVFKKEVIMLDDHLFKLNLEAGVVKLLTLKGRILLEFYPAKYHEKFKDWKVGQAWLVRMPKGVFLNVVFSKEVEVSEPKAFVGVDLNENNVTLSLPNGEFVQIITHEREIRAGYFVKRRKIQQKIRAGRKRRELLEKYGERKRNRLNDLYHKLANKIVELAEKYGGLALEDLTEIRDSIRYSAEMNGRLHRWSFRKLQSIIEYKAKLKGVRVVFVNPAFTSSLCPVCGGKLSPNGHRVLSCKCGFEADRDVVGSWNIRLRALKMWGVPVPPESQPMKTGGWKVSRNDIYKLYKSYG

SEQ ID NO: 793 - protein, 358 aa, Exiguobacterium sp.
MSQVVTVEVRIYATRRQDAILKRMGKTYIQTANRVVANMVASEDGKRWSSKDIDTPLPSAVKNQLAGDAVGIYKKARKEDFKRIPVLKKPVCVWNNQNYSFDFESISFPVWMDGKSVKMRFRAAMVDKDNRNTRLLANKLGTLRVTKKGRKWIAQISVHVPTVPRTGVRLMGVDLGLKVPAVAVTDDDTTRFFGNGRKNKYMKRKFRAERKALGKKKKPKAIKRRNQKEQRWMRDKDHKVSRAIVDFARQKKISVIRLELLANIRQTARTSRKNNQNLHSWSFYRLASFIEYKAALSGIKVEYVNPAYTSQTCPSCSVRNKVRDRVYTCACGFKGHRDAVGAMNIRYAPMMDGNSPSA

SEQ ID NO: 794 - protein, 358 aa, Bacillus cereus
MYQTVTVKIKLLPTKEQASILNAMGKEYISTINALVSEMVAEKKTTKKTTKDVPVNLPSAVKNQAIKDAKSVFQKVKKAKCKIIPVLKKPICVWNNQNYSFDFTYIRLPLMIDGKTKKVSVRALLIDKHNRNFDLLKHKLGTLRITKKSNKWIAQISVTIPTAEKTGTKIMGVDLGLKVPAVAVTDDEKTRFFGNGRQNKYVRRMFKSKRKKLGESKKLNAIRNFDDKEQRYMKDQDHKISRAIVNFAKENKISVIRLEQLVNIRQTTRTSRKNENNLHTWSFYRLSQFIEYKANLEGIKVEYVNPAYTSQTCPNCSKKNKAQDRKYKCKCGFEKHRDLVGAMNIRYAPVIDGNSQSA

SEQ ID NO: 795 - protein, 425 aa, Thermococcus guaymasensis
MSSETIKLTAKFKLKETPEGLGALFQTYREIVNFLITHAFENTVTSFYRLKKETYKSLRQEYPELPSHYLYTACQMATAIFKSFRKRKKKGKAKGKPVFKREVIMLDDHLFKLDLENKTVKLSTPNRRIQLEFYPAKYHEKFKDWKVGQAWLVKTPKGVFLNVVFSREVEVEELKAFVGVDLNENNVTLSLPNGEFVQIITHEREVRTGYFLKRRKIQRKIRAGKRRRGLLEKYGRREKNRLNDLCHKLANKIVELAEKYGGIALEDLAEIRDSIRYSAEMNGRLHRWSFRKLQSIIEYKAKLRGVRVVFVNPAFTSSLCPVCGEKLSPNGHRVLKCSNCGFEADRDVVGSWNVRLRALKMWGVTVPPESPPMKTGVGKVIRYDWFTSSKSSGQPERWANLDAAFPSAPQVPQRVPQSTDRARSP

SEQ ID NO: 796 - protein, 358 aa, Exiguobacterium sp.
MSQVVTVEVRIYATRRQDAILKRMGKTYIQTANRVVANMVASEDGKRWSSKDIDTPLPSAVKNQLAGDAVGIYKKARKEDFKRIPVLKKPVCVWNNQNYSFDFESISFPVWMDGKSVKMRFRAAMVDKDNRNTRLLANKLGTLRVTKKGRKWIAQISVHVPTVPRTGVRLMGVDLGLKVPAVAVTDDDTTRFFGNGRKNKYMKRKFRAERKALGKKKKPKAIKRRNQKEQRWMRDKDHKVSRAIVDFARQKKISVIRLELLANIRQTARTSRKNNQNLHSWSFYRLASFIEYKAALSGIKVEYVNPAYTSQTCPSCSVRNKVRDRVYTCACGFKGHRDTVGAMNIRYAPVMDGNSPSA

SEQ ID NO: 797 - protein, 212 aa, Methanotorris formicicus
MLFFIYNKKEGNDYYAYLSKVKEKGPYKQTLWFGVDLGVYNLVVIADNKGESLRFDGEIVKGHKRRLKKKEFNKYTKVGNKISNYSRYINHVISKEIVKKAKQYNAGIVLEKLKGLKKSKLNNSTPKNIRRVLHIWSYADLIEKIEYKANLEGVPVVEVSPRNTSKTCSRCGYVNRRLKNERIFICSKCGLEIDRDLNAAINIAKKVASKQV

SEQ ID NO: 798 - protein, 396 aa, Peptococcaceae bacterium
MRRLFFMWRGGENVEENTEQVVTIKLKLFEPTKTKQDMYQTMADRTTDFANRYLGVEKPMRPKSSADAKLYTEPLPAIVLNQAIRDIEAKKNAKSFKRLWPDFNNQNFRVEKETLQDGGAAWKVSFPTLEKRVGVPIQVEKYQIKYLELLLSGQAKQGTAQLIKCGRQWYIHLALTVSVKAEKKPPKYMGVDLGLIDLAVASILGSTLFFSGAELAYVRRHYAELRKKLQKKGAHKALRKLGNKEHRWIMAINHTISRRIIEFAKAHGVSVIRLEDLRGARWTKSQRKKQRKDAGRSLHSWAFFQLRQFIEYKAALAGIEVELVNPELTSLTCSRCGEVRTSRPAGRWYTCPRCGKVKHIDANAADNIAQAISGLSEEKRAKTILKPKTRRRTTAA

SEQ ID NO: 799 - protein, 166 aa, Nitrosococcus watsonii
MQSKGTRGARRVLKRLSGRESRHIRHENHLLSKALVDEAQMHQCGTIRLEKLTGIRARTKVRNKHLNRMVNGWSFGELQKFVEYKATRAGIKTEHVNPAYTSKTCSCCGKRGSRQQDVFRCATCGESHSDINAAANIAGGGVCKPSRINADCEINFSHDVVESCLL

SEQ ID NO: 800 - protein, 130 aa, Rhodococcus opacus
MAGGSRSALRGRAGTARGIVLEDLSGIRERVRLAKAQRQQLHSWAYAQLRDFVTYKAASVGVPVEVINPRNTSRTCYPCGHVDKANRITQDRFVCRVCGHVDQADHNAALNIGYLGYVKYMTTTHGYWAA

SEQ ID NO: 801 - protein, 339 aa, Trichococcus palustris
MKTVQIKLKPTKTQALELKRLSLEYIWQANVLVQQAISEEGFPKVTSKDIEADIPSVLKNELIRYAKSKLKQFGKCVFKKPMLSYNNQNFSVDEKAIRFPLMVEGKAKKTAIKAIIPEEVFALLSGSKLGALRITKKGFHWMAQISVHTEAEEFLGDGILGVDLGILCPAVGVVASNGKTQFFGNGRQNKCLRRKYKELRRQLGKKKKLNAIRNINDKESRIMRDINHKLSRQIVTFAVEKNCGTIHLEKLSGIRRTSRLRGKNKANLHSWTFHELSSFIEYKARELGIKVVYINPEYTSQICPMCGERNKVKDRNYNCGCGYHSHRDRVGALNIARTI

SEQ ID NO: 802 - protein, 358 aa, Exiguobacterium sp.
MSQVVTVEVRIYATRRQDAILKRMGKTYIQTANRVVANMVASEDGKRWSSKDIDTPLPSAVKNQLAGDAVGIYKKARKEDFKRIPVLKKPVCVWNNQNYSFDFESISFPVWMDGKSVKMRFRAAMVDKDNRNTGLLANKLGTLRVTKKGRKWIAQISVHVPTVPRTGVRVMGVDLGLKVPAVAVTDDDTTRFFGNGRKNKYMKRKFRAERKALGKKKKPKAIKRRNQKEQRWMRDKDHKVSRAIVDFARQKKISVIRLELLANIRQTARTSRKNNQNLHSWSFYRLASFIEYKAALSGIKVEYANPAYTSQTCPSCSVRNKVRDRVYTCACGFKGHRDAVGAMNIRYAPVMDGNSPSA

SEQ ID NO: 803 - protein, 351 aa, Paenibacillus chondroitinus
MQTLTIQIRIFPSNPSVLVDMGNEYIRTVNELTEQTEASGTFPKLTSKTVNANLPSAVKNQLIRDAKSIFQKSKKEKKRPILKKRVYYVNNQNYAIGDDSVSFPVVMDGKVQRLVVPAVIADREKTMLSNSKHGILRVVQKSAKWFVQVSIERPTEQAEGDVVMGIDLGLKVPAVVVTSSGKTKFVGNGRKNKYIRRMYNDNRRKLGKLKKLSAIRKQRDKESRYMKDQNHKISRQIVNMAIKENVSVIKLEKLADIRKTTRTSRKNAKNLHNWSFYQLQMFIAYKAAIAGIKVVEVNPSYTSQTCPSCGQRNKAKDRTYQCTCGYTAHRDRVGAINIMRQPVADGNSLSA

SEQ ID NO: 804 - protein, 53 aa, Scytonema sp.
MFLVSTLQELQTVVLELLVPIFQIKQMCEALKNDPRFIGQPRRFYTSTGSTNA

SEQ ID NO: 805 - protein, 385 aa, Streptomyces mirabilis
MKIVVQVKLVPDAAQASAVGATLHTVNDRANWVSGVAFARGVPREYELRKHTYAELKAAGLGAQAAQHTIKKVVDAYTTLRANLRAGNLGKLGSKRRKKAESKPVAFRPEAAHPFDDRCLSWQYDAQTVSIWTTAGRLKNVRFACSPDALKTLREYRKGESDLIERDGVFYLIAVCEVPEAEQYEPGQFIGVDLGIANIATTSTGYRAAGRGLNRHRKRQLDLRKKLQAKGTKSARRRLKNRRRKEARHAGHVNHIIAKQIVTEAERTSSGIALEDLGGIRQRVRLRKPQRVTLHSWAFHQLGQFVEYKARRAGVPLVYVDPAYTSQECAECPHIEKKNRVDQALFICRKCGVVAHADRNASHNIAARGEAVWIAGRESRVPAPF

SEQ ID NO: 806 - protein, 342 aa, Trichococcus palustris
MSKMKTVQIKLKPTKTQALELKRLSLEYIWQANVLVQQAISEEGFPKVTSKDIEADIPSVLKNELIRYAKSKLKQFGKCVFKKPMLSYNNQNFSVDEKAIRFPLMVEGKAKKTAIKAIIPEEVFALLSGSKLGALRITKKGFHWMAQISVHTEAEEFLGDGILGVDLGILCPAVGVVASNGKTQFFGNGRQNKCLRRKYKELRRQLGKKKKLNAIRNINDKESRIMRDINHKLSRQIVTFAVEKNCGTIHLEKLSGIRRTSRLRGKNKANLHSWTFHELSSFIEYKARELGIKVVYINPEYTSQICPMCGERNKVKDRNYNCGCGYHSHRDRVGALNIARTI

SEQ ID NO: 807 - protein, 358 aa, Bacillus mycoides
MYQTVAVKIKLLPTKEQASILNAMGKEYISTINALVSEMVAEKKTTKKTTKDVPVNLPSAVKNQAIKDAKSVFQKVKKVKCEIIPVLKKTICLWNNQNYSFDFTYIRLPLMIDGKTKKVSVRALLIDKHNRNFDLLKHKLGTLRITKKSNKWIAQISVTIPTAEKTGTKIMGVDLGLKVPAVAVTDDEKTRFFGNGRQNKYVRRMFKSKRKKLGESKKLNAMRNFDDKEQRYMKDQDHKISRAIVNFAKENKISVIRLEQLVNIRQTTRTSRKNEKNLHTWSFYRLSQFIEYKANLEGIKVEYVNPAYTSQTCPNCSKKNKAQDRKYKCKCGFEKHRDLVGAMNIRYAPVIDGNSQSA

SEQ ID NO: 808 - protein, 358 aa, Bacillus cereus
MYQTVTVKIKLLPTKEQASILNAMGKEYISTINALVSEMVAEKKTTKKTTKDVPVNLPSAVKNQAIKDAKSVFQKVKKVKCEIIPVLKKTICLWNNQNYSFDFTYIRLPLMIDGKTKKVSVRALLIDKHNRNFDLLKHKLGTLRITKKSNKWIAQISVTIPTAEKTGTKIMGVDLGLKVPAVAVTDDEKTRFFGNGRQNKYVRRMFKSKRKKLGESKKLNAMRNFDDKEQRYMKDQDHKISRAIVNFAKENKISVIRLEQLVNIRQTTRTSRKNEKNLHTWSFYRLSQFIEYKANLEGIKVEYVNPAYTSQTCPNCSKKNKAQDRKYKCKCGFEKHRDLVGAMNIRYAPVIDGNSQSA

SEQ ID NO: 809 - protein, 358 aa, Caryophanon latum
MGQTIMINIKLLPTKEQATILEEMSKSYITAINELVAEMVHAKQLLKKTSKNVFVPLPSAVKNQLIQDAKSVFNKAKKTNYHCIPVLKKPLCVWNNQNYSFDFTHISLPIMVNGKAKKTPIRALLVDRENRNFTLLNHKLGTLRITKKNHKWIAQISVTIPTIQKAGMRIMGVDLGLKVPAVAVTDDEHVRFFGNGRQNKYMKRKFRSKRKELGQKKKLKAIRTLNNKEQRWMKDQDHKVSRAIVEFAKEQKISVIRLEKLANIRQTARTSRKNEKNLHTWSFYRLANFIEYKANLVGIKVEYVNPAYTSQTCPQCGEKNKAQDRNYKCKCGFKKHRDLVGAMNIRYAPVVDGNSPSA

SEQ ID NO: 810 - protein, 388 aa, Nocardiopsis synnemataformans
MKATVQIKLLPSPEQAEALSATLHACNQAANSASQVAFATGATHKFALQKRIYEHLKVEYGLSAQPTVRVIGKVADAYTTRASNLRAGNLGPPGSQRRKKATSGPVSFTQDSAQPFDNRCLSWQLDARTVSIWTVRGRMKQVPFTGSTDQLKTVAEHRRGESDLAYRDGMWFLHATCDIPEEPLNVNPEGFVGVDLGIVNIATTSDGHRHAGRGLNRHRRRMNQLRAKLQRKRTKSTKRGLKRVRRREARRARDVNHQISKQIVERAERTGRGIALEDLQGIRERVRQAKAQRAALHSWAFAQLRNFITYKARRAGVPVAVVDPAYSSQSCSECDHTSRRNRTAQARFVCLSCGVIMHADANASRNLAHRGEVAWNAGRLSAAPTPLP

SEQ ID NO: 811 - protein, 349 aa, Microtetraspora glauca
MAFAKGLKRRNVLQKEVYFALKADYDLGAQPAVRVVKKVCDAYATLKGNINAGNLGREGSKRRLRAESKPIRFREDAAQPFDDRILTWNLDARTVSIWTVAGRIKHIPFVCSSETLKLLASRKGESDLVMRDGMFFLIATIHVPEPDVSEPDGFLGVDLGIVNIATTSDGQIMSGRRLNHYRRRMLNLRSKLQKKRTKSAKRALKRIRRRESRHAANANHIIANRLVATAERTSRGIALEDLSGIRQRVTAKKDQRARLHSWAFAQLGGFVEYKARRAGVPVVFVDPRNTSRQCSECWHTHRTNRVDQARFVCRSCGTVMHADHNGSRNIAHRGEAAWKRGAVNRPRTA

SEQ ID NO: 812 - protein, 229 aa, Clostridium sp.
MKCKSNNNVIYSYKYHVVFCPKYRRPVLVDGVVDAFSNDNVMGVDLGIKCPAVSYCPDGSVKFYGNGRKNKYIRRHYNNLRKRFQKAKKPKAVVKINNKEQRIMKDIDHKLSREIVNTAKAHDVSVIKLERLQNIRSATRTSRKNNHSLHTWSFYRLATFIEYKAKLAGIEVEYVDPAYTSQICPICGSVHHANDRNYTCRCGFHTHRDLLGAINICNSTEYIGNRYTA

SEQ ID NO: 813 - protein, 393 aa, Thermococcus sibiricus
MPSETIKLASKFKLKETPEGLNELFSTYRDIVNFLITHAFENNITSFYRLKKEIYKSLRKEYPELPSHYIYTACQMAASIYKSYRKRKRRGKASGRPVFKKEAIMLDDHLFKLDLEKGIIKLSTPNGRITLKFYPAKHHEKFKNWKVGQAWLVRTPKGVFINVVFSKEVEVKEPEDFVGVDLNENNVTLSLSDGEFVQIITHEKEIRTGYFVKRRKIQKKVKVGKKRQELLEKYGERERNRLNDLYHKLANKIVELAEKYGGIALEDLTEIRNSIRYSAEMNGRLHRWSFRKLQSIIEYKAKLKGVEVVFVDPAYTSSLCPVCGEKLSPNGHRVLKCLNCGFEADRDVVGSWNVRLRALKMWGVSVPPESPPMKMGGGKASRGDVYELYTNYG

SEQ ID NO: 814 - protein, 383 aa, Peptococcaceae bacterium
MEENTEQVVTIKLKLFEPTKTKQDMYQTMADRTTDFANRYLGVEKPMRPKSSADAKLYTEPLPAIVLNQAIRDIEAKKNAKSFKRLWPDFNNQNFRVEKETLQDGGAAWKVSFPTLEKRVGVPIQVEKYQIKYLELLLSGQAKQGTAQLIKCGRQWYIHLALTVSVKAEKKPPKYMGVDLGLIDLAVASILGSTLFFSGAELAYVRRHYAELRKKLQKKGAHKALRKLGNKEHRWIMAINHTISRRIIEFAKAHGVSVIRLEDLRGARWTKSQRKKQRKDAGRSLHSWAFFQLRQFIEYKAALAGIEVELVNPELTSLTCSRCGEVRTSRPAGRWYTCPRCGKVKHIDANAADNIAQAISGLSEEKRAKTILKPKTRRRTTAA

SEQ ID NO: 815 - protein, 351 aa, Paenibacillus sp.
MQSVTIKIRFFPNNSIELKSLSKEYIRVINLLTEQAEQEGAFPKLTTKHVEATLPSAVINQAIRDAKSIFKKVKKDRKRPILKKPTYYINNQNYSIRDSSIAFPIITNNIVKKTVFPAVLTERHKKYLQHAKCGLMRIVEKSGKWFAQVSLEVPTEIATGEHVMGVDLGLKVPAVAVTSGGKTGFFGNGRENKYRKRKFRSERKVLGKKKKLHAIRRLDNKEQRWMKDKDHKASRQIINFATKNQVSVIHLEKLTNIRKTTRTSRKNEKNLHTWSFYRLSQFIEYKANIAGIKVEYVDPAYTSQKCPSCSALNKATDRKYSCLCGFQTHRDKVGAVNIIHAPVIGGSSQSA

SEQ ID NO: 816 - protein, 386 aa, Rhodococcus jostii
MKRVVKINLAPTDAQAHALHETLVLCNTAADVVSRVAQAVEDRRAFALQKAVYHQLKALGLSAQPAVRTIKKVADAYATRGANLEAGNYGPRGGKRTTDIAATAIGFRALAAQPFDDRCLSWQQQDSTVSIWTCEGRLKAVRYVCAPWQRELLEHRCGETDLVFRDNMWFLYATVDVPTPEPVVVQEFLGVDLGIVNLAVTSDDTAASADWSGGAVTARRTKYARTRRALQKVGSKSAKRKLRGRREKEHRYATDINHQISKTIVAQAQRTGRGIVLEDLSGIRERVRLAKTQRQQLHSWAYAQLRDFLTYKAVSVGVPLVVIDPRNTSRTCYPCGHVDKANRTTQDRFVCRMCGHVDQADHNAALNIAYLGYVQYTTTTRSHRAV

SEQ ID NO: 817 - protein, 391 aa, Bacillus cereus
MQSLWTRSYFVSTAKNVANENMLKIKKQGVKRMSQTLTVKVKLIPTKEQSRLLEESSREYIKVMNMLVSEMVEAKKSTKKSTKDIEANIPSAVKNQAIKDAKSLFATKVKKSNYKIIPILKKPVCVWNNQNYSFDSTHISIPFKVNGKSTRLKVRALLINKKNRNLDLLKHKLGTLRITKKSNKWMAQISVTLPTNERAGTKVLGVDLGLKVPAVAITDDDKVRFFGNGRQNKYRKRKFRSVRKKLGKDKKVNAIRRFDDKEQRWMQEKDHKISREIIDFAIANQISVIRLEQLTNIRQTARTSRKNEKNLHTWSFYRLAQFIAYKATIAGIQIEYVNPAYTSQSCPKCAEKNKARDRKYKCPCGFKTHRDIVGAMNIRYTTVIDGNSQSA

SEQ ID NO: 818 - protein, 418 aa, Thermotoga naphthophila
MARGAQNMTKHMKTYKFPAPPEYHTKCKELSKLAGRVYSKTVSLVRKIHRKKNVWLSEGTVKKYISQWAQNIPLHSQTKQALVERYFEALKSYFKASKTNPALRPPFRTPKYTNVVWKNQAVKLLEDGTLRLAMANKEEPLYIPTTLPKKVDIRRVELVYDKRQDKYFFHVTVSFESQTNISGSKVVGVDLGVVHPITASTEDKAVLYNGGVLNSKLRYRNKKLAELQKKLSRKKVGSRRYRKLVRAKRRLLGKIQNQIKDILHKYTTHFVGWCLTEGVGTIAIGDLRGIRDRVDYSTKVNQKIHQWLFRKISDLIKTKAEALGIEVVFVDESYTSQTCPVCGKRHKTSTRNFRCLGCGFEWHRDAVGALNIKRKYTGESLVVGALASPVGVMYNSHLRCPVVMWSPWKPTFEWVKTS

SEQ ID NO: 819 - protein, 390 aa, Streptomyces griseus
MKLVVQVKLLPTPEQASALQATLHACNQAANHVSTIAHATGTKDNRALRAETYTQVKSTWGLGAQAAQHVIKKTCDAYAALKGSLRAGILGRPGSKPYKAATGKPVVFRPTAAQPYDDRMLSWQTEQRTVSIWTTAGRLKRLPYTGSEHQLQLLDQYRRGESDLITRGGQWYLLATLDIPEPAVNPDPQGFIGVDLGIANIATTSTGHRHSGRRLNRTRENDRKLRTRLQQKGTRSAKRRAKRHAGKEARRTRDINHKISKHIVAEAQRTGRGIALEDLGGIRERARLKKPQRVTMNSWAFGQLAEFIAYKARRAGVPVVYVNPAYTSQECSRCHHIDKRNRPRQAVFTCRSCGFVEHADLNASHTISLRGWSAWVRGAESQVPALTLTA

SEQ ID NO: 820 - protein, 358 aa, Exiguobacterium acetylicum
MSQVVTVEVRIYATRRQDAILKRMGKTYIQTANRVVANMVASEDGKRWSSKDIDTPLPSAVKNQLAGDAVGIYKKARKEDFKRIPVLKKPVCVWNNQNYSFDFESISFPVWMDGKSVKMRFRAAMVDKDNRNTRLLANKLGTLRVTKKGRKWIAQISVHVPTVPRTGMRVMGVDLGLKVPAVAVTDDDTTRFFGNGRKNKYMKRKFRAERKALGKKKKPKAIKRRNQKEQRWMRDKDHKVSRAIVDFARQKKISVIRLELLANIRQTARTSRKNNQNLHSWSFYRLASFIEYKAALSGIKVEYVNPAYTSQTCPSCSVRNKVRDRVYTCACGFKGHRDAVGAMNIRYAPVMDGNSPSA

SEQ ID NO: 821 - protein, 358 aa, Exiguobacterium indicum
MSQVVTVEVRIYATRRQDAILKRMGKTYIQTANRVVANMVASEDGKRWSSKDIDTPLPSAVKNQLAGDAVGIYKKARKEDFKRIPVLKKPVCVWNNQNYSFDFESISFPVWMDGKSVKMRFRAAMVDKDNRNTRLLANKLGTLRVTKKGRKWIAQISVHVPTVPRTGVRVMGVDLGLKVPAVAVTDDDTTRFFGNGRKNKYMKRKFRAERKALGKKKKPKAIKRRNQKEQRWMRDKDHKVSRAIVDFARQKKISVIRLELLANIRQTARTSRKNNQNLHSWSFYRLASFIEYKAALSGIKVEYANPAYTSQTCPSCSVRNKVRDRVYTCACGFKGHRDAVGAMNIRYAPVMDGNSPSA

SEQ ID NO: 822 - protein, 350 aa, Thermococcus sp.
ITSFYRLKKETYKGLRREYPDLPSHYIHTACQMATSIYKSYRKRKRRGKANGKPVFKKKVIMLDDHLFKLDLEGGFIKLSTPSGRLKLEFYPAKYHEKFREWKIGQAWLVKNQMGIFLHVVFSKEVEVREPKVIVGVDLNENNVTLSLPDGEFIQIITHEREIRTGYFVKRRKIQRKLRAGKKREELLEKYGRRERNRLNDLYHKLANKIVELAEKYGGITLEDLTEIRNTIRYSAEMNGRLHRWSFRKLQSIIEYKAKLKGVSVVFVDPAYSSSLCPICGGKLSPNGHRVLKCSNCGFEADRDVVGSWNIRLKALKMWGVSVPPESPPMKTGGGKPTRYEINALHALYW

SEQ ID NO: 823 - protein, 377 aa, Escherichia coli
MLRTACIRLDVKVEQSKQLSVLREVYADACNRLVSVVCEHRIWNRVGLHNMVYRDLREHTPLGSQMCCNVIFSVCKAYKSQKERGHIHKAKAVPTIRFNGTSVHFDKKTYSLRDNSLSLYTLNGRIRVPMIIGEHQQRMLSSGHPKEAELVFRKGLWFFNLVVEITDTTMVVSEKTMGVDMGENNLAAHSLGELFGGEQLRDERDRHLALRRRLQSNGSQSAKQKLRQVSGKEMRRVKQTNHETSKVIVAAAAEAGIGTIILEDLTHIRDRIKAGKRVRSRLHRWAWRQLQTFIEYKARAVGIMVKYVNPAYSSQSCSCCGCLGKRHKHRFECPHCGFRAHSDLNASRNLAWIGETAVLPRASVNTPDVGSPSLAPQ

SEQ ID NO: 824 - protein, 377 aa, Enterobacteriaceae sp.
MLRTACIRLDVKVEQSKQLSVLREVYADACNRLVSVVCEHRIWNRVGLHNMVYRDLREHTPLGSQMCCNVIFSVCKAYKSQKERGHIHKAKAVPTIRFNGTSVHFDKKTYSLRDNSLSLYTLNGRIRVPMIIGEHQQRMLSSGHPKEAELVFRKGLWFFNLVVEITDTTMVVSEKTMGVDMGENNLAAHSLGKLFGGEQLRDERDRHLALRRRLQSNGSQSAKQKLRQVSGKEMRRVKQTNHETSKVIVAAAAEAGIGTIILEDLTHIRDRIKAGKRVRSRLHRWAWRQLQTFIEYKARAVGIMVKYVNPAYSSQSCSCCGCLGKRHKHRFECPHCGFRAHSDLNASRNLAWIGETAVLPRASVNTPDVGSPSLAPQ

SEQ ID NO: 825 - protein, 358 aa, Bacillus sp.
MSQTITVKIKLLPTKEQALILTEMSKTYISTINELVSEMVKEKKATKKSSKNVDVSLPSAVKNQAVKDAKSVFKKAKKTKFETVPVLKKPMCIWNNQNYSFDFTHISLPIMVDGKAKKTPIRALLVDKDNRNFDLLKHKLGTLRITKKSDKWIAQISITIPTVQKTGLKVMGVDLGLKVPAVAVTDDEKVRFFGNGRHNKYKKRKFRSVRKALGKKKKLNAIRHSKNKEQRWMEDQDHKVSRAIVNFAKENKISVIRLEQLANIRQTTRTSRKNEKNLHTWSFYRLSQFIEYKAELEGIKVEYANPAYTSQTCPKCSEKNKAQDRKYKCKCGFEKHRDIIGAMNIRYAPVVDGKSQSA

SEQ ID NO: 826 - protein, 426 aa, Halorubrum distributum
MAKQVVTRTYTASIRNQSRVQDDLDSLGFAASKLWNVGRWTCSRIWDEIDHIPNHNELTTYLKTHERYDDLHSQSSQRVLQELTEAFNGWYGKRRSGDTRANPPGYRKHGDEHPRSTVTFKAAGFKLDTQYNRVRLSKGSNLKEYWSDFILCEYQTRPDVDLSIVENVQQVRTVWTGEKWELHFVCKVEIDVAEAPGEKTVGVDLGINNFAALAYEDGHSELYPLNCLKQDDYYFSKRIARCDDSNSEQATRLNQKKSARRTHYFHTLSKNIVERCVEEGVGTIVVGDLSGIREDDDTDESKNWGKHGNLDLHSWAFDRFTDLLEYKAEMEGIVVEEVSEEDTSKSCSCCGRKRDANRVERGLYVCDECGTVANADVNGAENIRQKVSPSSPTLSVNRSNGWLAQPSTFLFDKETGAFAPQERATS

SEQ ID NO: 827 - protein, 392 aa, Thermococcus sp.
MPSETIKLTAKFKLKTEPEGLEDLFTLYQEIVNFLITYAFENNITSFYRLKKETYKSLREQYPELPSHYIHTACQMATSIYKSYRKRKRKGKANGKPIFKKQVIMLDDHLFKLDLEEGIIKLSTPSGRLELEFYPAKHHEKFREWKIGQAWLVKNPKGVFLHVVFSKEVEVRESKAVVGVDLNENNVTLSLPDGEFIQIITHEREIRTGYFLKRRRIQKKIRSGKKRKWILEKYGMRERNRINDLYHKLANKIVELAEKYGGITLEDLTEIRNTIRYSAEMNGRLHRWSFRRLQAIIEYKAKLKGVSVVFVDPARTSSLCPICGGKLVPNGRRVLKCECGFEADRDVVGSWNIRLKALKMWGVSVPPESQPMKTGGWKPTRYEINALHALYW

SEQ ID NO: 828 - protein, 390 aa, Actinomadura sp.
MVTIVKVMVQVKLLPDAVQAAALKRTLPEINEAANWVSAVSFENLALKACVRDLRNLCYGELKARGFGAQAAQHIIKRVADAYTSLRAAIRAGNFGPNGSRSRRKVDSRPIMFRPHAAHTYDDRCLSWNYDRRTVSIWTLDGRVKNVRFACSSSALRQLADYRRGESDLLFRDGKWLLAATCEMPEARQYEPSGFIGVDRGITNLATTSDGHDHSGRRLGRYRRWQARKRAELQAKKTRSARQALKKRSRREARHAAHINHKIAKTVVAVAQRTERGIALEELGGIRERVTVPRDQRARLSSWPFHRLGAFIAYKAKRAGVPFIEVDPAHTSQRCPRCGHTGRANRRTRDHFSCRRCGLAGPADHVAAVNIAERAATAWVFVNMPQPAPT

SEQ ID NO: 829 - protein, 360 aa, Armatimonadetes bacterium
MNQVETIRLHPTDPAQLIAWLERFNAAANWLSGVAFRERLWHWLPLQRRAYREVRERFQLPAAATVVVIRKVAYVYRNKKRRQHQATFRRRGAIPVYQHRYKRDGTVSVYGFRIPFTARPQAWLSSRQQAVLCYRRGKFILHQVVEVDVPAPVPVQEYLGCDLGTVNLLTDSETEAYSGQAVEEKRRIYVHRRARLQKRGTRAARRKLRALSGRQRRYQRDVNHGIAKRVVAKAQRLCCGIALEDLRGIRDRIKARRRQRARLHNWAFGQLRQFIVYKAAKAGVPVVFVDPANTSRTCPVCGHVDKRNRRSQAEFSCRRCGHAGPADVIAARNVRAWAHGDAPMVASARAATSPYPTSRG

SEQ ID NO: 830 - protein, 410 aa, Natrinema versiforme
MVATTTKTLEATLAPPTANKEQRLERTVATYRRALLDAFESGAETQTAVNDIVTPYTLTSYAKDALKSYVPQLRNTYNTSELEGNHPVRFTNRGFRIDHSDEREHEFCWRVPQAGRGNAFWIPLRINPEQESLWFDLLDESVTVGEFRLQQHRTNWMLHVTVEYEVAEPEISDEPTRVGFDIGESKLLTGCACQNDTPTQPFIYDGGRSRALRKEMHTTLKRLQERDAEQWRVDERFDHYQNALTDIVEKASREAVEYAQQFEDPVIVLEDLSYIRENLDYGKYMNRRLHSWAFARLTERIEDKALEAGIPIEFVNPRYTSQTCHACGHIGRRGSQAEFTCTNPECWVSEYQADINAAANIAGRVDPWGESVSWKSDRDDSPRDGSTLDSATARREPSAKLAQTTLAEWG

SEQ ID NO: 831 - protein, 144 aa, Rhodococcus opacus
MRHFTSASAEAGPFMAGGSRSALRGRAGTARGIVLEDLSGIRERVRLAKAQRQQLHSWAYAQLRDFVTYKAASVGVPVEVINPRNTSRTCYPCGHVDKANRITQDRFVCRVCGHVDQADHNAALNIGYLGYVKYMTTTHGYWAA

SEQ ID NO: 832 - protein, 411 aa, Candidatus Methanoperedenaceae archaeon
MIKSYIYIPHKLTKIKEETLDEMCLEFMKVCNDFTKLLPSIQKKRVLKNDRVKWSLPSTTSKDNAYNKWVKNGTIKSNLNSLAIHSAKVEAVGKFKMWLEDKTAEKPLFKTPFIDFNNQSYFIIRKNENTFILDVPSFKNEKGYPRLLIPFNVDSNRSLSKYLKKSIIIGERKRADELKLSESKYANSHIIIPFDDGINEPDEYTPHTFIGIDRGINNIIALSVCDNSGKVLRTKLFGGNELRHYRTKHQHRREKLQAIYGKDKGMIRRTLGKHESKFAKTLNHQISHEVVEISKKYPSPVIVIEDLHRFAKNLRWSFYQLEEFITYKAKINGIVTKKVKAQYTSQTCSRCGHVDKANRYGVKFACDKCGHRDNADINAAINISRSYINEVAGKQVLPVTGGVSLPLSPAR

SEQ ID NO: 833 - protein, 377 aa, Escherichia coli
MLRTACIRLDVKVEQSKQLSVLREVYADACNRLVSVVCEHRIWNRVGLHNMVYRDLREHTPLGSQMCCNVIFSVCKAYKSQKERGHIHKAKAVPTIRFNGTSVHFDKKTYSLRDNSLSLYTLNGRIRVPMIIGEHQQRMLSSGHPKEAELVFRKGLWFFNLVVEITDTTMVVSEKTMGVDMGENNLAAHRLGKLFGGEQLRDERDRHLALRRRLQSNGSQSAKQKLRQVSGKEMRRVKQTNHETSKVIVAAAAEAGIGTIILEDLTHIRDRIKAGKRVRSRLHRWAWRQLQTFIEYKARAVGIMVKYVNPAYSSQSCSCCGCLGKRHKHRFECPHCGFRAHSDLNASRNLAWIGETAVLPRASVNTPDVGSPSLAPQ

SEQ ID NO: 834 - protein, 411 aa, Streptomyces sp.
MKIVVQVRLMPTPEVASALECTLRTANESANWLSGQAYERGETSRKALQGFAYHDLKSRGLSAQPALHVLRKVADAYTTLHANIRAGNLGKPGSKRRAKAESQPIAFRLDAAQPYDDRCLSWQVDERTVSIWTTAGRIRGVRFACSEQARKLLADHRKGESDLVHRDGMWLLIATCEIPEPDVFEPDGFIGVDLGIANIATTSTGYLAAGRGLNRHRKRQLDLRRKLQAKGTKSAKRRLKHRSRKESRHAANVNHIISKKIVTEAERTSHGIALEDLGGIRQRVRLRKPQRVTLHSWAFAQLGQFLEYKARRAGVPLVYAGPAYTSQECAECHHIEKKNRVDQARFICRRCGVVAHADRNASRNIAARGEAAWIAGRESRVPAPHNRVSGRRSQPSSQLGTTSKPGPLGLG

SEQ ID NO: 835 - protein, 383 aa, Actinomadura sp.
MVQVKLLPDAVQAAALKRTLPEINEAANWVSAVSFENLALKACVRDLRNLCYGELKARGFGAQAAQHIIKRVADAYTSLRAAIRAGNFGPNGSRSRRKVDSRPIMFRPHAAHTYDDRCLSWNYDRRTVSIWTLDGRVKNVRFACSSSALRQLADYRRGESDLLFRDGKWLLAATCEMPEARQYEPSGFIGVDRGITNLATTSDGHDHSGRRLGRYRRWQARKRAELQAKKTRSARQALKKRSRREARHAAHINHKIAKTVVAVAQRTERGIALEELGGIRERVTVPRDQRARLSSWPFHRLGAFIAYKAKRAGVPFIEVDPAHTSQRCPRCGHTGRANRRTRDHFSCRRCGLAGPADHVAAVNIAERAATAWVFVNMPQPAPT

SEQ ID NO: 836 - protein, 393 aa, Thermococcus celericrescens
MSSETIKLTAKFKLKETSEGLDDLFSTYREIVNYLINYAFENSITSFYRLKKETYKSLRKEYSELPSHYHYTACQMATAIFKSYRKRKKKGKAKGKPVFKKEVIMLDDHLFKLDLEAGIIKLSTPSRRVRLEFYPAKYHEKFKGWKIGQAWLVRTPKGVFINVVFSREVEVREPKTFVGVDLNENNVTLSLPNGEFIQIITHERKIRTGYFVKRRKIQKKLRAGKNRKELLEKYGQRERNRLNDLYHKLANKIVELAEKYGGIALEDLTEIRNSIRYSAEMNGRLHRWSFRKLQSIIEYKAKLKGVRVVFVNPAFTSSLCPICGEKLSPKGHRVLKCPKCGFEADRDVVGSWNIRLRALKMWGVTVPPESPTMKMGVGKVSRNDVYELYKSYG

SEQ ID NO: 837 - protein, 403 aa, Streptomyces sp.
MLGFGSHCGDIGQCTITAVKIVTQVKLLPEAGQAAALGATLRTVNEAACWVSGVAFERGVPREYELRKHTYAELKARGLGAQAAQHVIKKTRDAYTTLKATIRAGNLGKPGSKRRDKARSKPITFRPQAAQPFDDRCLSWQYDAKTVSIWTTAGRLRGVRFLCSPDALKMLREHRKGESDLIERDGVFYLIAVCDIPEAEQYEPSGFIGVDLGITNIVTTSTGYRAAGRGLNRHRKRQLDLRKKLQAKGTKSAKRLLKKRSRKEARHSANTNHIVSKTIVTTAERTGSGIALEDLTGIRSRVRLRKDQRTPLHSWSFHQLGQYIEYKAKRAGVPLIYVDPAYTSQQCSECGHIDRRNRQSQSTFACRSCGAFMHADDNASHNIGRKGETMWTAGRESRVPATP

SEQ ID NO: 838 - protein, 385 aa, Streptomyces griseus
MKIVTQVKLIPKADQAAALRSTLRTVNEAANWVSGVAFERSVPREYELRKHTYAELKAQGLGAQAAQHVIKKTRDAYTTLKANIKAGNLGKPASKRRRKAESKPIVFRPEAAQPYDDRCLSWQYDQQTVSIWTTAGRLRGVRFACSPDALRMLREHRKGESDLIERDGAFYLIAVCDIPEPEVYEPAGFVGVDLGIVNIATASTGYRAAGRGLNRHRKRQLDLRKKLQAKGTKSAKRLLKKPSRKEARHTANVNHIISKTIVTTAERTGSGIALEDLTGIRSRVRLRKDQRTSLHSWSFHQLGQYIEYKAKRAGVPLVYVDPAYTSQQCSECGHIDRKNRVDQATFACRSCGALMHADDNASHNIGRMAKTVWTAGRESRVPAIP

SEQ ID NO: 839 - protein, 358 aa, Bacillus clausii
MSQTITVKIKLLPTKEQASILREMSQAYISTINTLVSEMVAEKKSTRKSSKDISASLPSAVKNQAIKDAKSVFKKAKKNKFTIVPMLKKPVCIWNNQNYSFDFTHISMPIMIDGKATKTPIRALLVDKDNRNFDLLKHKLGTLRITQKSGKWIAQISVTIPTSEKTGTKIMGVDLGLKVPAVAVTDDDKVRFFGNGRQNKYVKRKFRSERKALGKKKKLNAIRRLKDKEQRWMKDQDHKVSRAIVNFAKENKISVIRLERLANIRQTARTSRKNEKNLHSWSFYRLSQFIEYKANLDGIKVEYVNPAYTSQTCPKCHEKNKAQDRKYKCKCGFEKHRDLVGAMNIRYAPVVDGNSQPA

SEQ ID NO: 840 - protein, 382 aa, Verrucomicrobium sp.
MMRTASIKLDASPEQRAALAALQSDFANACQRLSAVVREHRVWNRVALHQRTYSDLRSSTPLGSQMCCNAIFSVCKAYKALKVTGRIPKDTPVPAISFQRASVHFDKRTYALKKNAVSLYTLGGRVIVPMRLGEHQRRILSFGRPKEAELVFRKGNWYFNLVVESDDKEPIASGPVMGVDVGENNLAAHSLGGIFGGGRLCDRRDRHLALRRRLQSNGSRSAKQKLRQVSGKERRHVTHVNHETSKAIVREALEAGVAKIMMEDLTHIRDRIKAGKRMRGRLHRWAFRQLQRFVEYKAKSAGIAVEYVDPAYTSQTCSSCKQLGRRTKHRFACPHCGLRAHSDLNASRNLARIGGTMVPPRAAVSTSNVGGADVGNHVCASR

SEQ ID NO: 841 - protein, 393 aa, Thermococcus kodakarensis
MPSETIKLTAKFKLKNPPEELNDLFSTYREIVNHLISYAFENNVTSFYRLKKETYKSLRKEYPELPSHYHYTATQMATMIYKSYRKRKKKGKANGRPVFKKDAIMLDDHLFKLDLEAGVIKLSTPSGRVELEFYPSKYHEKFRDWKIGQAWLVRTPKGVFINVVFSREVEVREPEAFVGVDLNENNVTLSLPNGEFVQILTHEREIRTGYFLKRRKIQKKLRTRKKRKELLEKYGQRERNRLDDLYHKLANKIVELAERYSGIALEDLTEIRDSIRYSAEVNGRLHRWSFRKLQNIIEYKAKLKGIKVVFVNPAYTSSLCPVCGRKLSPNGHRVLKCPKCGFEADRDVIGSWNISLRALKMWGVSVPPESPTMKTGVGKVGRSDVYELYTNYG

SEQ ID NO: 842 - protein, 427 aa, Sutterella wadsworthensis
MSVRKPSGITLKGLNISKGAGKLVRRKVDVRTVCIALEVDADASEKMHQTRRLYGQACNLLVPIVVSDTDRKKRLWQRYNLHKAAYPMVRTKMSVLGAQLACNVMRSVSSMYQSWISNHPNFSKDKKMVLPSISFRNPVVHLDKNTIRFFNNYTEASVYTVNGRVGVRLRPGKFQLSQLAGFLAEELAGTSKENRIYRLGECNLVWKCGIKGTPSRWELHIAIEKKLEEVSLDNLSLNQVMGVDVGENNAAALSTGRIFKAGKMKDDRDKYLSSRARFQRNGSRSARQALRKASGREKRHVEQINDEISKSIIEDVAERNIRLIVLEDLTDIRERIKAGQKVRARLHRWPFRELQQKIVDKACRAGIEVIFVDPRYTSQTCPHCNAIGTRQKHRFVCKNCGYRAHSDLNGGRNLQRLGCLLITQGLV

SEQ ID NO: 843 - protein, 188 aa, Ornithinibacillus halophilus
MGVDLGLKVPAVAVTDDEKVRFFGNGRENKYKKRNFRSFRKALGKKKKLNAIRNSKNKEQRWMEDKDHKVSRAIVNFAKENKISVIRLERLANIRQTTRTSRKNEKNLHTWSFYRLSQFIEYKAELEGIKVEYVNPAYTSQTCPKCSQRNKAQDRKYTCKCGFEKHRDIVGAMNIRYAPVVDGNSQSA

SEQ ID NO: 844 - protein, 427 aa, Sutterella wadsworthensis
MSVRKPSGITLKGLNISKGAGKLVRRKVDVRTVCIALEVDADASEKMHQTRRLYGQACNLLVPIVVSDTDRKKRLWQRYNLHKAAYPMVRTKMSVLGAQLACNVMRSVSSMYQSWISNHPNFSKDKKMVLPSISFRNPVVHLDKNTIRFFNNYTEASVYTVNGRVGVRLRPGKFQLSQLAGFLAEELAGTSKENRIYRLGECNLVWKCGIKGTPSRWELHIAIEKKLKEVSLDNLSLNQVMGVDVGENNAAALSTGRIFKAGKMKDDRDKYLSSRARFQRNGSRSARQALRKASGREKRHVEQINDEISKSIIEDVAERNIRLIVLEDLTDIRERIKAGQKVRARLHRWPFRELQQKIVDKACRAGIEVIFVDPRYTSQTCPHCNAIGTRQKHRFVCKNCGYRAHSDLNGGRNLQRLGCLLITQGLV

SEQ ID NO: 845 - protein, 350 aa, Bacillus velezensis
MKLFPTKEQASILREMSQTYISTINTLVSEMVAEKRSTRKSSKDISASLPSAVKNQAIKDAKSVFKKAKKNKFNVVPMLKKPVCIWNNQNYSFGFTHILMPIMIDGKAAKTPIRALLVDKDNRNFHLLKHKLGTLRITQKSGKWIAQISVTIPTSEKTGTKIMGVDLGLKVPAVAVTDDDKVRFFGNGRQNKYIKRKFRSERKALGKKKKLNAIRRSRDKEQRWMKDQDHKVSRAIVTFAIENKISVIRLEQLANIRQTARTSRKNEKNLHIWSFYRLSQFIEYKANLEGIKVEYVKPAYTSQTCPKCHEKNKAQDRKYKCKCGFEKHRDLVGAMNIRYAPVVDGNSQPA

SEQ ID NO: 846 - protein, 362 aa, Halanaerobium praevalens
MQLTYILELLKPTKRKENIFLNNIAEVVKNRQAVAAKLKAGETNLSSADFKEINLPAAVKNQNIREVKAFHKLFLKSGSDKDNIEFKANQPICYNNQNYTIDHHIISIPFYTTKCQRFAFPVKQTERFEKLQQHIDSGCKLGKACLFYKRGKWYFAVTIKIAVKKNTNSNLMGIDIGLRQFAVASVKTHRGKEINCQFHNGKQAGFIRKKYRMLRRKLGQSKKVKAIKNINDKEQRWMTDLNHKISRQLINLAVQEQVGTIIMENLENIRNTAKSLNRADRNIHSWTFYQLQQFIEYKAELAGIKVEYINPKYTSQSCSKCNKVKKSNRKANLYSCECGNHIHADLNASRNIANKYLEQQSA

SEQ ID NO: 847 - protein, 267 aa, Thermomonas hydrothermalis
TVSLYTLDGRITVPMRLGEHQRRILGSGQPKEAELVLRKGQWFFNLVVETDDAQPVASGPVMGVDVGENNLAAHSLGRVFGGERLRDKRDRYLALRRRLQSNGSQSAKQKLRQVSGKEMRRVKHINHETSKAIVQAAIDAGIAKITMEDLTHIRERIKAGKRMRGRLHRWAWRQLQTFVEYKAKAAGIAVEYANPAYTSQTCSCCGELGKRSKHRFECPHCGLRAHSDLNASRNLARIGSGAPLSRAVVNTPDVGSVDMGNHVCASQ

SEQ ID NO: 848 - DNA, 8282 bp, Synthetic construct
  source 1..8282: mol_type = other DNA
attcaccaccctgaattgactctcttccgggcgctatcatgccataccgcgaaaggttttgcgccattcgatggtgtccgggatctcgacgctctcccttatgcgactcctgcattaggaaattaatacgactcactataggggaattgtgagcggataacaattcccctgtagaaataattttgtttaactttaataaggagatataccatgggtgaactgccgagtaggtagctgataacgagacctctgtcttgtcagctagggtggtctcgtgaactgccgagtaggtagctgataacggatccgaattcgagcgaaggagatatacatatgtttttgcaaagacctaaaccttacagcgatgaaagtttagaaagtttctttatccgagtggctaacaaaaatggctacggtgatgtccatcgcttcctagaagccactaaacgattccttcaagacattgaccataatggctatcaaacctttccgactgatataactcggataaacccatactcagctaaaaacagttccagcgcacgaactgcgtcattcctgaaacttgcacaattgacatttaatgaaccgccagagctacttgggttggcaattaacagaacaaacatgaaatactcgccgtcaactagcgcggttgttagaggtgcagaagtctttcctcgcagtttactacggacgcactccatcccctgctgtcctttgtgtctgcgagaaaatggctacgcctcctacctttggcactttcaggggtacgaatactgccacagccataacgtacctttaattaccacttgtagctgtggtaaggagtttgactaccgagtatctgggttaaagggcatttgctgcaaatgcaaggagcctatcaccttaaccagcagggagaacggtcatgaggcagcgtgtactgtttcaaactggcttgctggccatgaatctaaacctctgccaaatcttcctaaaagctaccgatggggtttagttcattggtggatgggtattaaagatagcgagttcgatcacttttcgttcgttcaatttttctcaaactggccaaggtcattccactcgataatcgaagatgaagtagagttcaaccttgagcatgctgttgtcagcacgtctgaattacgactaaaagatcttcttggtcgattgtttttcggttcaattcggttacctgagcggaatcttcaacacaatatcatccttggtgagcttctctgctatttagaaaatcgtttatggcaagacaagggattaatcgccaacctcaaaatgaacgcgttagaggcgactgtaatgttaaattgtagcctcgatcagattgcatcaatggttgaacaacgcatcttgaagccaaatcgaaaaagcaagcccaacagccctcttgatgttaccgattatctatttcatttcggcgatattttctgtctttggttagctgagttccaaagcgatgagtttaaccgttcgttttatgtgtcgaggtggtaaatgcaaactctgaaagaactaatcgcatccaatcctgacgacttaacaactgaacttaagagagcatttcgtccactcacaccgcatattgcaattgatggtaatgaacttgacgcactgacgatattagtcaatttaaccgataagactgatgatcagaaagacctgctcgatcgagccaaatgcaagcaaaaacttcgagatgaaaaatggtgggctagctgcataaattgcgttaattacagacaaagccataacccaaaattcccggatatacgttctgaaggcgtgattcgaacccaagccctgggtgaattaccgagtttcctactctcgtcctcaaaaatcccaccataccattggtcatatagccatgattcaaaatacgtcaacaaaagcgcattcctcaccaatgagttttgttgggatggtgagatctcatgtttgggtgagcttcttaaagatgcagatcacccactttggaatactttgaaaaagttaggttgttctcaaaaaacttgcaaagcaatggcaaaacaactagctgatattactctcacgactatcaatgtcacactcgcaccaaattacctgactcaaatatctctccccgatagtgatacatcctacatttcactctctcctgttgcatcgctatcgatgcaaagccactttcatcagaggctccaagatgaaaatcggcatagcgcgataacgcggtttagccgaactaccaacatgggggtcactgcgatgacatgtggcggcgcatttagaatgttaaagtctggcgctaagttttccagcccccctcatcaccgattaaacagtaaacgaagttggttgacgtcagagcatgttcagtcattaaaacagtaccagcgcctcaacaaaagcctcatacctgaaaactctcggattgcactccgtagaaaatacaaaatcgagcttcaaaatatggtcagatcttggtttgcaatgcaagaccatacccttgattcgaacatacttatccaacatttgaatcatgacctatcttacttaggagccacaaaacgttttgcatacgatccagcgatgaccaagctctttactgagcttttgaaacgagagttatcaaattcaatcaataatggtgagcaacacactaatggatcgtttttagtcctaccgaatatcagggtttgtggcgcaacagctttaagctccccggtaacggtggggattccatcacttacagctttctttggcttcgttcacgcatttgaacggaatataaatcgcaccacctcatcgtttcgtgttgaatcctttgcgatatgcgtccatcaactacatgtcgagaagcgaggtttgacagcagagtttgtggaaaaaggcgacgggactatatccgctcccgcgacccgggatgactggcagtgtgatgtcgtatttagccttattttgaacaccaactttgctcaacatattgaccaagatacgttagttacatcactaccaaagcgattggctcggggttcagcaaaaattgcgattgatgactttaaacatatcaactcattctcgacattagaaacagcgatcgaatctctgccaatagaagctggtaggtggttatcactttacgcacagtcaaacaataatctaagtgatctattagcagccatgacagaggaccatcagctcatggcaagctgcgtcggttaccacttgttagaagagcccaaagataaaccaaactccctcagaggttacaaacacgctatcgccgagtgcatcattggactcattaactcaatcacctttagctcagagactgatcccaacacaatcttttggtcgctaaagaactatcaaaactacctagtggtacagccaaggagtatcaacgatgaaactaccgacaaatctagcctatgagcgctctatcgacccatcagatgtctgtttttttgtcgtctggcccgatgatagaaaaacacctttaacctacaattctcgtactctgctcgggcaaatggaagcggcatcattagcctatgatgtctcaggtcaaccaataaaaagtgccaccgctgaggcgttagctcaagggaaccctcatcaagttgatttctgccacgttccatacggtgcgagtcatattgaatgcagtttctccgtctcgttttcttctgaactacgtcaaccatataagtgtaactcaagcaaagttaaacaaacgctagtgcaattagtcgagctctacgaaacgaaaatcggctggactgagctagcaacccgatatttgatgaacatttgcaacggtaaatggctgtggaaaaatacccgtaaagcctattgctggaacattgtacttacaccttggccttggaacggggaaaaggttggatttgaagatattcgtactaactacacctcacggcaagactttaaaaataataaaaattggtctgctatagttgaaatgatcaaaaccgcattttctagtactgatgggctggcgatatttgaagtcagggccaccttgcacttgccaacgaatgctatggtgcggccaagccaagttttcacagaaaaagaaagtggcagtaaaagtaaatctaaaactcaaaacagtcgagtttttcagagtacaactattgatggtgaacgatcgccaatactaggggcctttaaaacgggagcagctattgcaaccattgacgactggtatcctgaagccactgagccactaagggtcggacggtttggggttcatcgcgaagatgtcacttgctaccgtcatccgtctaccggaaaagattttttctcgatattacaacaagcagagcactatattgaagtgttgagcgccaacaaaactcccgctcaagaaactatcaacgacatgcactttttaatggctaacctgattaagggtgggatgttccagcataaaggagactgactgtgaaatggtattataagacaatcacctttctgccagagttgtgcaacaacgagtcactggctgcaaagtgtctccgcgttctgcatggatttaactatcagtatgagacacgaaatatcggcgtttcatttccgctttggtgtgatgcaacggttggaaaaaagatttcatttgtcagcaagaacaagatagaactcgacttactacttaaacaacactatttcgtccaaatggaacaacttcaatactttcatatatccaacactgttctcgtcccagaagattgtacatacgtttcctttagacgctgtcaatctatagataagctcacagcagcagggctggcaaggaaaatcagacgcctggagaaacgtgctctatctagaggcgagcaatttgacccatcatcttttgctcaaaaagagcatactgcaatagcgcactaccactcacttggggagtccagcaaacagacgaaccgcaactttcgactcaatatcaggatgctctcggagcaaccccgtgaggggaactcgatttttagtagctatggcttatcaaattcagaaaactcgtttcagcctgtacccttaatctgacctaggctgctgccaccgctgagcaataactagcataaccccttggggcctctaaacgggtcttgaggggttttttgctgaaacctcaggcatttgagaagcacacggtcacactgcttccggtagtcaataaaccggtaaaccagcaatagacataagcggctatttaacgaccctgccctgaaccgacgaccgggtcatcgtggccggatcttgcggcccctcggcttgaacgaattgttagacattatttgccgactaccttggtgatctcgcctttcacgtagtggacaaattcttccaactgatctgcgcgcgaggccaagcgatcttcttcttgtccaagataagcctgtctagcttcaagtatgacgggctgatactgggccggcaggcgctccattgcccagtcggcagcgacatccttcggcgcgattttgccggttactgcgctgtaccaaatgcgggacaacgtaagcactacatttcgctcatcgccagcccagtcgggcggcgagttccatagcgttaaggtttcatttagcgcctcaaatagatcctgttcaggaaccggatcaaagagttcctccgccgctggacctaccaaggcaacgctatgttctcttgcttttgtcagcaagatagccagatcaatgtcgatcgtggctggctcgaagatacctgcaagaatgtcattgcgctgccattctccaaattgcagttcgcgcttagctggataacgccacggaatgatgtcgtcgtgcacaacaatggtgacttctacagcgcggagaatctcgctctctccaggggaagccgaagtttccaaaaggtcgttgatcaaagctcgccgcgttgtttcatcaagccttacggtcaccgtaaccagcaaatcaatatcactgtgtggcttcaggccgccatccactgcggagccgtacaaatgtacggccagcaacgtcggttcgagatggcgctcgatgacgccaactacctctgatagttgagtcgatacttcggcgatcaccgcttccctcatactcttcctttttcaatattattgaagcatttatcagggttattgtctcatgagcggatacatatttgaatgtatttagaaaaataaacaaatagctagctcactcggtcgctacgctccgggcgtgagactgcggcgggcgctgcggacacatacaaagttacccacagattccgtggataagcaggggactaacatgtgaggcaaaacagcagggccgcgccggtggcgtttttccataggctccgccctcctgccagagttcacataaacagacgcttttccggtgcatctgtgggagccgtgaggctcaaccatgaatctgacagtacgggcgaaacccgacaggacttaaagatccccaccgtttccggcgggtcgctccctcttgcgctctcctgttccgaccctgccgtttaccggatacctgttccgcctttctcccttacgggaagtgtggcgctttctcatagctcacacactggtatctcggctcggtgtaggtcgttcgctccaagctgggctgtaagcaagaactccccgttcagcccgactgctgcgccttatccggtaactgttcacttgagtccaacccggaaaagcacggtaaaacgccactggcagcagccattggtaactgggagttcgcagaggatttgtttagctaaacacgcggttgctcttgaagtgtgcgccaaagtccggctacactggaaggacagatttggttgctgtgctctgcgaaagccagttaccacggttaagcagttccccaactgacttaaccttcgatcaaaccacctccccaggtggttttttcgtttacagggcaaaagattacgcgcagaaaaaaaggatctcaagaagatcctttgatcttttctactgaaccgctctagatttcagtgcaatttatctcttcaaatgtagcacctgaagtcagccccatacgatataagttgtaattctcatgttagtcatgccccgcgcccaccggaaggagctgactgggttgaaggctctcaagggcatcggtcgagatcccggtgcctaatgagtgagctaacttacattaattgcgttgcgctcactgcccgctttccagtcgggaaacctgtcgtgccagctgcattaatgaatcggccaacgcgcggggagaggcggtttgcgtattgggcgccagggtggtttttcttttcaccagtgagacgggcaacagctgattgcccttcaccgcctggccctgagagagttgcagcaagcggtccacgctggtttgccccagcaggcgaaaatcctgtttgatggtggttaacggcgggatataacatgagctgtcttcggtatcgtcgtatcccactaccgagatgtccgcaccaacgcgcagcccggactcggtaatggcgcgcattgcgcccagcgccatctgatcgttggcaaccagcatcgcagtgggaacgatgccctcattcagcatttgcatggtttgttgaaaaccggacatggcactccagtcgccttcccgttccgctatcggctgaatttgattgcgagtgagatatttatgccagccagccagacgcagacgcgccgagacagaacttaatgggcccgctaacagcgcgatttgctggtgacccaatgcgaccagatgctccacgcccagtcgcgtaccgtcttcatgggagaaaataatactgttgatgggtgtctggtcagagacatcaagaaataacgccggaacattagtgcaggcagcttccacagcaatggcatcctggtcatccagcggatagttaatgatcagcccactgacgcgttgcgcgagaagattgtgcaccgccgctttacaggcttcgacgccgcttcgttctaccatcgacaccaccacgctggcacccagttgatcggcgcgagatttaatcgccgcgacaatttgcgacggcgcgtgcagggccagactggaggtggcaacgccaatcagcaacgactgtttgcccgccagttgttgtgccacgcggttgggaatgtaattcagctccgccatcgccgcttccactttttcccgcgttttcgcagaaacgtggctggcctggttcaccacgcgggaaacggtctgataagagacaccggcatactctgcgacatcgtataacgttactggtttcac

SEQ ID NO: 849 - DNA, 8282 bp, Synthetic construct
  source 1..8282: mol_type = other DNA
attcaccaccctgaattgactctcttccgggcgctatcatgccataccgcgaaaggttttgcgccattcgatggtgtccgggatctcgacgctctcccttatgcgactcctgcattaggaaattaatacgactcactataggggaattgtgagcggataacaattcccctgtagaaataattttgtttaactttaataaggagatataccatgggtgaactgccgagtaggtagctgataacagtacagcgcggctgaaatcatcattaaagcggtgaactgccgagtaggtagctgataacggatccgaattcgagcgaaggagatatacatatgtttttgcaaagacctaaaccttacagcgatgaaagtttagaaagtttctttatccgagtggctaacaaaaatggctacggtgatgtccatcgcttcctagaagccactaaacgattccttcaagacattgaccataatggctatcaaacctttccgactgatataactcggataaacccatactcagctaaaaacagttccagcgcacgaactgcgtcattcctgaaacttgcacaattgacatttaatgaaccgccagagctacttgggttggcaattaacagaacaaacatgaaatactcgccgtcaactagcgcggttgttagaggtgcagaagtctttcctcgcagtttactacggacgcactccatcccctgctgtcctttgtgtctgcgagaaaatggctacgcctcctacctttggcactttcaggggtacgaatactgccacagccataacgtacctttaattaccacttgtagctgtggtaaggagtttgactaccgagtatctgggttaaagggcatttgctgcaaatgcaaggagcctatcaccttaaccagcagggagaacggtcatgaggcagcgtgtactgtttcaaactggcttgctggccatgaatctaaacctctgccaaatcttcctaaaagctaccgatggggtttagttcattggtggatgggtattaaagatagcgagttcgatcacttttcgttcgttcaatttttctcaaactggccaaggtcattccactcgataatcgaagatgaagtagagttcaaccttgagcatgctgttgtcagcacgtctgaattacgactaaaagatcttcttggtcgattgtttttcggttcaattcggttacctgagcggaatcttcaacacaatatcatccttggtgagcttctctgctatttagaaaatcgtttatggcaagacaagggattaatcgccaacctcaaaatgaacgcgttagaggcgactgtaatgttaaattgtagcctcgatcagattgcatcaatggttgaacaacgcatcttgaagccaaatcgaaaaagcaagcccaacagccctcttgatgttaccgattatctatttcatttcggcgatattttctgtctttggttagctgagttccaaagcgatgagtttaaccgttcgttttatgtgtcgaggtggtaaatgcaaactctgaaagaactaatcgcatccaatcctgacgacttaacaactgaacttaagagagcatttcgtccactcacaccgcatattgcaattgatggtaatgaacttgacgcactgacgatattagtcaatttaaccgataagactgatgatcagaaagacctgctcgatcgagccaaatgcaagcaaaaacttcgagatgaaaaatggtgggctagctgcataaattgcgttaattacagacaaagccataacccaaaattcccggatatacgttctgaaggcgtgattcgaacccaagccctgggtgaattaccgagtttcctactctcgtcctcaaaaatcccaccataccattggtcatatagccatgattcaaaatacgtcaacaaaagcgcattcctcaccaatgagttttgttgggatggtgagatctcatgtttgggtgagcttcttaaagatgcagatcacccactttggaatactttgaaaaagttaggttgttctcaaaaaacttgcaaagcaatggcaaaacaactagctgatattactctcacgactatcaatgtcacactcgcaccaaattacctgactcaaatatctctccccgatagtgatacatcctacatttcactctctcctgttgcatcgctatcgatgcaaagccactttcatcagaggctccaagatgaaaatcggcatagcgcgataacgcggtttagccgaactaccaacatgggggtcactgcgatgacatgtggcggcgcatttagaatgttaaagtctggcgctaagttttccagcccccctcatcaccgattaaacagtaaacgaagttggttgacgtcagagcatgttcagtcattaaaacagtaccagcgcctcaacaaaagcctcatacctgaaaactctcggattgcactccgtagaaaatacaaaatcgagcttcaaaatatggtcagatcttggtttgcaatgcaagaccatacccttgattcgaacatacttatccaacatttgaatcatgacctatcttacttaggagccacaaaacgttttgcatacgatccagcgatgaccaagctctttactgagcttttgaaacgagagttatcaaattcaatcaataatggtgagcaacacactaatggatcgtttttagtcctaccgaatatcagggtttgtggcgcaacagctttaagctccccggtaacggtggggattccatcacttacagctttctttggcttcgttcacgcatttgaacggaatataaatcgcaccacctcatcgtttcgtgttgaatcctttgcgatatgcgtccatcaactacatgtcgagaagcgaggtttgacagcagagtttgtggaaaaaggcgacgggactatatccgctcccgcgacccgggatgactggcagtgtgatgtcgtatttagccttattttgaacaccaactttgctcaacatattgaccaagatacgttagttacatcactaccaaagcgattggctcggggttcagcaaaaattgcgattgatgactttaaacatatcaactcattctcgacattagaaacagcgatcgaatctctgccaatagaagctggtaggtggttatcactttacgcacagtcaaacaataatctaagtgatctattagcagccatgacagaggaccatcagctcatggcaagctgcgtcggttaccacttgttagaagagcccaaagataaaccaaactccctcagaggttacaaacacgctatcgccgagtgcatcattggactcattaactcaatcacctttagctcagagactgatcccaacacaatcttttggtcgctaaagaactatcaaaactacctagtggtacagccaaggagtatcaacgatgaaactaccgacaaatctagcctatgagcgctctatcgacccatcagatgtctgtttttttgtcgtctggcccgatgatagaaaaacacctttaacctacaattctcgtactctgctcgggcaaatggaagcggcatcattagcctatgatgtctcaggtcaaccaataaaaagtgccaccgctgaggcgttagctcaagggaaccctcatcaagttgatttctgccacgttccatacggtgcgagtcatattgaatgcagtttctccgtctcgttttcttctgaactacgtcaaccatataagtgtaactcaagcaaagttaaacaaacgctagtgcaattagtcgagctctacgaaacgaaaatcggctggactgagctagcaacccgatatttgatgaacatttgcaacggtaaatggctgtggaaaaatacccgtaaagcctattgctggaacattgtacttacaccttggccttggaacggggaaaaggttggatttgaagatattcgtactaactacacctcacggcaagactttaaaaataataaaaattggtctgctatagttgaaatgatcaaaaccgcattttctagtactgatgggctggcgatatttgaagtcagggccaccttgcacttgccaacgaatgctatggtgcggccaagccaagttttcacagaaaaagaaagtggcagtaaaagtaaatctaaaactcaaaacagtcgagtttttcagagtacaactattgatggtgaacgatcgccaatactaggggcctttaaaacgggagcagctattgcaaccattgacgactggtatcctgaagccactgagccactaagggtcggacggtttggggttcatcgcgaagatgtcacttgctaccgtcatccgtctaccggaaaagattttttctcgatattacaacaagcagagcactatattgaagtgttgagcgccaacaaaactcccgctcaagaaactatcaacgacatgcactttttaatggctaacctgattaagggtgggatgttccagcataaaggagactgactgtgaaatggtattataagacaatcacctttctgccagagttgtgcaacaacgagtcactggctgcaaagtgtctccgcgttctgcatggatttaactatcagtatgagacacgaaatatcggcgtttcatttccgctttggtgtgatgcaacggttggaaaaaagatttcatttgtcagcaagaacaagatagaactcgacttactacttaaacaacactatttcgtccaaatggaacaacttcaatactttcatatatccaacactgttctcgtcccagaagattgtacatacgtttcctttagacgctgtcaatctatagataagctcacagcagcagggctggcaaggaaaatcagacgcctggagaaacgtgctctatctagaggcgagcaatttgacccatcatcttttgctcaaaaagagcatactgcaatagcgcactaccactcacttggggagtccagcaaacagacgaaccgcaactttcgactcaatatcaggatgctctcggagcaaccccgtgaggggaactcgatttttagtagctatggcttatcaaattcagaaaactcgtttcagcctgtacccttaatctgacctaggctgctgccaccgctgagcaataactagcataaccccttggggcctctaaacgggtcttgaggggttttttgctgaaacctcaggcatttgagaagcacacggtcacactgcttccggtagtcaataaaccggtaaaccagcaatagacataagcggctatttaacgaccctgccctgaaccgacgaccgggtcatcgtggccggatcttgcggcccctcggcttgaacgaattgttagacattatttgccgactaccttggtgatctcgcctttcacgtagtggacaaattcttccaactgatctgcgcgcgaggccaagcgatcttcttcttgtccaagataagcctgtctagcttcaagtatgacgggctgatactgggccggcaggcgctccattgcccagtcggcagcgacatccttcggcgcgattttgccggttactgcgctgtaccaaatgcgggacaacgtaagcactacatttcgctcatcgccagcccagtcgggcggcgagttccatagcgttaaggtttcatttagcgcctcaaatagatcctgttcaggaaccggatcaaagagttcctccgccgctggacctaccaaggcaacgctatgttctcttgcttttgtcagcaagatagccagatcaatgtcgatcgtggctggctcgaagatacctgcaagaatgtcattgcgctgccattctccaaattgcagttcgcgcttagctggataacgccacggaatgatgtcgtcgtgcacaacaatggtgacttctacagcgcggagaatctcgctctctccaggggaagccgaagtttccaaaaggtcgttgatcaaagctcgccgcgttgtttcatcaagccttacggtcaccgtaaccagcaaatcaatatcactgtgtggcttcaggccgccatccactgcggagccgtacaaatgtacggccagcaacgtcggttcgagatggcgctcgatgacgccaactacctctgatagttgagtcgatacttcggcgatcaccgcttccctcatactcttcctttttcaatattattgaagcatttatcagggttattgtctcatgagcggatacatatttgaatgtatttagaaaaataaacaaatagctagctcactcggtcgctacgctccgggcgtgagactgcggcgggcgctgcggacacatacaaagttacccacagattccgtggataagcaggggactaacatgtgaggcaaaacagcagggccgcgccggtggcgtttttccataggctccgccctcctgccagagttcacataaacagacgcttttccggtgcatctgtgggagccgtgaggctcaaccatgaatctgacagtacgggcgaaacccgacaggacttaaagatccccaccgtttccggcgggtcgctccctcttgcgctctcctgttccgaccctgccgtttaccggatacctgttccgcctttctcccttacgggaagtgtggcgctttctcatagctcacacactggtatctcggctcggtgtaggtcgttcgctccaagctgggctgtaagcaagaactccccgttcagcccgactgctgcgccttatccggtaactgttcacttgagtccaacccggaaaagcacggtaaaacgccactggcagcagccattggtaactgggagttcgcagaggatttgtttagctaaacacgcggttgctcttgaagtgtgcgccaaagtccggctacactggaaggacagatttggttgctgtgctctgcgaaagccagttaccacggttaagcagttccccaactgacttaaccttcgatcaaaccacctccccaggtggttttttcgtttacagggcaaaagattacgcgcagaaaaaaaggatctcaagaagatcctttgatcttttctactgaaccgctctagatttcagtgcaatttatctcttcaaatgtagcacctgaagtcagccccatacgatataagttgtaattctcatgttagtcatgccccgcgcccaccggaaggagctgactgggttgaaggctctcaagggcatcggtcgagatcccggtgcctaatgagtgagctaacttacattaattgcgttgcgctcactgcccgctttccagtcgggaaacctgtcgtgccagctgcattaatgaatcggccaacgcgcggggagaggcggtttgcgtattgggcgccagggtggtttttcttttcaccagtgagacgggcaacagctgattgcccttcaccgcctggccctgagagagttgcagcaagcggtccacgctggtttgccccagcaggcgaaaatcctgtttgatggtggttaacggcgggatataacatgagctgtcttcggtatcgtcgtatcccactaccgagatgtccgcaccaacgcgcagcccggactcggtaatggcgcgcattgcgcccagcgccatctgatcgttggcaaccagcatcgcagtgggaacgatgccctcattcagcatttgcatggtttgttgaaaaccggacatggcactccagtcgccttcccgttccgctatcggctgaatttgattgcgagtgagatatttatgccagccagccagacgcagacgcgccgagacagaacttaatgggcccgctaacagcgcgatttgctggtgacccaatgcgaccagatgctccacgcccagtcgcgtaccgtcttcatgggagaaaataatactgttgatgggtgtctggtcagagacatcaagaaataacgccggaacattagtgcaggcagcttccacagcaatggcatcctggtcatccagcggatagttaatgatcagcccactgacgcgttgcgcgagaagattgtgcaccgccgctttacaggcttcgacgccgcttcgttctaccatcgacaccaccacgctggcacccagttgatcggcgcgagatttaatcgccgcgacaatttgcgacggcgcgtgcagggccagactggaggtggcaacgccaatcagcaacgactgtttgcccgccagttgttgtgccacgcggttgggaatgtaattcagctccgccatcgccgcttccactttttcccgcgttttcgcagaaacgtggctggcctggttcaccacgcgggaaacggtctgataagagacaccggcatactctgcgacatcgtataacgttactggtttcac

SEQ ID NO: 850 - DNA, 8496 bp, Synthetic construct
  source 1..8496: mol_type = other DNA
cgggatctcgacgctctcccttatgcgactcctgcattaggaaattaatacgactcactataggggaattgtgagcggataacaattcccctgtagaaataattttgtttaactttaataaggagatataccatgggcagcagccatcaccatcatcaccacagccaggatccgaattcgagctcggcgcgcctgcaggtcgacaagcttgcggccgcataatgcttaagtcgaacagaaagtaatcgtattgtacacggccgcataatcgaaattaatacgactcactataggggaattgtgagcggataacaattccccatcttagtatattagttaagtataagaaggagatatacatatgtttttgcaaagacctaaaccttacagcgatgaaagtttagaaagtttctttatccgagtggctaacaaaaatggctacggtgatgtccatcgcttcctagaagccactaaacgattccttcaagacattgaccataatggctatcaaacctttccgactgatataactcggataaacccatactcagctaaaaacagttccagcgcacgaactgcgtcattcctgaaacttgcacaattgacatttaatgaaccgccagagctacttgggttggcaattaacagaacaaacatgaaatactcgccgtcaactagcgcggttgttagaggtgcagaagtctttcctcgcagtttactacggacgcactccatcccctgctgtcctttgtgtctgcgagaaaatggctacgcctcctacctttggcactttcaggggtacgaatactgccacagccataacgtacctttaattaccacttgtagctgtggtaaggagtttgactaccgagtatctgggttaaagggcatttgctgcaaatgcaaggagcctatcaccttaaccagcagggagaacggtcatgaggcagcgtgtactgtttcaaactggcttgctggccatgaatctaaacctctgccaaatcttcctaaaagctaccgatggggtttagttcattggtggatgggtattaaagatagcgagttcgatcacttttcgttcgttcaatttttctcaaactggccaaggtcattccactcgataatcgaagatgaagtagagttcaaccttgagcatgctgttgtcagcacgtctgaattacgactaaaagatcttcttggtcgattgtttttcggttcaattcggttacctgagcggaatcttcaacacaatatcatccttggtgagcttctctgctatttagaaaatcgtttatggcaagacaagggattaatcgccaacctcaaaatgaacgcgttagaggcgactgtaatgttaaattgtagcctcgatcagattgcatcaatggttgaacaacgcatcttgaagccaaatcgaaaaagcaagcccaacagccctcttgatgttaccgattatctatttcatttcggcgatattttctgtctttggttagctgagttccaaagcgatgagtttaaccgttcgttttatgtgtcgaggtggtaaatgcaaactctgaaagaactaatcgcatccaatcctgacgacttaacaactgaacttaagagagcatttcgtccactcacaccgcatattgcaattgatggtaatgaacttgacgcactgacgatattagtcaatttaaccgataagactgatgatcagaaagacctgctcgatcgagccaaatgcaagcaaaaacttcgagatgaaaaatggtgggctagctgcataaattgcgttaattacagacaaagccataacccaaaattcccggatatacgttctgaaggcgtgattcgaacccaagccctgggtgaattaccgagtttcctactctcgtcctcaaaaatcccaccataccattggtcatatagccatgattcaaaatacgtcaacaaaagcgcattcctcaccaatgagttttgttgggatggtgagatctcatgtttgggtgagcttcttaaagatgcagatcacccactttggaatactttgaaaaagttaggttgttctcaaaaaacttgcaaagcaatggcaaaacaactagctgatattactctcacgactatcaatgtcacactcgcaccaaattacctgactcaaatatctctccccgatagtgatacatcctacatttcactctctcctgttgcatcgctatcgatgcaaagccactttcatcagaggctccaagatgaaaatcggcatagcgcgataacgcggtttagccgaactaccaacatgggggtcactgcgatgacatgtggcggcgcatttagaatgttaaagtctggcgctaagttttccagcccccctcatcaccgattaaacagtaaacgaagttggttgacgtcagagcatgttcagtcattaaaacagtaccagcgcctcaacaaaagcctcatacctgaaaactctcggattgcactccgtagaaaatacaaaatcgagcttcaaaatatggtcagatcttggtttgcaatgcaagaccatacccttgattcgaacatacttatccaacatttgaatcatgacctatcttacttaggagccacaaaacgttttgcatacgatccagcgatgaccaagctctttactgagcttttgaaacgagagttatcaaattcaatcaataatggtgagcaacacactaatggatcgtttttagtcctaccgaatatcagggtttgtggcgcaacagctttaagctccccggtaacggtggggattccatcacttacagctttctttggcttcgttcacgcatttgaacggaatataaatcgcaccacctcatcgtttcgtgttgaatcctttgcgatatgcgtccatcaactacatgtcgagaagcgaggtttgacagcagagtttgtggaaaaaggcgacgggactatatccgctcccgcgacccgggatgactggcagtgtgatgtcgtatttagccttattttgaacaccaactttgctcaacatattgaccaagatacgttagttacatcactaccaaagcgattggctcggggttcagcaaaaattgcgattgatgactttaaacatatcaactcattctcgacattagaaacagcgatcgaatctctgccaatagaagctggtaggtggttatcactttacgcacagtcaaacaataatctaagtgatctattagcagccatgacagaggaccatcagctcatggcaagctgcgtcggttaccacttgttagaagagcccaaagataaaccaaactccctcagaggttacaaacacgctatcgccgagtgcatcattggactcattaactcaatcacctttagctcagagactgatcccaacacaatcttttggtcgctaaagaactatcaaaactacctagtggtacagccaaggagtatcaacgatgaaactaccgacaaatctagcctatgagcgctctatcgacccatcagatgtctgtttttttgtcgtctggcccgatgatagaaaaacacctttaacctacaattctcgtactctgctcgggcaaatggaagcggcatcattagcctatgatgtctcaggtcaaccaataaaaagtgccaccgctgaggcgttagctcaagggaaccctcatcaagttgatttctgccacgttccatacggtgcgagtcatattgaatgcagtttctccgtctcgttttcttctgaactacgtcaaccatataagtgtaactcaagcaaagttaaacaaacgctagtgcaattagtcgagctctacgaaacgaaaatcggctggactgagctagcaacccgatatttgatgaacatttgcaacggtaaatggctgtggaaaaatacccgtaaagcctattgctggaacattgtacttacaccttggccttggaacggggaaaaggttggatttgaagatattcgtactaactacacctcacggcaagactttaaaaataataaaaattggtctgctatagttgaaatgatcaaaaccgcattttctagtactgatgggctggcgatatttgaagtcagggccaccttgcacttgccaacgaatgctatggtgcggccaagccaagttttcacagaaaaagaaagtggcagtaaaagtaaatctaaaactcaaaacagtcgagtttttcagagtacaactattgatggtgaacgatcgccaatactaggggcctttaaaacgggagcagctattgcaaccattgacgactggtatcctgaagccactgagccactaagggtcggacggtttggggttcatcgcgaagatgtcacttgctaccgtcatccgtctaccggaaaagattttttctcgatattacaacaagcagagcactatattgaagtgttgagcgccaacaaaactcccgctcaagaaactatcaacgacatgcactttttaatggctaacctgattaagggtgggatgttccagcataaaggagactgactgtgaaatggtattataagacaatcacctttctgccagagttgtgcaacaacgagtcactggctgcaaagtgtctccgcgttctgcatggatttaactatcagtatgagacacgaaatatcggcgtttcatttccgctttggtgtgatgcaacggttggaaaaaagatttcatttgtcagcaagaacaagatagaactcgacttactacttaaacaacactatttcgtccaaatggaacaacttcaatactttcatatatccaacactgttctcgtcccagaagattgtacatacgtttcctttagacgctgtcaatctatagataagctcacagcagcagggctggcaaggaaaatcagacgcctggagaaacgtgctctatctagaggcgagcaatttgacccatcatcttttgctcaaaaagagcatactgcaatagcgcactaccactcacttggggagtccagcaaacagacgaaccgcaactttcgactcaatatcaggatgctctcggagcaaccccgtgaggggaactcgatttttagtagctatggcttatcaaattcagaaaactcgtttcagcctgtacccttaatctgacgatataccatgggtgaactgccgagtaggtagctgataacgagacctctgtcttgtcagctagggtggtctcgtgaactgccgagtaggtagctgataacggatccgaattcgctgctgccaccgctgagcaataactagcataaccccttggggcctctaaacgggtcttgaggggttttttgctgaaacctcaggcatttgagaagcacacggtcacactgcttccggtagtcaataaaccggtaaaccagcaatagacataagcggctatttaacgaccctgccctgaaccgacgaccgggtcatcgtggccggatcttgcggcccctcggcttgaacgaattgttagacattatttgccgactaccttggtgatctcgcctttcacgtagtggacaaattcttccaactgatctgcgcgcgaggccaagcgatcttcttcttgtccaagataagcctgtctagcttcaagtatgacgggctgatactgggccggcaggcgctccattgcccagtcggcagcgacatccttcggcgcgattttgccggttactgcgctgtaccaaatgcgggacaacgtaagcactacatttcgctcatcgccagcccagtcgggcggcgagttccatagcgttaaggtttcatttagcgcctcaaatagatcctgttcaggaaccggatcaaagagttcctccgccgctggacctaccaaggcaacgctatgttctcttgcttttgtcagcaagatagccagatcaatgtcgatcgtggctggctcgaagatacctgcaagaatgtcattgcgctgccattctccaaattgcagttcgcgcttagctggataacgccacggaatgatgtcgtcgtgcacaacaatggtgacttctacagcgcggagaatctcgctctctccaggggaagccgaagtttccaaaaggtcgttgatcaaagctcgccgcgttgtttcatcaagccttacggtcaccgtaaccagcaaatcaatatcactgtgtggcttcaggccgccatccactgcggagccgtacaaatgtacggccagcaacgtcggttcgagatggcgctcgatgacgccaactacctctgatagttgagtcgatacttcggcgatcaccgcttccctcatactcttcctttttcaatattattgaagcatttatcagggttattgtctcatgagcggatacatatttgaatgtatttagaaaaataaacaaatagctagctcactcggtcgctacgctccgggcgtgagactgcggcgggcgctgcggacacatacaaagttacccacagattccgtggataagcaggggactaacatgtgaggcaaaacagcagggccgcgccggtggcgtttttccataggctccgccctcctgccagagttcacataaacagacgcttttccggtgcatctgtgggagccgtgaggctcaaccatgaatctgacagtacgggcgaaacccgacaggacttaaagatccccaccgtttccggcgggtcgctccctcttgcgctctcctgttccgaccctgccgtttaccggatacctgttccgcctttctcccttacgggaagtgtggcgctttctcatagctcacacactggtatctcggctcggtgtaggtcgttcgctccaagctgggctgtaagcaagaactccccgttcagcccgactgctgcgccttatccggtaactgttcacttgagtccaacccggaaaagcacggtaaaacgccactggcagcagccattggtaactgggagttcgcagaggatttgtttagctaaacacgcggttgctcttgaagtgtgcgccaaagtccggctacactggaaggacagatttggttgctgtgctctgcgaaagccagttaccacggttaagcagttccccaactgacttaaccttcgatcaaaccacctccccaggtggttttttcgtttacagggcaaaagattacgcgcagaaaaaaaggatctcaagaagatcctttgatcttttctactgaaccgctctagatttcagtgcaatttatctcttcaaatgtagcacctgaagtcagccccatacgatataagttgtaattctcatgttagtcatgccccgcgcccaccggaaggagctgactgggttgaaggctctcaagggcatcggtcgagatcccggtgcctaatgagtgagctaacttacattaattgcgttgcgctcactgcccgctttccagtcgggaaacctgtcgtgccagctgcattaatgaatcggccaacgcgcggggagaggcggtttgcgtattgggcgccagggtggtttttcttttcaccagtgagacgggcaacagctgattgcccttcaccgcctggccctgagagagttgcagcaagcggtccacgctggtttgccccagcaggcgaaaatcctgtttgatggtggttaacggcgggatataacatgagctgtcttcggtatcgtcgtatcccactaccgagatgtccgcaccaacgcgcagcccggactcggtaatggcgcgcattgcgcccagcgccatctgatcgttggcaaccagcatcgcagtgggaacgatgccctcattcagcatttgcatggtttgttgaaaaccggacatggcactccagtcgccttcccgttccgctatcggctgaatttgattgcgagtgagatatttatgccagccagccagacgcagacgcgccgagacagaacttaatgggcccgctaacagcgcgatttgctggtgacccaatgcgaccagatgctccacgcccagtcgcgtaccgtcttcatgggagaaaataatactgttgatgggtgtctggtcagagacatcaagaaataacgccggaacattagtgcaggcagcttccacagcaatggcatcctggtcatccagcggatagttaatgatcagcccactgacgcgttgcgcgagaagattgtgcaccgccgctttacaggcttcgacgccgcttcgttctaccatcgacaccaccacgctggcacccagttgatcggcgcgagatttaatcgccgcgacaatttgcgacggcgcgtgcagggccagactggaggtggcaacgccaatcagcaacgactgtttgcccgccagttgttgtgccacgcggttgggaatgtaattcagctccgccatcgccgcttccactttttcccgcgttttcgcagaaacgtggctggcctggttcaccacgcgggaaacggtctgataagagacaccggcatactctgcgacatcgtataacgttactggtttcacattcaccaccctgaattgactctcttccgggcgctatcatgccataccgcgaaaggttttgcgccattcgatggtgtc

SEQ ID NO: 851 - DNA, 8496 bp, Synthetic construct
  source 1..8496: mol_type = other DNA
cgggatctcgacgctctcccttatgcgactcctgcattaggaaattaatacgactcactataggggaattgtgagcggataacaattcccctgtagaaataattttgtttaactttaataaggagatataccatgggcagcagccatcaccatcatcaccacagccaggatccgaattcgagctcggcgcgcctgcaggtcgacaagcttgcggccgcataatgcttaagtcgaacagaaagtaatcgtattgtacacggccgcataatcgaaattaatacgactcactataggggaattgtgagcggataacaattccccatcttagtatattagttaagtataagaaggagatatacatatgtttttgcaaagacctaaaccttacagcgatgaaagtttagaaagtttctttatccgagtggctaacaaaaatggctacggtgatgtccatcgcttcctagaagccactaaacgattccttcaagacattgaccataatggctatcaaacctttccgactgatataactcggataaacccatactcagctaaaaacagttccagcgcacgaactgcgtcattcctgaaacttgcacaattgacatttaatgaaccgccagagctacttgggttggcaattaacagaacaaacatgaaatactcgccgtcaactagcgcggttgttagaggtgcagaagtctttcctcgcagtttactacggacgcactccatcccctgctgtcctttgtgtctgcgagaaaatggctacgcctcctacctttggcactttcaggggtacgaatactgccacagccataacgtacctttaattaccacttgtagctgtggtaaggagtttgactaccgagtatctgggttaaagggcatttgctgcaaatgcaaggagcctatcaccttaaccagcagggagaacggtcatgaggcagcgtgtactgtttcaaactggcttgctggccatgaatctaaacctctgccaaatcttcctaaaagctaccgatggggtttagttcattggtggatgggtattaaagatagcgagttcgatcacttttcgttcgttcaatttttctcaaactggccaaggtcattccactcgataatcgaagatgaagtagagttcaaccttgagcatgctgttgtcagcacgtctgaattacgactaaaagatcttcttggtcgattgtttttcggttcaattcggttacctgagcggaatcttcaacacaatatcatccttggtgagcttctctgctatttagaaaatcgtttatggcaagacaagggattaatcgccaacctcaaaatgaacgcgttagaggcgactgtaatgttaaattgtagcctcgatcagattgcatcaatggttgaacaacgcatcttgaagccaaatcgaaaaagcaagcccaacagccctcttgatgttaccgattatctatttcatttcggcgatattttctgtctttggttagctgagttccaaagcgatgagtttaaccgttcgttttatgtgtcgaggtggtaaatgcaaactctgaaagaactaatcgcatccaatcctgacgacttaacaactgaacttaagagagcatttcgtccactcacaccgcatattgcaattgatggtaatgaacttgacgcactgacgatattagtcaatttaaccgataagactgatgatcagaaagacctgctcgatcgagccaaatgcaagcaaaaacttcgagatgaaaaatggtgggctagctgcataaattgcgttaattacagacaaagccataacccaaaattcccggatatacgttctgaaggcgtgattcgaacccaagccctgggtgaattaccgagtttcctactctcgtcctcaaaaatcccaccataccattggtcatatagccatgattcaaaatacgtcaacaaaagcgcattcctcaccaatgagttttgttgggatggtgagatctcatgtttgggtgagcttcttaaagatgcagatcacccactttggaatactttgaaaaagttaggttgttctcaaaaaacttgcaaagcaatggcaaaacaactagctgatattactctcacgactatcaatgtcacactcgcaccaaattacctgactcaaatatctctccccgatagtgatacatcctacatttcactctctcctgttgcatcgctatcgatgcaaagccactttcatcagaggctccaagatgaaaatcggcatagcgcgataacgcggtttagccgaactaccaacatgggggtcactgcgatgacatgtggcggcgcatttagaatgttaaagtctggcgctaagttttccagcccccctcatcaccgattaaacagtaaacgaagttggttgacgtcagagcatgttcagtcattaaaacagtaccagcgcctcaacaaaagcctcatacctgaaaactctcggattgcactccgtagaaaatacaaaatcgagcttcaaaatatggtcagatcttggtttgcaatgcaagaccatacccttgattcgaacatacttatccaacatttgaatcatgacctatcttacttaggagccacaaaacgttttgcatacgatccagcgatgaccaagctctttactgagcttttgaaacgagagttatcaaattcaatcaataatggtgagcaacacactaatggatcgtttttagtcctaccgaatatcagggtttgtggcgcaacagctttaagctccccggtaacggtggggattccatcacttacagctttctttggcttcgttcacgcatttgaacggaatataaatcgcaccacctcatcgtttcgtgttgaatcctttgcgatatgcgtccatcaactacatgtcgagaagcgaggtttgacagcagagtttgtggaaaaaggcgacgggactatatccgctcccgcgacccgggatgactggcagtgtgatgtcgtatttagccttattttgaacaccaactttgctcaacatattgaccaagatacgttagttacatcactaccaaagcgattggctcggggttcagcaaaaattgcgattgatgactttaaacatatcaactcattctcgacattagaaacagcgatcgaatctctgccaatagaagctggtaggtggttatcactttacgcacagtcaaacaataatctaagtgatctattagcagccatgacagaggaccatcagctcatggcaagctgcgtcggttaccacttgttagaagagcccaaagataaaccaaactccctcagaggttacaaacacgctatcgccgagtgcatcattggactcattaactcaatcacctttagctcagagactgatcccaacacaatcttttggtcgctaaagaactatcaaaactacctagtggtacagccaaggagtatcaacgatgaaactaccgacaaatctagcctatgagcgctctatcgacccatcagatgtctgtttttttgtcgtctggcccgatgatagaaaaacacctttaacctacaattctcgtactctgctcgggcaaatggaagcggcatcattagcctatgatgtctcaggtcaaccaataaaaagtgccaccgctgaggcgttagctcaagggaaccctcatcaagttgatttctgccacgttccatacggtgcgagtcatattgaatgcagtttctccgtctcgttttcttctgaactacgtcaaccatataagtgtaactcaagcaaagttaaacaaacgctagtgcaattagtcgagctctacgaaacgaaaatcggctggactgagctagcaacccgatatttgatgaacatttgcaacggtaaatggctgtggaaaaatacccgtaaagcctattgctggaacattgtacttacaccttggccttggaacggggaaaaggttggatttgaagatattcgtactaactacacctcacggcaagactttaaaaataataaaaattggtctgctatagttgaaatgatcaaaaccgcattttctagtactgatgggctggcgatatttgaagtcagggccaccttgcacttgccaacgaatgctatggtgcggccaagccaagttttcacagaaaaagaaagtggcagtaaaagtaaatctaaaactcaaaacagtcgagtttttcagagtacaactattgatggtgaacgatcgccaatactaggggcctttaaaacgggagcagctattgcaaccattgacgactggtatcctgaagccactgagccactaagggtcggacggtttggggttcatcgcgaagatgtcacttgctaccgtcatccgtctaccggaaaagattttttctcgatattacaacaagcagagcactatattgaagtgttgagcgccaacaaaactcccgctcaagaaactatcaacgacatgcactttttaatggctaacctgattaagggtgggatgttccagcataaaggagactgactgtgaaatggtattataagacaatcacctttctgccagagttgtgcaacaacgagtcactggctgcaaagtgtctccgcgttctgcatggatttaactatcagtatgagacacgaaatatcggcgtttcatttccgctttggtgtgatgcaacggttggaaaaaagatttcatttgtcagcaagaacaagatagaactcgacttactacttaaacaacactatttcgtccaaatggaacaacttcaatactttcatatatccaacactgttctcgtcccagaagattgtacatacgtttcctttagacgctgtcaatctatagataagctcacagcagcagggctggcaaggaaaatcagacgcctggagaaacgtgctctatctagaggcgagcaatttgacccatcatcttttgctcaaaaagagcatactgcaatagcgcactaccactcacttggggagtccagcaaacagacgaaccgcaactttcgactcaatatcaggatgctctcggagcaaccccgtgaggggaactcgatttttagtagctatggcttatcaaattcagaaaactcgtttcagcctgtacccttaatctgacgatataccatgggtgaactgccgagtaggtagctgataacagtacagcgcggctgaaatcatcattaaagcggtgaactgccgagtaggtagctgataacggatccgaattcgctgctgccaccgctgagcaataactagcataaccccttggggcctctaaacgggtcttgaggggttttttgctgaaacctcaggcatttgagaagcacacggtcacactgcttccggtagtcaataaaccggtaaaccagcaatagacataagcggctatttaacgaccctgccctgaaccgacgaccgggtcatcgtggccggatcttgcggcccctcggcttgaacgaattgttagacattatttgccgactaccttggtgatctcgcctttcacgtagtggacaaattcttccaactgatctgcgcgcgaggccaagcgatcttcttcttgtccaagataagcctgtctagcttcaagtatgacgggctgatactgggccggcaggcgctccattgcccagtcggcagcgacatccttcggcgcgattttgccggttactgcgctgtaccaaatgcgggacaacgtaagcactacatttcgctcatcgccagcccagtcgggcggcgagttccatagcgttaaggtttcatttagcgcctcaaatagatcctgttcaggaaccggatcaaagagttcctccgccgctggacctaccaaggcaacgctatgttctcttgcttttgtcagcaagatagccagatcaatgtcgatcgtggctggctcgaagatacctgcaagaatgtcattgcgctgccattctccaaattgcagttcgcgcttagctggataacgccacggaatgatgtcgtcgtgcacaacaatggtgacttctacagcgcggagaatctcgctctctccaggggaagccgaagtttccaaaaggtcgttgatcaaagctcgccgcgttgtttcatcaagccttacggtcaccgtaaccagcaaatcaatatcactgtgtggcttcaggccgccatccactgcggagccgtacaaatgtacggccagcaacgtcggttcgagatggcgctcgatgacgccaactacctctgatagttgagtcgatacttcggcgatcaccgcttccctcatactcttcctttttcaatattattgaagcatttatcagggttattgtctcatgagcggatacatatttgaatgtatttagaaaaataaacaaatagctagctcactcggtcgctacgctccgggcgtgagactgcggcgggcgctgcggacacatacaaagttacccacagattccgtggataagcaggggactaacatgtgaggcaaaacagcagggccgcgccggtggcgtttttccataggctccgccctcctgccagagttcacataaacagacgcttttccggtgcatctgtgggagccgtgaggctcaaccatgaatctgacagtacgggcgaaacccgacaggacttaaagatccccaccgtttccggcgggtcgctccctcttgcgctctcctgttccgaccctgccgtttaccggatacctgttccgcctttctcccttacgggaagtgtggcgctttctcatagctcacacactggtatctcggctcggtgtaggtcgttcgctccaagctgggctgtaagcaagaactccccgttcagcccgactgctgcgccttatccggtaactgttcacttgagtccaacccggaaaagcacggtaaaacgccactggcagcagccattggtaactgggagttcgcagaggatttgtttagctaaacacgcggttgctcttgaagtgtgcgccaaagtccggctacactggaaggacagatttggttgctgtgctctgcgaaagccagttaccacggttaagcagttccccaactgacttaaccttcgatcaaaccacctccccaggtggttttttcgtttacagggcaaaagattacgcgcagaaaaaaaggatctcaagaagatcctttgatcttttctactgaaccgctctagatttcagtgcaatttatctcttcaaatgtagcacctgaagtcagccccatacgatataagttgtaattctcatgttagtcatgccccgcgcccaccggaaggagctgactgggttgaaggctctcaagggcatcggtcgagatcccggtgcctaatgagtgagctaacttacattaattgcgttgcgctcactgcccgctttccagtcgggaaacctgtcgtgccagctgcattaatgaatcggccaacgcgcggggagaggcggtttgcgtattgggcgccagggtggtttttcttttcaccagtgagacgggcaacagctgattgcccttcaccgcctggccctgagagagttgcagcaagcggtccacgctggtttgccccagcaggcgaaaatcctgtttgatggtggttaacggcgggatataacatgagctgtcttcggtatcgtcgtatcccactaccgagatgtccgcaccaacgcgcagcccggactcggtaatggcgcgcattgcgcccagcgccatctgatcgttggcaaccagcatcgcagtgggaacgatgccctcattcagcatttgcatggtttgttgaaaaccggacatggcactccagtcgccttcccgttccgctatcggctgaatttgattgcgagtgagatatttatgccagccagccagacgcagacgcgccgagacagaacttaatgggcccgctaacagcgcgatttgctggtgacccaatgcgaccagatgctccacgcccagtcgcgtaccgtcttcatgggagaaaataatactgttgatgggtgtctggtcagagacatcaagaaataacgccggaacattagtgcaggcagcttccacagcaatggcatcctggtcatccagcggatagttaatgatcagcccactgacgcgttgcgcgagaagattgtgcaccgccgctttacaggcttcgacgccgcttcgttctaccatcgacaccaccacgctggcacccagttgatcggcgcgagatttaatcgccgcgacaatttgcgacggcgcgtgcagggccagactggaggtggcaacgccaatcagcaacgactgtttgcccgccagttgttgtgccacgcggttgggaatgtaattcagctccgccatcgccgcttccactttttcccgcgttttcgcagaaacgtggctggcctggttcaccacgcgggaaacggtctgataagagacaccggcatactctgcgacatcgtataacgttactggtttcacattcaccaccctgaattgactctcttccgggcgctatcatgccataccgcgaaaggttttgcgccattcgatggtgtc

SEQ ID NO: 852 - DNA, 11975 bp, Synthetic construct
  source 1..11975: mol_type = other DNA
attcaccaccctgaattgactctcttccgggcgctatcatgccataccgcgaaaggttttgcgccattcgatggtgtccgggatctcgacgctctcccttatgcgactcctgcattaggaaattaatacgactcactataggggaattgtgagcggataacaattcccctgtagaaataattttgtttaactttaataaggagatataccatgggtgaactgccgagtaggtagctgataacgagacctctgtcttgtcagctagggtggtctcgtgaactgccgagtaggtagctgataacggatccgaattcgagctcggcgcgcctgcaggtcgacaagcttgcggccgcataatgcttaagtcgaacagaaagtaatcgtattgtacacggccgcataatcgaaattaatacgactcactataggggaattgtgagcggataacaattccccatcttagtatattagttaagtataagaaggagatatacatatgtttttgcaaagacctaaaccttacagcgatgaaagtttagaaagtttctttatccgagtggctaacaaaaatggctacggtgatgtccatcgcttcctagaagccactaaacgattccttcaagacattgaccataatggctatcaaacctttccgactgatataactcggataaacccatactcagctaaaaacagttccagcgcacgaactgcgtcattcctgaaacttgcacaattgacatttaatgaaccgccagagctacttgggttggcaattaacagaacaaacatgaaatactcgccgtcaactagcgcggttgttagaggtgcagaagtctttcctcgcagtttactacggacgcactccatcccctgctgtcctttgtgtctgcgagaaaatggctacgcctcctacctttggcactttcaggggtacgaatactgccacagccataacgtacctttaattaccacttgtagctgtggtaaggagtttgactaccgagtatctgggttaaagggcatttgctgcaaatgcaaggagcctatcaccttaaccagcagggagaacggtcatgaggcagcgtgtactgtttcaaactggcttgctggccatgaatctaaacctctgccaaatcttcctaaaagctaccgatggggtttagttcattggtggatgggtattaaagatagcgagttcgatcacttttcgttcgttcaatttttctcaaactggccaaggtcattccactcgataatcgaagatgaagtagagttcaaccttgagcatgctgttgtcagcacgtctgaattacgactaaaagatcttcttggtcgattgtttttcggttcaattcggttacctgagcggaatcttcaacacaatatcatccttggtgagcttctctgctatttagaaaatcgtttatggcaagacaagggattaatcgccaacctcaaaatgaacgcgttagaggcgactgtaatgttaaattgtagcctcgatcagattgcatcaatggttgaacaacgcatcttgaagccaaatcgaaaaagcaagcccaacagccctcttgatgttaccgattatctatttcatttcggcgatattttctgtctttggttagctgagttccaaagcgatgagtttaaccgttcgttttatgtgtcgaggtggtaaatgcaaactctgaaagaactaatcgcatccaatcctgacgacttaacaactgaacttaagagagcatttcgtccactcacaccgcatattgcaattgatggtaatgaacttgacgcactgacgatattagtcaatttaaccgataagactgatgatcagaaagacctgctcgatcgagccaaatgcaagcaaaaacttcgagatgaaaaatggtgggctagctgcataaattgcgttaattacagacaaagccataacccaaaattcccggatatacgttctgaaggcgtgattcgaacccaagccctgggtgaattaccgagtttcctactctcgtcctcaaaaatcccaccataccattggtcatatagccatgattcaaaatacgtcaacaaaagcgcattcctcaccaatgagttttgttgggatggtgagatctcatgtttgggtgagcttcttaaagatgcagatcacccactttggaatactttgaaaaagttaggttgttctcaaaaaacttgcaaagcaatggcaaaacaactagctgatattactctcacgactatcaatgtcacactcgcaccaaattacctgactcaaatatctctccccgatagtgatacatcctacatttcactctctcctgttgcatcgctatcgatgcaaagccactttcatcagaggctccaagatgaaaatcggcatagcgcgataacgcggtttagccgaactaccaacatgggggtcactgcgatgacatgtggcggcgcatttagaatgttaaagtctggcgctaagttttccagcccccctcatcaccgattaaacagtaaacgaagttggttgacgtcagagcatgttcagtcattaaaacagtaccagcgcctcaacaaaagcctcatacctgaaaactctcggattgcactccgtagaaaatacaaaatcgagcttcaaaatatggtcagatcttggtttgcaatgcaagaccatacccttgattcgaacatacttatccaacatttgaatcatgacctatcttacttaggagccacaaaacgttttgcatacgatccagcgatgaccaagctctttactgagcttttgaaacgagagttatcaaattcaatcaataatggtgagcaacacactaatggatcgtttttagtcctaccgaatatcagggtttgtggcgcaacagctttaagctccccggtaacggtggggattccatcacttacagctttctttggcttcgttcacgcatttgaacggaatataaatcgcaccacctcatcgtttcgtgttgaatcctttgcgatatgcgtccatcaactacatgtcgagaagcgaggtttgacagcagagtttgtggaaaaaggcgacgggactatatccgctcccgcgacccgggatgactggcagtgtgatgtcgtatttagccttattttgaacaccaactttgctcaacatattgaccaagatacgttagttacatcactaccaaagcgattggctcggggttcagcaaaaattgcgattgatgactttaaacatatcaactcattctcgacattagaaacagcgatcgaatctctgccaatagaagctggtaggtggttatcactttacgcacagtcaaacaataatctaagtgatctattagcagccatgacagaggaccatcagctcatggcaagctgcgtcggttaccacttgttagaagagcccaaagataaaccaaactccctcagaggttacaaacacgctatcgccgagtgcatcattggactcattaactcaatcacctttagctcagagactgatcccaacacaatcttttggtcgctaaagaactatcaaaactacctagtggtacagccaaggagtatcaacgatgaaactaccgacaaatctagcctatgagcgctctatcgacccatcagatgtctgtttttttgtcgtctggcccgatgatagaaaaacacctttaacctacaattctcgtactctgctcgggcaaatggaagcggcatcattagcctatgatgtctcaggtcaaccaataaaaagtgccaccgctgaggcgttagctcaagggaaccctcatcaagttgatttctgccacgttccatacggtgcgagtcatattgaatgcagtttctccgtctcgttttcttctgaactacgtcaaccatataagtgtaactcaagcaaagttaaacaaacgctagtgcaattagtcgagctctacgaaacgaaaatcggctggactgagctagcaacccgatatttgatgaacatttgcaacggtaaatggctgtggaaaaatacccgtaaagcctattgctggaacattgtacttacaccttggccttggaacggggaaaaggttggatttgaagatattcgtactaactacacctcacggcaagactttaaaaataataaaaattggtctgctatagttgaaatgatcaaaaccgcattttctagtactgatgggctggcgatatttgaagtcagggccaccttgcacttgccaacgaatgctatggtgcggccaagccaagttttcacagaaaaagaaagtggcagtaaaagtaaatctaaaactcaaaacagtcgagtttttcagagtacaactattgatggtgaacgatcgccaatactaggggcctttaaaacgggagcagctattgcaaccattgacgactggtatcctgaagccactgagccactaagggtcggacggtttggggttcatcgcgaagatgtcacttgctaccgtcatccgtctaccggaaaagattttttctcgatattacaacaagcagagcactatattgaagtgttgagcgccaacaaaactcccgctcaagaaactatcaacgacatgcactttttaatggctaacctgattaagggtgggatgttccagcataaaggagactgactgtgaaatggtattataagacaatcacctttctgccagagttgtgcaacaacgagtcactggctgcaaagtgtctccgcgttctgcatggatttaactatcagtatgagacacgaaatatcggcgtttcatttccgctttggtgtgatgcaacggttggaaaaaagatttcatttgtcagcaagaacaagatagaactcgacttactacttaaacaacactatttcgtccaaatggaacaacttcaatactttcatatatccaacactgttctcgtcccagaagattgtacatacgtttcctttagacgctgtcaatctatagataagctcacagcagcagggctggcaaggaaaatcagacgcctggagaaacgtgctctatctagaggcgagcaatttgacccatcatcttttgctcaaaaagagcatactgcaatagcgcactaccactcacttggggagtccagcaaacagacgaaccgcaactttcgactcaatatcaggatgctctcggagcaaccccgtgaggggaactcgatttttagtagctatggcttatcaaattcagaaaactcgtttcagcctgtacccttaatctgacctttaataaggagatataccatggcgacaagtttacctacgccctcagcaattacgacttcggcgttagagtatgcattccatactcccgctcgcaatctaacgaaatctcgcggaaaaaacattcatcgttatgtcagtgtaaagatgagtaagaggattacggtagaatctactctagagtgtgatgcctgctatcactttgattttgagccaagtattgttcgcttttgcgctcaaccgattcgatttttatattatctcaatggtcagtctcactcctatgttcctgactttctagttcaatttgataccaacgagtttgttctatatgaagtaaagtcagcttatgctaagaacaaacctgattttgatgttgaatgggaggcgaaagtaaaagcagcaactgaactagggctagaattggagcttgttgaagagagtgatattagggatacggttgtattaaataatcttaagcgcatgcatcgttatgcttcgaaagatgagctgaataacgtacataactctctcttaaaaataataaagtacaatggcgcccaatctgcaagatgcttgggagaacagttgggtttaaaaggccgaactgttttaccaattttgtgcgatttgctgtcaaggtgtttactcgatacacgtttggataagcctctatctcttgaatctcgatttgagttggccagttatggctaagaaagggttctcaagtttccatagaaaagcagtctcttcccaagatacgcttgaatcgatagagcttgtctctagcgctaattgtctagaaagtgttacgtatcaagatatatcagcatttcccgaaacaattgcggtagagattaatttccgattaagcattcttcgctttttagcgcgaaagtgcgaaaccattgtggccaaatcaattgaaccacatcgtgtagagctacagcaaaactatagtagaaaaatacccagtgcaataacgatatatcgatggtggcttgcttttcgaaaatcagactacaaccccattagcttagcacctaatatcaaggatagaggtaatagagagacaaaagtgtcaacagttgttgattctattatggaacaggcagttgaaagagttatatctggacgaaaagtcaatgttagctctgcatataaacgtgttcgacgaaaagttcgtcaatacaatctaactcatggaacgaaatacacgtatcctaagtacgaatctgtaagaaagcgagtaaaaaagaaaaccccatttgagttattagccgcagggaaaggggagagagtagctaagagagagtttcgccgaatgggaaaaaagatcctcacgtctagcgtgctagagagggttgaaatagatcacactgtcgttgacctttttgcagtacacgaagagtatcgaatcccattgggccgaccttggcttactcaattggttgattgttacagtaaagctgtaatcggtttttatttaggtttcgagcctcctagctatgtgtcggtttcccttgcacttaagaatgcaatacaacgcaaagatgacttaatctcctcgtatgaatcgatcgagaatgaatggctatgttatggcatcccagacctactcgtaactgataatggtaaagagtttttgtcgaaagcatttgatcaagcatgtgaatcactattgatcaatgtgcatcaaaataaagttgagacgcccgacaacaaacctcatgttgaacgtaactacgggactattaatacttctctgttagacgatttacctgggaaatccttcagccagtaccttcaaagagaagggtacgactctgtgggagaagctacccttacactcaatgagattagagaaatttacttaatttggttggtggatatttatcataaaaaacccaatcagagaggcactaattgtcctaatgttgcgtggaaaaagggttgtcaagaatgggaaccagaggagttctctggttctaaagacgaattagactttaaatttgctattgttgattacaaacaacttactaaagtagggataactgtctacaaagaactgagttatagcaatgaccgtttagctgaatatagagggaagaaaggaaaccataaagttcagttcaagtataaccctgagtgtatggcagttatttgggtgttggatgaggatatgaatgagtactttacagttaatgcgattgactacgaatatgcaagtagagtatcactttggcaacataaatataacatgaaatatcaagcagaactaaattcagcagaatatgatgaggacaaggaaattgatgcagaaataaaaattgaagaaatcgcagatcgttcaattgttaagactaacaaaatcagagctcggaggcgtggcgctaggcatcaagagaatagcgcaagggctaagtcaatcagtaatgcgaacccggcctcgatacaaaaacatgaagatgaaatcgttagtgcagataatgacgattgggatattgattatgtctgagaaatcgtcaaatgagtgaaacgcgtgaggctcgtatatcaagagctaaaagggcatttgtatccacaccgagcgttaggaaaatcttgagttacatggatagatgtagagatctatcagacctagagtctgagcctacatgcatgatggtctatggtgcttcgggtgtaggtaaaacgaccgtcatcaagaaatacttaaatcaaaacagaagagagtccgaagccgggggcgatataataccggttttgcatattgagttgccagacaatgcgaagccagtagatgcagcaagggaattgctggttgaaatgggtgacccgctagcactttatgaaactgacttagctagattgacgaaaagactgactgaattaatccctgcggtcggcgtgaagctgattattatcgatgagttccaacatttggtggaagaaaggtcaaatcgggttcttacccaagtaggtaattggctaaaaatgatacttaacaaaacgaaatgtccaattgttatatttggtatgccatactcaaaagttgtactgcaagcaaactcgcaacttcacgggcgattttccattcaggttgaactgcgcccctttagctaccagggaggtagaggtgtatttaaaacttttttggaataccttgataaagccctaccttttgaaaaacaggctggcttagccaacgaaagtttgcagaaaaaattgtatgcattctctcagggaaacatgcgttcgttgagaaaccttatttatcaagcatctatcgaagcaattgataatcagcatgagacgataaccgaagaagatttcgtttttgcatcgaagttgacatcgggcgataaacccaactcatggaaaaatccttttgaggagggtgttgaggtaacagaagatatgttacgaccgccaccaaaagatattggttgggaggactatttgagacattcaaccccgagagtgagtaaaccaggtagaaataaaaactttttcgaataacctaggctgctgcgctgctgccaccgctgagcaataactagcataaccccttggggcctctaaacgggtcttgaggggttttttgctgaaacctcaggcatttgagaagcacacggtcacactgcttccggtagtcaataaaccggtaaaccagcaatagacataagcggctatttaacgaccctgccctgaaccgacgaccgggtcatcgtggccggatcttgcggcccctcggcttgaacgaattgttagacattatttgccgactaccttggtgatctcgcctttcacgtagtggacaaattcttccaactgatctgcgcgcgaggccaagcgatcttcttcttgtccaagataagcctgtctagcttcaagtatgacgggctgatactgggccggcaggcgctccattgcccagtcggcagcgacatccttcggcgcgattttgccggttactgcgctgtaccaaatgcgggacaacgtaagcactacatttcgctcatcgccagcccagtcgggcggcgagttccatagcgttaaggtttcatttagcgcctcaaatagatcctgttcaggaaccggatcaaagagttcctccgccgctggacctaccaaggcaacgctatgttctcttgcttttgtcagcaagatagccagatcaatgtcgatcgtggctggctcgaagatacctgcaagaatgtcattgcgctgccattctccaaattgcagttcgcgcttagctggataacgccacggaatgatgtcgtcgtgcacaacaatggtgacttctacagcgcggagaatctcgctctctccaggggaagccgaagtttccaaaaggtcgttgatcaaagctcgccgcgttgtttcatcaagccttacggtcaccgtaaccagcaaatcaatatcactgtgtggcttcaggccgccatccactgcggagccgtacaaatgtacggccagcaacgtcggttcgagatggcgctcgatgacgccaactacctctgatagttgagtcgatacttcggcgatcaccgcttccctcatactcttcctttttcaatattattgaagcatttatcagggttattgtctcatgagcggatacatatttgaatgtatttagaaaaataaacaaatagctagctcactcggtcgctacgctccgggcgtgagactgcggcgggcgctgcggacacatacaaagttacccacagattccgtggataagcaggggactaacatgtgaggcaaaacagcagggccgcgccggtggcgtttttccataggctccgccctcctgccagagttcacataaacagacgcttttccggtgcatctgtgggagccgtgaggctcaaccatgaatctgacagtacgggcgaaacccgacaggacttaaagatccccaccgtttccggcgggtcgctccctcttgcgctctcctgttccgaccctgccgtttaccggatacctgttccgcctttctcccttacgggaagtgtggcgctttctcatagctcacacactggtatctcggctcggtgtaggtcgttcgctccaagctgggctgtaagcaagaactccccgttcagcccgactgctgcgccttatccggtaactgttcacttgagtccaacccggaaaagcacggtaaaacgccactggcagcagccattggtaactgggagttcgcagaggatttgtttagctaaacacgcggttgctcttgaagtgtgcgccaaagtccggctacactggaaggacagatttggttgctgtgctctgcgaaagccagttaccacggttaagcagttccccaactgacttaaccttcgatcaaaccacctccccaggtggttttttcgtttacagggcaaaagattacgcgcagaaaaaaaggatctcaagaagatcctttgatcttttctactgaaccgctctagatttcagtgcaatttatctcttcaaatgtagcacctgaagtcagccccatacgatataagttgtaattctcatgttagtcatgccccgcgcccaccggaaggagctgactgggttgaaggctctcaagggcatcggtcgagatcccggtgcctaatgagtgagctaacttacattaattgcgttgcgctcactgcccgctttccagtcgggaaacctgtcgtgccagctgcattaatgaatcggccaacgcgcggggagaggcggtttgcgtattgggcgccagggtggtttttcttttcaccagtgagacgggcaacagctgattgcccttcaccgcctggccctgagagagttgcagcaagcggtccacgctggtttgccccagcaggcgaaaatcctgtttgatggtggttaacggcgggatataacatgagctgtcttcggtatcgtcgtatcccactaccgagatgtccgcaccaacgcgcagcccggactcggtaatggcgcgcattgcgcccagcgccatctgatcgttggcaaccagcatcgcagtgggaacgatgccctcattcagcatttgcatggtttgttgaaaaccggacatggcactccagtcgccttcccgttccgctatcggctgaatttgattgcgagtgagatatttatgccagccagccagacgcagacgcgccgagacagaacttaatgggcccgctaacagcgcgatttgctggtgacccaatgcgaccagatgctccacgcccagtcgcgtaccgtcttcatgggagaaaataatactgttgatgggtgtctggtcagagacatcaagaaataacgccggaacattagtgcaggcagcttccacagcaatggcatcctggtcatccagcggatagttaatgatcagcccactgacgcgttgcgcgagaagattgtgcaccgccgctttacaggcttcgacgccgcttcgttctaccatcgacaccaccacgctggcacccagttgatcggcgcgagatttaatcgccgcgacaatttgcgacggcgcgtgcagggccagactggaggtggcaacgccaatcagcaacgactgtttgcccgccagttgttgtgccacgcggttgggaatgtaattcagctccgccatcgccgcttccactttttcccgcgttttcgcagaaacgtggctggcctggttcaccacgcgggaaacggtctgataagagacaccggcatactctgcgacatcgtataacgttactggtttcac

SEQ ID NO: 853 - DNA, 11975 bp, Synthetic construct
  source 1..11975: mol_type = other DNA
attcaccaccctgaattgactctcttccgggcgctatcatgccataccgcgaaaggttttgcgccattcgatggtgtccgggatctcgacgctctcccttatgcgactcctgcattaggaaattaatacgactcactataggggaattgtgagcggataacaattcccctgtagaaataattttgtttaactttaataaggagatataccatgggtgaactgccgagtaggtagctgataacagtacagcgcggctgaaatcatcattaaagcggtgaactgccgagtaggtagctgataacggatccgaattcgagctcggcgcgcctgcaggtcgacaagcttgcggccgcataatgcttaagtcgaacagaaagtaatcgtattgtacacggccgcataatcgaaattaatacgactcactataggggaattgtgagcggataacaattccccatcttagtatattagttaagtataagaaggagatatacatatgtttttgcaaagacctaaaccttacagcgatgaaagtttagaaagtttctttatccgagtggctaacaaaaatggctacggtgatgtccatcgcttcctagaagccactaaacgattccttcaagacattgaccataatggctatcaaacctttccgactgatataactcggataaacccatactcagctaaaaacagttccagcgcacgaactgcgtcattcctgaaacttgcacaattgacatttaatgaaccgccagagctacttgggttggcaattaacagaacaaacatgaaatactcgccgtcaactagcgcggttgttagaggtgcagaagtctttcctcgcagtttactacggacgcactccatcccctgctgtcctttgtgtctgcgagaaaatggctacgcctcctacctttggcactttcaggggtacgaatactgccacagccataacgtacctttaattaccacttgtagctgtggtaaggagtttgactaccgagtatctgggttaaagggcatttgctgcaaatgcaaggagcctatcaccttaaccagcagggagaacggtcatgaggcagcgtgtactgtttcaaactggcttgctggccatgaatctaaacctctgccaaatcttcctaaaagctaccgatggggtttagttcattggtggatgggtattaaagatagcgagttcgatcacttttcgttcgttcaatttttctcaaactggccaaggtcattccactcgataatcgaagatgaagtagagttcaaccttgagcatgctgttgtcagcacgtctgaattacgactaaaagatcttcttggtcgattgtttttcggttcaattcggttacctgagcggaatcttcaacacaatatcatccttggtgagcttctctgctatttagaaaatcgtttatggcaagacaagggattaatcgccaacctcaaaatgaacgcgttagaggcgactgtaatgttaaattgtagcctcgatcagattgcatcaatggttgaacaacgcatcttgaagccaaatcgaaaaagcaagcccaacagccctcttgatgttaccgattatctatttcatttcggcgatattttctgtctttggttagctgagttccaaagcgatgagtttaaccgttcgttttatgtgtcgaggtggtaaatgcaaactctgaaagaactaatcgcatccaatcctgacgacttaacaactgaacttaagagagcatttcgtccactcacaccgcatattgcaattgatggtaatgaacttgacgcactgacgatattagtcaatttaaccgataagactgatgatcagaaagacctgctcgatcgagccaaatgcaagcaaaaacttcgagatgaaaaatggtgggctagctgcataaattgcgttaattacagacaaagccataacccaaaattcccggatatacgttctgaaggcgtgattcgaacccaagccctgggtgaattaccgagtttcctactctcgtcctcaaaaatcccaccataccattggtcatatagccatgattcaaaatacgtcaacaaaagcgcattcctcaccaatgagttttgttgggatggtgagatctcatgtttgggtgagcttcttaaagatgcagatcacccactttggaatactttgaaaaagttaggttgttctcaaaaaacttgcaaagcaatggcaaaacaactagctgatattactctcacgactatcaatgtcacactcgcaccaaattacctgactcaaatatctctccccgatagtgatacatcctacatttcactctctcctgttgcatcgctatcgatgcaaagccactttcatcagaggctccaagatgaaaatcggcatagcgcgataacgcggtttagccgaactaccaacatgggggtcactgcgatgacatgtggcggcgcatttagaatgttaaagtctggcgctaagttttccagcccccctcatcaccgattaaacagtaaacgaagttggttgacgtcagagcatgttcagtcattaaaacagtaccagcgcctcaacaaaagcctcatacctgaaaactctcggattgcactccgtagaaaatacaaaatcgagcttcaaaatatggtcagatcttggtttgcaatgcaagaccatacccttgattcgaacatacttatccaacatttgaatcatgacctatcttacttaggagccacaaaacgttttgcatacgatccagcgatgaccaagctctttactgagcttttgaaacgagagttatcaaattcaatcaataatggtgagcaacacactaatggatcgtttttagtcctaccgaatatcagggtttgtggcgcaacagctttaagctccccggtaacggtggggattccatcacttacagctttctttggcttcgttcacgcatttgaacggaatataaatcgcaccacctcatcgtttcgtgttgaatcctttgcgatatgcgtccatcaactacatgtcgagaagcgaggtttgacagcagagtttgtggaaaaaggcgacgggactatatccgctcccgcgacccgggatgactggcagtgtgatgtcgtatttagccttattttgaacaccaactttgctcaacatattgaccaagatacgttagttacatcactaccaaagcgattggctcggggttcagcaaaaattgcgattgatgactttaaacatatcaactcattctcgacattagaaacagcgatcgaatctctgccaatagaagctggtaggtggttatcactttacgcacagtcaaacaataatctaagtgatctattagcagccatgacagaggaccatcagctcatggcaagctgcgtcggttaccacttgttagaagagcccaaagataaaccaaactccctcagaggttacaaacacgctatcgccgagtgcatcattggactcattaactcaatcacctttagctcagagactgatcccaacacaatcttttggtcgctaaagaactatcaaaactacctagtggtacagccaaggagtatcaacgatgaaactaccgacaaatctagcctatgagcgctctatcgacccatcagatgtctgtttttttgtcgtctggcccgatgatagaaaaacacctttaacctacaattctcgtactctgctcgggcaaatggaagcggcatcattagcctatgatgtctcaggtcaaccaataaaaagtgccaccgctgaggcgttagctcaagggaaccctcatcaagttgatttctgccacgttccatacggtgcgagtcatattgaatgcagtttctccgtctcgttttcttctgaactacgtcaaccatataagtgtaactcaagcaaagttaaacaaacgctagtgcaattagtcgagctctacgaaacgaaaatcggctggactgagctagcaacccgatatttgatgaacatttgcaacggtaaatggctgtggaaaaatacccgtaaagcctattgctggaacattgtacttacaccttggccttggaacggggaaaaggttggatttgaagatattcgtactaactacacctcacggcaagactttaaaaataataaaaattggtctgctatagttgaaatgatcaaaaccgcattttctagtactgatgggctggcgatatttgaagtcagggccaccttgcacttgccaacgaatgctatggtgcggccaagccaagttttcacagaaaaagaaagtggcagtaaaagtaaatctaaaactcaaaacagtcgagtttttcagagtacaactattgatggtgaacgatcgccaatactaggggcctttaaaacgggagcagctattgcaaccattgacgactggtatcctgaagccactgagccactaagggtcggacggtttggggttcatcgcgaagatgtcacttgctaccgtcatccgtctaccggaaaagattttttctcgatattacaacaagcagagcactatattgaagtgttgagcgccaacaaaactcccgctcaagaaactatcaacgacatgcactttttaatggctaacctgattaagggtgggatgttccagcataaaggagactgactgtgaaatggtattataagacaatcacctttctgccagagttgtgcaacaacgagtcactggctgcaaagtgtctccgcgttctgcatggatttaactatcagtatgagacacgaaatatcggcgtttcatttccgctttggtgtgatgcaacggttggaaaaaagatttcatttgtcagcaagaacaagatagaactcgacttactacttaaacaacactatttcgtccaaatggaacaacttcaatactttcatatatccaacactgttctcgtcccagaagattgtacatacgtttcctttagacgctgtcaatctatagataagctcacagcagcagggctggcaaggaaaatcagacgcctggagaaacgtgctctatctagaggcgagcaatttgacccatcatcttttgctcaaaaagagcatactgcaatagcgcactaccactcacttggggagtccagcaaacagacgaaccgcaactttcgactcaatatcaggatgctctcggagcaaccccgtgaggggaactcgatttttagtagctatggcttatcaaattcagaaaactcgtttcagcctgtacccttaatctgacctttaataaggagatataccatggcgacaagtttacctacgccctcagcaattacgacttcggcgttagagtatgcattccatactcccgctcgcaatctaacgaaatctcgcggaaaaaacattcatcgttatgtcagtgtaaagatgagtaagaggattacggtagaatctactctagagtgtgatgcctgctatcactttgattttgagccaagtattgttcgcttttgcgctcaaccgattcgatttttatattatctcaatggtcagtctcactcctatgttcctgactttctagttcaatttgataccaacgagtttgttctatatgaagtaaagtcagcttatgctaagaacaaacctgattttgatgttgaatgggaggcgaaagtaaaagcagcaactgaactagggctagaattggagcttgttgaagagagtgatattagggatacggttgtattaaataatcttaagcgcatgcatcgttatgcttcgaaagatgagctgaataacgtacataactctctcttaaaaataataaagtacaatggcgcccaatctgcaagatgcttgggagaacagttgggtttaaaaggccgaactgttttaccaattttgtgcgatttgctgtcaaggtgtttactcgatacacgtttggataagcctctatctcttgaatctcgatttgagttggccagttatggctaagaaagggttctcaagtttccatagaaaagcagtctcttcccaagatacgcttgaatcgatagagcttgtctctagcgctaattgtctagaaagtgttacgtatcaagatatatcagcatttcccgaaacaattgcggtagagattaatttccgattaagcattcttcgctttttagcgcgaaagtgcgaaaccattgtggccaaatcaattgaaccacatcgtgtagagctacagcaaaactatagtagaaaaatacccagtgcaataacgatatatcgatggtggcttgcttttcgaaaatcagactacaaccccattagcttagcacctaatatcaaggatagaggtaatagagagacaaaagtgtcaacagttgttgattctattatggaacaggcagttgaaagagttatatctggacgaaaagtcaatgttagctctgcatataaacgtgttcgacgaaaagttcgtcaatacaatctaactcatggaacgaaatacacgtatcctaagtacgaatctgtaagaaagcgagtaaaaaagaaaaccccatttgagttattagccgcagggaaaggggagagagtagctaagagagagtttcgccgaatgggaaaaaagatcctcacgtctagcgtgctagagagggttgaaatagatcacactgtcgttgacctttttgcagtacacgaagagtatcgaatcccattgggccgaccttggcttactcaattggttgattgttacagtaaagctgtaatcggtttttatttaggtttcgagcctcctagctatgtgtcggtttcccttgcacttaagaatgcaatacaacgcaaagatgacttaatctcctcgtatgaatcgatcgagaatgaatggctatgttatggcatcccagacctactcgtaactgataatggtaaagagtttttgtcgaaagcatttgatcaagcatgtgaatcactattgatcaatgtgcatcaaaataaagttgagacgcccgacaacaaacctcatgttgaacgtaactacgggactattaatacttctctgttagacgatttacctgggaaatccttcagccagtaccttcaaagagaagggtacgactctgtgggagaagctacccttacactcaatgagattagagaaatttacttaatttggttggtggatatttatcataaaaaacccaatcagagaggcactaattgtcctaatgttgcgtggaaaaagggttgtcaagaatgggaaccagaggagttctctggttctaaagacgaattagactttaaatttgctattgttgattacaaacaacttactaaagtagggataactgtctacaaagaactgagttatagcaatgaccgtttagctgaatatagagggaagaaaggaaaccataaagttcagttcaagtataaccctgagtgtatggcagttatttgggtgttggatgaggatatgaatgagtactttacagttaatgcgattgactacgaatatgcaagtagagtatcactttggcaacataaatataacatgaaatatcaagcagaactaaattcagcagaatatgatgaggacaaggaaattgatgcagaaataaaaattgaagaaatcgcagatcgttcaattgttaagactaacaaaatcagagctcggaggcgtggcgctaggcatcaagagaatagcgcaagggctaagtcaatcagtaatgcgaacccggcctcgatacaaaaacatgaagatgaaatcgttagtgcagataatgacgattgggatattgattatgtctgagaaatcgtcaaatgagtgaaacgcgtgaggctcgtatatcaagagctaaaagggcatttgtatccacaccgagcgttaggaaaatcttgagttacatggatagatgtagagatctatcagacctagagtctgagcctacatgcatgatggtctatggtgcttcgggtgtaggtaaaacgaccgtcatcaagaaatacttaaatcaaaacagaagagagtccgaagccgggggcgatataataccggttttgcatattgagttgccagacaatgcgaagccagtagatgcagcaagggaattgctggttgaaatgggtgacccgctagcactttatgaaactgacttagctagattgacgaaaagactgactgaattaatccctgcggtcggcgtgaagctgattattatcgatgagttccaacatttggtggaagaaaggtcaaatcgggttcttacccaagtaggtaattggctaaaaatgatacttaacaaaacgaaatgtccaattgttatatttggtatgccatactcaaaagttgtactgcaagcaaactcgcaacttcacgggcgattttccattcaggttgaactgcgcccctttagctaccagggaggtagaggtgtatttaaaacttttttggaataccttgataaagccctaccttttgaaaaacaggctggcttagccaacgaaagtttgcagaaaaaattgtatgcattctctcagggaaacatgcgttcgttgagaaaccttatttatcaagcatctatcgaagcaattgataatcagcatgagacgataaccgaagaagatttcgtttttgcatcgaagttgacatcgggcgataaacccaactcatggaaaaatccttttgaggagggtgttgaggtaacagaagatatgttacgaccgccaccaaaagatattggttgggaggactatttgagacattcaaccccgagagtgagtaaaccaggtagaaataaaaactttttcgaataacctaggctgctgcgctgctgccaccgctgagcaataactagcataaccccttggggcctctaaacgggtcttgaggggttttttgctgaaacctcaggcatttgagaagcacacggtcacactgcttccggtagtcaataaaccggtaaaccagcaatagacataagcggctatttaacgaccctgccctgaaccgacgaccgggtcatcgtggccggatcttgcggcccctcggcttgaacgaattgttagacattatttgccgactaccttggtgatctcgcctttcacgtagtggacaaattcttccaactgatctgcgcgcgaggccaagcgatcttcttcttgtccaagataagcctgtctagcttcaagtatgacgggctgatactgggccggcaggcgctccattgcccagtcggcagcgacatccttcggcgcgattttgccggttactgcgctgtaccaaatgcgggacaacgtaagcactacatttcgctcatcgccagcccagtcgggcggcgagttccatagcgttaaggtttcatttagcgcctcaaatagatcctgttcaggaaccggatcaaagagttcctccgccgctggacctaccaaggcaacgctatgttctcttgcttttgtcagcaagatagccagatcaatgtcgatcgtggctggctcgaagatacctgcaagaatgtcattgcgctgccattctccaaattgcagttcgcgcttagctggataacgccacggaatgatgtcgtcgtgcacaacaatggtgacttctacagcgcggagaatctcgctctctccaggggaagccgaagtttccaaaaggtcgttgatcaaagctcgccgcgttgtttcatcaagccttacggtcaccgtaaccagcaaatcaatatcactgtgtggcttcaggccgccatccactgcggagccgtacaaatgtacggccagcaacgtcggttcgagatggcgctcgatgacgccaactacctctgatagttgagtcgatacttcggcgatcaccgcttccctcatactcttcctttttcaatattattgaagcatttatcagggttattgtctcatgagcggatacatatttgaatgtatttagaaaaataaacaaatagctagctcactcggtcgctacgctccgggcgtgagactgcggcgggcgctgcggacacatacaaagttacccacagattccgtggataagcaggggactaacatgtgaggcaaaacagcagggccgcgccggtggcgtttttccataggctccgccctcctgccagagttcacataaacagacgcttttccggtgcatctgtgggagccgtgaggctcaaccatgaatctgacagtacgggcgaaacccgacaggacttaaagatccccaccgtttccggcgggtcgctccctcttgcgctctcctgttccgaccctgccgtttaccggatacctgttccgcctttctcccttacgggaagtgtggcgctttctcatagctcacacactggtatctcggctcggtgtaggtcgttcgctccaagctgggctgtaagcaagaactccccgttcagcccgactgctgcgccttatccggtaactgttcacttgagtccaacccggaaaagcacggtaaaacgccactggcagcagccattggtaactgggagttcgcagaggatttgtttagctaaacacgcggttgctcttgaagtgtgcgccaaagtccggctacactggaaggacagatttggttgctgtgctctgcgaaagccagttaccacggttaagcagttccccaactgacttaaccttcgatcaaaccacctccccaggtggttttttcgtttacagggcaaaagattacgcgcagaaaaaaaggatctcaagaagatcctttgatcttttctactgaaccgctctagatttcagtgcaatttatctcttcaaatgtagcacctgaagtcagccccatacgatataagttgtaattctcatgttagtcatgccccgcgcccaccggaaggagctgactgggttgaaggctctcaagggcatcggtcgagatcccggtgcctaatgagtgagctaacttacattaattgcgttgcgctcactgcccgctttccagtcgggaaacctgtcgtgccagctgcattaatgaatcggccaacgcgcggggagaggcggtttgcgtattgggcgccagggtggtttttcttttcaccagtgagacgggcaacagctgattgcccttcaccgcctggccctgagagagttgcagcaagcggtccacgctggtttgccccagcaggcgaaaatcctgtttgatggtggttaacggcgggatataacatgagctgtcttcggtatcgtcgtatcccactaccgagatgtccgcaccaacgcgcagcccggactcggtaatggcgcgcattgcgcccagcgccatctgatcgttggcaaccagcatcgcagtgggaacgatgccctcattcagcatttgcatggtttgttgaaaaccggacatggcactccagtcgccttcccgttccgctatcggctgaatttgattgcgagtgagatatttatgccagccagccagacgcagacgcgccgagacagaacttaatgggcccgctaacagcgcgatttgctggtgacccaatgcgaccagatgctccacgcccagtcgcgtaccgtcttcatgggagaaaataatactgttgatgggtgtctggtcagagacatcaagaaataacgccggaacattagtgcaggcagcttccacagcaatggcatcctggtcatccagcggatagttaatgatcagcccactgacgcgttgcgcgagaagattgtgcaccgccgctttacaggcttcgacgccgcttcgttctaccatcgacaccaccacgctggcacccagttgatcggcgcgagatttaatcgccgcgacaatttgcgacggcgcgtgcagggccagactggaggtggcaacgccaatcagcaacgactgtttgcccgccagttgttgtgccacgcggttgggaatgtaattcagctccgccatcgccgcttccactttttcccgcgttttcgcagaaacgtggctggcctggttcaccacgcgggaaacggtctgataagagacaccggcatactctgcgacatcgtataacgttactggtttcac

SEQ ID NO: 854 - DNA, 11812 bp, Synthetic construct
  source 1..11812: mol_type = other DNA
attcaccaccctgaattgactctcttccgggcgctatcatgccataccgcgaaaggttttgcgccattcgatggtgtccgggatctcgacgctctcccttatgcgactcctgcattaggaaattaatacgactcactataggggaattgtgagcggataacaattcccctgtagaaataattttgtttaactttaataaggagatataccatgggtgaactgccgagtaggtagctgataacgagacctctgtcttgtcagctagggtggtctcgtgaactgccgagtaggtagctgataacggatccgaattcgagcgaaggagatatacatatgtttttgcaaagacctaaaccttacagcgatgaaagtttagaaagtttctttatccgagtggctaacaaaaatggctacggtgatgtccatcgcttcctagaagccactaaacgattccttcaagacattgaccataatggctatcaaacctttccgactgatataactcggataaacccatactcagctaaaaacagttccagcgcacgaactgcgtcattcctgaaacttgcacaattgacatttaatgaaccgccagagctacttgggttggcaattaacagaacaaacatgaaatactcgccgtcaactagcgcggttgttagaggtgcagaagtctttcctcgcagtttactacggacgcactccatcccctgctgtcctttgtgtctgcgagaaaatggctacgcctcctacctttggcactttcaggggtacgaatactgccacagccataacgtacctttaattaccacttgtagctgtggtaaggagtttgactaccgagtatctgggttaaagggcatttgctgcaaatgcaaggagcctatcaccttaaccagcagggagaacggtcatgaggcagcgtgtactgtttcaaactggcttgctggccatgaatctaaacctctgccaaatcttcctaaaagctaccgatggggtttagttcattggtggatgggtattaaagatagcgagttcgatcacttttcgttcgttcaatttttctcaaactggccaaggtcattccactcgataatcgaagatgaagtagagttcaaccttgagcatgctgttgtcagcacgtctgaattacgactaaaagatcttcttggtcgattgtttttcggttcaattcggttacctgagcggaatcttcaacacaatatcatccttggtgagcttctctgctatttagaaaatcgtttatggcaagacaagggattaatcgccaacctcaaaatgaacgcgttagaggcgactgtaatgttaaattgtagcctcgatcagattgcatcaatggttgaacaacgcatcttgaagccaaatcgaaaaagcaagcccaacagccctcttgatgttaccgattatctatttcatttcggcgatattttctgtctttggttagctgagttccaaagcgatgagtttaaccgttcgttttatgtgtcgaggtggtaaatgcaaactctgaaagaactaatcgcatccaatcctgacgacttaacaactgaacttaagagagcatttcgtccactcacaccgcatattgcaattgatggtaatgaacttgacgcactgacgatattagtcaatttaaccgataagactgatgatcagaaagacctgctcgatcgagccaaatgcaagcaaaaacttcgagatgaaaaatggtgggctagctgcataaattgcgttaattacagacaaagccataacccaaaattcccggatatacgttctgaaggcgtgattcgaacccaagccctgggtgaattaccgagtttcctactctcgtcctcaaaaatcccaccataccattggtcatatagccatgattcaaaatacgtcaacaaaagcgcattcctcaccaatgagttttgttgggatggtgagatctcatgtttgggtgagcttcttaaagatgcagatcacccactttggaatactttgaaaaagttaggttgttctcaaaaaacttgcaaagcaatggcaaaacaactagctgatattactctcacgactatcaatgtcacactcgcaccaaattacctgactcaaatatctctccccgatagtgatacatcctacatttcactctctcctgttgcatcgctatcgatgcaaagccactttcatcagaggctccaagatgaaaatcggcatagcgcgataacgcggtttagccgaactaccaacatgggggtcactgcgatgacatgtggcggcgcatttagaatgttaaagtctggcgctaagttttccagcccccctcatcaccgattaaacagtaaacgaagttggttgacgtcagagcatgttcagtcattaaaacagtaccagcgcctcaacaaaagcctcatacctgaaaactctcggattgcactccgtagaaaatacaaaatcgagcttcaaaatatggtcagatcttggtttgcaatgcaagaccatacccttgattcgaacatacttatccaacatttgaatcatgacctatcttacttaggagccacaaaacgttttgcatacgatccagcgatgaccaagctctttactgagcttttgaaacgagagttatcaaattcaatcaataatggtgagcaacacactaatggatcgtttttagtcctaccgaatatcagggtttgtggcgcaacagctttaagctccccggtaacggtggggattccatcacttacagctttctttggcttcgttcacgcatttgaacggaatataaatcgcaccacctcatcgtttcgtgttgaatcctttgcgatatgcgtccatcaactacatgtcgagaagcgaggtttgacagcagagtttgtggaaaaaggcgacgggactatatccgctcccgcgacccgggatgactggcagtgtgatgtcgtatttagccttattttgaacaccaactttgctcaacatattgaccaagatacgttagttacatcactaccaaagcgattggctcggggttcagcaaaaattgcgattgatgactttaaacatatcaactcattctcgacattagaaacagcgatcgaatctctgccaatagaagctggtaggtggttatcactttacgcacagtcaaacaataatctaagtgatctattagcagccatgacagaggaccatcagctcatggcaagctgcgtcggttaccacttgttagaagagcccaaagataaaccaaactccctcagaggttacaaacacgctatcgccgagtgcatcattggactcattaactcaatcacctttagctcagagactgatcccaacacaatcttttggtcgctaaagaactatcaaaactacctagtggtacagccaaggagtatcaacgatgaaactaccgacaaatctagcctatgagcgctctatcgacccatcagatgtctgtttttttgtcgtctggcccgatgatagaaaaacacctttaacctacaattctcgtactctgctcgggcaaatggaagcggcatcattagcctatgatgtctcaggtcaaccaataaaaagtgccaccgctgaggcgttagctcaagggaaccctcatcaagttgatttctgccacgttccatacggtgcgagtcatattgaatgcagtttctccgtctcgttttcttctgaactacgtcaaccatataagtgtaactcaagcaaagttaaacaaacgctagtgcaattagtcgagctctacgaaacgaaaatcggctggactgagctagcaacccgatatttgatgaacatttgcaacggtaaatggctgtggaaaaatacccgtaaagcctattgctggaacattgtacttacaccttggccttggaacggggaaaaggttggatttgaagatattcgtactaactacacctcacggcaagactttaaaaataataaaaattggtctgctatagttgaaatgatcaaaaccgcattttctagtactgatgggctggcgatatttgaagtcagggccaccttgcacttgccaacgaatgctatggtgcggccaagccaagttttcacagaaaaagaaagtggcagtaaaagtaaatctaaaactcaaaacagtcgagtttttcagagtacaactattgatggtgaacgatcgccaatactaggggcctttaaaacgggagcagctattgcaaccattgacgactggtatcctgaagccactgagccactaagggtcggacggtttggggttcatcgcgaagatgtcacttgctaccgtcatccgtctaccggaaaagattttttctcgatattacaacaagcagagcactatattgaagtgttgagcgccaacaaaactcccgctcaagaaactatcaacgacatgcactttttaatggctaacctgattaagggtgggatgttccagcataaaggagactgactgtgaaatggtattataagacaatcacctttctgccagagttgtgcaacaacgagtcactggctgcaaagtgtctccgcgttctgcatggatttaactatcagtatgagacacgaaatatcggcgtttcatttccgctttggtgtgatgcaacggttggaaaaaagatttcatttgtcagcaagaacaagatagaactcgacttactacttaaacaacactatttcgtccaaatggaacaacttcaatactttcatatatccaacactgttctcgtcccagaagattgtacatacgtttcctttagacgctgtcaatctatagataagctcacagcagcagggctggcaaggaaaatcagacgcctggagaaacgtgctctatctagaggcgagcaatttgacccatcatcttttgctcaaaaagagcatactgcaatagcgcactaccactcacttggggagtccagcaaacagacgaaccgcaactttcgactcaatatcaggatgctctcggagcaaccccgtgaggggaactcgatttttagtagctatggcttatcaaattcagaaaactcgtttcagcctgtacccttaatctgacctttaataaggagatataccatggcgacaagtttacctacgccctcagcaattacgacttcggcgttagagtatgcattccatactcccgctcgcaatctaacgaaatctcgcggaaaaaacattcatcgttatgtcagtgtaaagatgagtaagaggattacggtagaatctactctagagtgtgatgcctgctatcactttgattttgagccaagtattgttcgcttttgcgctcaaccgattcgatttttatattatctcaatggtcagtctcactcctatgttcctgactttctagttcaatttgataccaacgagtttgttctatatgaagtaaagtcagcttatgctaagaacaaacctgattttgatgttgaatgggaggcgaaagtaaaagcagcaactgaactagggctagaattggagcttgttgaagagagtgatattagggatacggttgtattaaataatcttaagcgcatgcatcgttatgcttcgaaagatgagctgaataacgtacataactctctcttaaaaataataaagtacaatggcgcccaatctgcaagatgcttgggagaacagttgggtttaaaaggccgaactgttttaccaattttgtgcgatttgctgtcaaggtgtttactcgatacacgtttggataagcctctatctcttgaatctcgatttgagttggccagttatggctaagaaagggttctcaagtttccatagaaaagcagtctcttcccaagatacgcttgaatcgatagagcttgtctctagcgctaattgtctagaaagtgttacgtatcaagatatatcagcatttcccgaaacaattgcggtagagattaatttccgattaagcattcttcgctttttagcgcgaaagtgcgaaaccattgtggccaaatcaattgaaccacatcgtgtagagctacagcaaaactatagtagaaaaatacccagtgcaataacgatatatcgatggtggcttgcttttcgaaaatcagactacaaccccattagcttagcacctaatatcaaggatagaggtaatagagagacaaaagtgtcaacagttgttgattctattatggaacaggcagttgaaagagttatatctggacgaaaagtcaatgttagctctgcatataaacgtgttcgacgaaaagttcgtcaatacaatctaactcatggaacgaaatacacgtatcctaagtacgaatctgtaagaaagcgagtaaaaaagaaaaccccatttgagttattagccgcagggaaaggggagagagtagctaagagagagtttcgccgaatgggaaaaaagatcctcacgtctagcgtgctagagagggttgaaatagatcacactgtcgttgacctttttgcagtacacgaagagtatcgaatcccattgggccgaccttggcttactcaattggttgattgttacagtaaagctgtaatcggtttttatttaggtttcgagcctcctagctatgtgtcggtttcccttgcacttaagaatgcaatacaacgcaaagatgacttaatctcctcgtatgaatcgatcgagaatgaatggctatgttatggcatcccagacctactcgtaactgataatggtaaagagtttttgtcgaaagcatttgatcaagcatgtgaatcactattgatcaatgtgcatcaaaataaagttgagacgcccgacaacaaacctcatgttgaacgtaactacgggactattaatacttctctgttagacgatttacctgggaaatccttcagccagtaccttcaaagagaagggtacgactctgtgggagaagctacccttacactcaatgagattagagaaatttacttaatttggttggtggatatttatcataaaaaacccaatcagagaggcactaattgtcctaatgttgcgtggaaaaagggttgtcaagaatgggaaccagaggagttctctggttctaaagacgaattagactttaaatttgctattgttgattacaaacaacttactaaagtagggataactgtctacaaagaactgagttatagcaatgaccgtttagctgaatatagagggaagaaaggaaaccataaagttcagttcaagtataaccctgagtgtatggcagttatttgggtgttggatgaggatatgaatgagtactttacagttaatgcgattgactacgaatatgcaagtagagtatcactttggcaacataaatataacatgaaatatcaagcagaactaaattcagcagaatatgatgaggacaaggaaattgatgcagaaataaaaattgaagaaatcgcagatcgttcaattgttaagactaacaaaatcagagctcggaggcgtggcgctaggcatcaagagaatagcgcaagggctaagtcaatcagtaatgcgaacccggcctcgatacaaaaacatgaagatgaaatcgttagtgcagataatgacgattgggatattgattatgtctgagaaatcgtcaaatgagtgaaacgcgtgaggctcgtatatcaagagctaaaagggcatttgtatccacaccgagcgttaggaaaatcttgagttacatggatagatgtagagatctatcagacctagagtctgagcctacatgcatgatggtctatggtgcttcgggtgtaggtaaaacgaccgtcatcaagaaatacttaaatcaaaacagaagagagtccgaagccgggggcgatataataccggttttgcatattgagttgccagacaatgcgaagccagtagatgcagcaagggaattgctggttgaaatgggtgacccgctagcactttatgaaactgacttagctagattgacgaaaagactgactgaattaatccctgcggtcggcgtgaagctgattattatcgatgagttccaacatttggtggaagaaaggtcaaatcgggttcttacccaagtaggtaattggctaaaaatgatacttaacaaaacgaaatgtccaattgttatatttggtatgccatactcaaaagttgtactgcaagcaaactcgcaacttcacgggcgattttccattcaggttgaactgcgcccctttagctaccagggaggtagaggtgtatttaaaacttttttggaataccttgataaagccctaccttttgaaaaacaggctggcttagccaacgaaagtttgcagaaaaaattgtatgcattctctcagggaaacatgcgttcgttgagaaaccttatttatcaagcatctatcgaagcaattgataatcagcatgagacgataaccgaagaagatttcgtttttgcatcgaagttgacatcgggcgataaacccaactcatggaaaaatccttttgaggagggtgttgaggtaacagaagatatgttacgaccgccaccaaaagatattggttgggaggactatttgagacattcaaccccgagagtgagtaaaccaggtagaaataaaaactttttcgaataacctaggctgctgcgctgctgccaccgctgagcaataactagcataaccccttggggcctctaaacgggtcttgaggggttttttgctgaaacctcaggcatttgagaagcacacggtcacactgcttccggtagtcaataaaccggtaaaccagcaatagacataagcggctatttaacgaccctgccctgaaccgacgaccgggtcatcgtggccggatcttgcggcccctcggcttgaacgaattgttagacattatttgccgactaccttggtgatctcgcctttcacgtagtggacaaattcttccaactgatctgcgcgcgaggccaagcgatcttcttcttgtccaagataagcctgtctagcttcaagtatgacgggctgatactgggccggcaggcgctccattgcccagtcggcagcgacatccttcggcgcgattttgccggttactgcgctgtaccaaatgcgggacaacgtaagcactacatttcgctcatcgccagcccagtcgggcggcgagttccatagcgttaaggtttcatttagcgcctcaaatagatcctgttcaggaaccggatcaaagagttcctccgccgctggacctaccaaggcaacgctatgttctcttgcttttgtcagcaagatagccagatcaatgtcgatcgtggctggctcgaagatacctgcaagaatgtcattgcgctgccattctccaaattgcagttcgcgcttagctggataacgccacggaatgatgtcgtcgtgcacaacaatggtgacttctacagcgcggagaatctcgctctctccaggggaagccgaagtttccaaaaggtcgttgatcaaagctcgccgcgttgtttcatcaagccttacggtcaccgtaaccagcaaatcaatatcactgtgtggcttcaggccgccatccactgcggagccgtacaaatgtacggccagcaacgtcggttcgagatggcgctcgatgacgccaactacctctgatagttgagtcgatacttcggcgatcaccgcttccctcatactcttcctttttcaatattattgaagcatttatcagggttattgtctcatgagcggatacatatttgaatgtatttagaaaaataaacaaatagctagctcactcggtcgctacgctccgggcgtgagactgcggcgggcgctgcggacacatacaaagttacccacagattccgtggataagcaggggactaacatgtgaggcaaaacagcagggccgcgccggtggcgtttttccataggctccgccctcctgccagagttcacataaacagacgcttttccggtgcatctgtgggagccgtgaggctcaaccatgaatctgacagtacgggcgaaacccgacaggacttaaagatccccaccgtttccggcgggtcgctccctcttgcgctctcctgttccgaccctgccgtttaccggatacctgttccgcctttctcccttacgggaagtgtggcgctttctcatagctcacacactggtatctcggctcggtgtaggtcgttcgctccaagctgggctgtaagcaagaactccccgttcagcccgactgctgcgccttatccggtaactgttcacttgagtccaacccggaaaagcacggtaaaacgccactggcagcagccattggtaactgggagttcgcagaggatttgtttagctaaacacgcggttgctcttgaagtgtgcgccaaagtccggctacactggaaggacagatttggttgctgtgctctgcgaaagccagttaccacggttaagcagttccccaactgacttaaccttcgatcaaaccacctccccaggtggttttttcgtttacagggcaaaagattacgcgcagaaaaaaaggatctcaagaagatcctttgatcttttctactgaaccgctctagatttcagtgcaatttatctcttcaaatgtagcacctgaagtcagccccatacgatataagttgtaattctcatgttagtcatgccccgcgcccaccggaaggagctgactgggttgaaggctctcaagggcatcggtcgagatcccggtgcctaatgagtgagctaacttacattaattgcgttgcgctcactgcccgctttccagtcgggaaacctgtcgtgccagctgcattaatgaatcggccaacgcgcggggagaggcggtttgcgtattgggcgccagggtggtttttcttttcaccagtgagacgggcaacagctgattgcccttcaccgcctggccctgagagagttgcagcaagcggtccacgctggtttgccccagcaggcgaaaatcctgtttgatggtggttaacggcgggatataacatgagctgtcttcggtatcgtcgtatcccactaccgagatgtccgcaccaacgcgcagcccggactcggtaatggcgcgcattgcgcccagcgccatctgatcgttggcaaccagcatcgcagtgggaacgatgccctcattcagcatttgcatggtttgttgaaaaccggacatggcactccagtcgccttcccgttccgctatcggctgaatttgattgcgagtgagatatttatgccagccagccagacgcagacgcgccgagacagaacttaatgggcccgctaacagcgcgatttgctggtgacccaatgcgaccagatgctccacgcccagtcgcgtaccgtcttcatgggagaaaataatactgttgatgggtgtctggtcagagacatcaagaaataacgccggaacattagtgcaggcagcttccacagcaatggcatcctggtcatccagcggatagttaatgatcagcccactgacgcgttgcgcgagaagattgtgcaccgccgctttacaggcttcgacgccgcttcgttctaccatcgacaccaccacgctggcacccagttgatcggcgcgagatttaatcgccgcgacaatttgcgacggcgcgtgcagggccagactggaggtggcaacgccaatcagcaacgactgtttgcccgccagttgttgtgccacgcggttgggaatgtaattcagctccgccatcgccgcttccactttttcccgcgttttcgcagaaacgtggctggcctggttcaccacgcgggaaacggtctgataagagacaccggcatactctgcgacatcgtataacgttactggtttcac

SEQ ID NO: 855 - DNA, 11812 bp, Synthetic construct
  source 1..11812: mol_type = other DNA
attcaccaccctgaattgactctcttccgggcgctatcatgccataccgcgaaaggttttgcgccattcgatggtgtccgggatctcgacgctctcccttatgcgactcctgcattaggaaattaatacgactcactataggggaattgtgagcggataacaattcccctgtagaaataattttgtttaactttaataaggagatataccatgggtgaactgccgagtaggtagctgataacagtacagcgcggctgaaatcatcattaaagcggtgaactgccgagtaggtagctgataacggatccgaattcgagcgaaggagatatacatatgtttttgcaaagacctaaaccttacagcgatgaaagtttagaaagtttctttatccgagtggctaacaaaaatggctacggtgatgtccatcgcttcctagaagccactaaacgattccttcaagacattgaccataatggctatcaaacctttccgactgatataactcggataaacccatactcagctaaaaacagttccagcgcacgaactgcgtcattcctgaaacttgcacaattgacatttaatgaaccgccagagctacttgggttggcaattaacagaacaaacatgaaatactcgccgtcaactagcgcggttgttagaggtgcagaagtctttcctcgcagtttactacggacgcactccatcccctgctgtcctttgtgtctgcgagaaaatggctacgcctcctacctttggcactttcaggggtacgaatactgccacagccataacgtacctttaattaccacttgtagctgtggtaaggagtttgactaccgagtatctgggttaaagggcatttgctgcaaatgcaaggagcctatcaccttaaccagcagggagaacggtcatgaggcagcgtgtactgtttcaaactggcttgctggccatgaatctaaacctctgccaaatcttcctaaaagctaccgatggggtttagttcattggtggatgggtattaaagatagcgagttcgatcacttttcgttcgttcaatttttctcaaactggccaaggtcattccactcgataatcgaagatgaagtagagttcaaccttgagcatgctgttgtcagcacgtctgaattacgactaaaagatcttcttggtcgattgtttttcggttcaattcggttacctgagcggaatcttcaacacaatatcatccttggtgagcttctctgctatttagaaaatcgtttatggcaagacaagggattaatcgccaacctcaaaatgaacgcgttagaggcgactgtaatgttaaattgtagcctcgatcagattgcatcaatggttgaacaacgcatcttgaagccaaatcgaaaaagcaagcccaacagccctcttgatgttaccgattatctatttcatttcggcgatattttctgtctttggttagctgagttccaaagcgatgagtttaaccgttcgttttatgtgtcgaggtggtaaatgcaaactctgaaagaactaatcgcatccaatcctgacgacttaacaactgaacttaagagagcatttcgtccactcacaccgcatattgcaattgatggtaatgaacttgacgcactgacgatattagtcaatttaaccgataagactgatgatcagaaagacctgctcgatcgagccaaatgcaagcaaaaacttcgagatgaaaaatggtgggctagctgcataaattgcgttaattacagacaaagccataacccaaaattcccggatatacgttctgaaggcgtgattcgaacccaagccctgggtgaattaccgagtttcctactctcgtcctcaaaaatcccaccataccattggtcatatagccatgattcaaaatacgtcaacaaaagcgcattcctcaccaatgagttttgttgggatggtgagatctcatgtttgggtgagcttcttaaagatgcagatcacccactttggaatactttgaaaaagttaggttgttctcaaaaaacttgcaaagcaatggcaaaacaactagctgatattactctcacgactatcaatgtcacactcgcaccaaattacctgactcaaatatctctccccgatagtgatacatcctacatttcactctctcctgttgcatcgctatcgatgcaaagccactttcatcagaggctccaagatgaaaatcggcatagcgcgataacgcggtttagccgaactaccaacatgggggtcactgcgatgacatgtggcggcgcatttagaatgttaaagtctggcgctaagttttccagcccccctcatcaccgattaaacagtaaacgaagttggttgacgtcagagcatgttcagtcattaaaacagtaccagcgcctcaacaaaagcctcatacctgaaaactctcggattgcactccgtagaaaatacaaaatcgagcttcaaaatatggtcagatcttggtttgcaatgcaagaccatacccttgattcgaacatacttatccaacatttgaatcatgacctatcttacttaggagccacaaaacgttttgcatacgatccagcgatgaccaagctctttactgagcttttgaaacgagagttatcaaattcaatcaataatggtgagcaacacactaatggatcgtttttagtcctaccgaatatcagggtttgtggcgcaacagctttaagctccccggtaacggtggggattccatcacttacagctttctttggcttcgttcacgcatttgaacggaatataaatcgcaccacctcatcgtttcgtgttgaatcctttgcgatatgcgtccatcaactacatgtcgagaagcgaggtttgacagcagagtttgtggaaaaaggcgacgggactatatccgctcccgcgacccgggatgactggcagtgtgatgtcgtatttagccttattttgaacaccaactttgctcaacatattgaccaagatacgttagttacatcactaccaaagcgattggctcggggttcagcaaaaattgcgattgatgactttaaacatatcaactcattctcgacattagaaacagcgatcgaatctctgccaatagaagctggtaggtggttatcactttacgcacagtcaaacaataatctaagtgatctattagcagccatgacagaggaccatcagctcatggcaagctgcgtcggttaccacttgttagaagagcccaaagataaaccaaactccctcagaggttacaaacacgctatcgccgagtgcatcattggactcattaactcaatcacctttagctcagagactgatcccaacacaatcttttggtcgctaaagaactatcaaaactacctagtggtacagccaaggagtatcaacgatgaaactaccgacaaatctagcctatgagcgctctatcgacccatcagatgtctgtttttttgtcgtctggcccgatgatagaaaaacacctttaacctacaattctcgtactctgctcgggcaaatggaagcggcatcattagcctatgatgtctcaggtcaaccaataaaaagtgccaccgctgaggcgttagctcaagggaaccctcatcaagttgatttctgccacgttccatacggtgcgagtcatattgaatgcagtttctccgtctcgttttcttctgaactacgtcaaccatataagtgtaactcaagcaaagttaaacaaacgctagtgcaattagtcgagctctacgaaacgaaaatcggctggactgagctagcaacccgatatttgatgaacatttgcaacggtaaatggctgtggaaaaatacccgtaaagcctattgctggaacattgtacttacaccttggccttggaacggggaaaaggttggatttgaagatattcgtactaactacacctcacggcaagactttaaaaataataaaaattggtctgctatagttgaaatgatcaaaaccgcattttctagtactgatgggctggcgatatttgaagtcagggccaccttgcacttgccaacgaatgctatggtgcggccaagccaagttttcacagaaaaagaaagtggcagtaaaagtaaatctaaaactcaaaacagtcgagtttttcagagtacaactattgatggtgaacgatcgccaatactaggggcctttaaaacgggagcagctattgcaaccattgacgactggtatcctgaagccactgagccactaagggtcggacggtttggggttcatcgcgaagatgtcacttgctaccgtcatccgtctaccggaaaagattttttctcgatattacaacaagcagagcactatattgaagtgttgagcgccaacaaaactcccgctcaagaaactatcaacgacatgcactttttaatggctaacctgattaagggtgggatgttccagcataaaggagactgactgtgaaatggtattataagacaatcacctttctgccagagttgtgcaacaacgagtcactggctgcaaagtgtctccgcgttctgcatggatttaactatcagtatgagacacgaaatatcggcgtttcatttccgctttggtgtgatgcaacggttggaaaaaagatttcatttgtcagcaagaacaagatagaactcgacttactacttaaacaacactatttcgtccaaatggaacaacttcaatactttcatatatccaacactgttctcgtcccagaagattgtacatacgtttcctttagacgctgtcaatctatagataagctcacagcagcagggctggcaaggaaaatcagacgcctggagaaacgtgctctatctagaggcgagcaatttgacccatcatcttttgctcaaaaagagcatactgcaatagcgcactaccactcacttggggagtccagcaaacagacgaaccgcaactttcgactcaatatcaggatgctctcggagcaaccccgtgaggggaactcgatttttagtagctatggcttatcaaattcagaaaactcgtttcagcctgtacccttaatctgacctttaataaggagatataccatggcgacaagtttacctacgccctcagcaattacgacttcggcgttagagtatgcattccatactcccgctcgcaatctaacgaaatctcgcggaaaaaacattcatcgttatgtcagtgtaaagatgagtaagaggattacggtagaatctactctagagtgtgatgcctgctatcactttgattttgagccaagtattgttcgcttttgcgctcaaccgattcgatttttatattatctcaatggtcagtctcactcctatgttcctgactttctagttcaatttgataccaacgagtttgttctatatgaagtaaagtcagcttatgctaagaacaaacctgattttgatgttgaatgggaggcgaaagtaaaagcagcaactgaactagggctagaattggagcttgttgaagagagtgatattagggatacggttgtattaaataatcttaagcgcatgcatcgttatgcttcgaaagatgagctgaataacgtacataactctctcttaaaaataataaagtacaatggcgcccaatctgcaagatgcttgggagaacagttgggtttaaaaggccgaactgttttaccaattttgtgcgatttgctgtcaaggtgtttactcgatacacgtttggataagcctctatctcttgaatctcgatttgagttggccagttatggctaagaaagggttctcaagtttccatagaaaagcagtctcttcccaagatacgcttgaatcgatagagcttgtctctagcgctaattgtctagaaagtgttacgtatcaagatatatcagcatttcccgaaacaattgcggtagagattaatttccgattaagcattcttcgctttttagcgcgaaagtgcgaaaccattgtggccaaatcaattgaaccacatcgtgtagagctacagcaaaactatagtagaaaaatacccagtgcaataacgatatatcgatggtggcttgcttttcgaaaatcagactacaaccccattagcttagcacctaatatcaaggatagaggtaatagagagacaaaagtgtcaacagttgttgattctattatggaacaggcagttgaaagagttatatctggacgaaaagtcaatgttagctctgcatataaacgtgttcgacgaaaagttcgtcaatacaatctaactcatggaacgaaatacacgtatcctaagtacgaatctgtaagaaagcgagtaaaaaagaaaaccccatttgagttattagccgcagggaaaggggagagagtagctaagagagagtttcgccgaatgggaaaaaagatcctcacgtctagcgtgctagagagggttgaaatagatcacactgtcgttgacctttttgcagtacacgaagagtatcgaatcccattgggccgaccttggcttactcaattggttgattgttacagtaaagctgtaatcggtttttatttaggtttcgagcctcctagctatgtgtcggtttcccttgcacttaagaatgcaatacaacgcaaagatgacttaatctcctcgtatgaatcgatcgagaatgaatggctatgttatggcatcccagacctactcgtaactgataatggtaaagagtttttgtcgaaagcatttgatcaagcatgtgaatcactattgatcaatgtgcatcaaaataaagttgagacgcccgacaacaaacctcatgttgaacgtaactacgggactattaatacttctctgttagacgatttacctgggaaatccttcagccagtaccttcaaagagaagggtacgactctgtgggagaagctacccttacactcaatgagattagagaaatttacttaatttggttggtggatatttatcataaaaaacccaatcagagaggcactaattgtcctaatgttgcgtggaaaaagggttgtcaagaatgggaaccagaggagttctctggttctaaagacgaattagactttaaatttgctattgttgattacaaacaacttactaaagtagggataactgtctacaaagaactgagttatagcaatgaccgtttagctgaatatagagggaagaaaggaaaccataaagttcagttcaagtataaccctgagtgtatggcagttatttgggtgttggatgaggatatgaatgagtactttacagttaatgcgattgactacgaatatgcaagtagagtatcactttggcaacataaatataacatgaaatatcaagcagaactaaattcagcagaatatgatgaggacaaggaaattgatgcagaaataaaaattgaagaaatcgcagatcgttcaattgttaagactaacaaaatcagagctcggaggcgtggcgctaggcatcaagagaatagcgcaagggctaagtcaatcagtaatgcgaacccggcctcgatacaaaaacatgaagatgaaatcgttagtgcagataatgacgattgggatattgattatgtctgagaaatcgtcaaatgagtgaaacgcgtgaggctcgtatatcaagagctaaaagggcatttgtatccacaccgagcgttaggaaaatcttgagttacatggatagatgtagagatctatcagacctagagtctgagcctacatgcatgatggtctatggtgcttcgggtgtaggtaaaacgaccgtcatcaagaaatacttaaatcaaaacagaagagagtccgaagccgggggcgatataataccggttttgcatattgagttgccagacaatgcgaagccagtagatgcagcaagggaattgctggttgaaatgggtgacccgctagcactttatgaaactgacttagctagattgacgaaaagactgactgaattaatccctgcggtcggcgtgaagctgattattatcgatgagttccaacatttggtggaagaaaggtcaaatcgggttcttacccaagtaggtaattggctaaaaatgatacttaacaaaacgaaatgtccaattgttatatttggtatgccatactcaaaagttgtactgcaagcaaactcgcaacttcacgggcgattttccattcaggttgaactgcgcccctttagctaccagggaggtagaggtgtatttaaaacttttttggaataccttgataaagccctaccttttgaaaaacaggctggcttagccaacgaaagtttgcagaaaaaattgtatgcattctctcagggaaacatgcgttcgttgagaaaccttatttatcaagcatctatcgaagcaattgataatcagcatgagacgataaccgaagaagatttcgtttttgcatcgaagttgacatcgggcgataaacccaactcatggaaaaatccttttgaggagggtgttgaggtaacagaagatatgttacgaccgccaccaaaagatattggttgggaggactatttgagacattcaaccccgagagtgagtaaaccaggtagaaataaaaactttttcgaataacctaggctgctgcgctgctgccaccgctgagcaataactagcataaccccttggggcctctaaacgggtcttgaggggttttttgctgaaacctcaggcatttgagaagcacacggtcacactgcttccggtagtcaataaaccggtaaaccagcaatagacataagcggctatttaacgaccctgccctgaaccgacgaccgggtcatcgtggccggatcttgcggcccctcggcttgaacgaattgttagacattatttgccgactaccttggtgatctcgcctttcacgtagtggacaaattcttccaactgatctgcgcgcgaggccaagcgatcttcttcttgtccaagataagcctgtctagcttcaagtatgacgggctgatactgggccggcaggcgctccattgcccagtcggcagcgacatccttcggcgcgattttgccggttactgcgctgtaccaaatgcgggacaacgtaagcactacatttcgctcatcgccagcccagtcgggcggcgagttccatagcgttaaggtttcatttagcgcctcaaatagatcctgttcaggaaccggatcaaagagttcctccgccgctggacctaccaaggcaacgctatgttctcttgcttttgtcagcaagatagccagatcaatgtcgatcgtggctggctcgaagatacctgcaagaatgtcattgcgctgccattctccaaattgcagttcgcgcttagctggataacgccacggaatgatgtcgtcgtgcacaacaatggtgacttctacagcgcggagaatctcgctctctccaggggaagccgaagtttccaaaaggtcgttgatcaaagctcgccgcgttgtttcatcaagccttacggtcaccgtaaccagcaaatcaatatcactgtgtggcttcaggccgccatccactgcggagccgtacaaatgtacggccagcaacgtcggttcgagatggcgctcgatgacgccaactacctctgatagttgagtcgatacttcggcgatcaccgcttccctcatactcttcctttttcaatattattgaagcatttatcagggttattgtctcatgagcggatacatatttgaatgtatttagaaaaataaacaaatagctagctcactcggtcgctacgctccgggcgtgagactgcggcgggcgctgcggacacatacaaagttacccacagattccgtggataagcaggggactaacatgtgaggcaaaacagcagggccgcgccggtggcgtttttccataggctccgccctcctgccagagttcacataaacagacgcttttccggtgcatctgtgggagccgtgaggctcaaccatgaatctgacagtacgggcgaaacccgacaggacttaaagatccccaccgtttccggcgggtcgctccctcttgcgctctcctgttccgaccctgccgtttaccggatacctgttccgcctttctcccttacgggaagtgtggcgctttctcatagctcacacactggtatctcggctcggtgtaggtcgttcgctccaagctgggctgtaagcaagaactccccgttcagcccgactgctgcgccttatccggtaactgttcacttgagtccaacccggaaaagcacggtaaaacgccactggcagcagccattggtaactgggagttcgcagaggatttgtttagctaaacacgcggttgctcttgaagtgtgcgccaaagtccggctacactggaaggacagatttggttgctgtgctctgcgaaagccagttaccacggttaagcagttccccaactgacttaaccttcgatcaaaccacctccccaggtggttttttcgtttacagggcaaaagattacgcgcagaaaaaaaggatctcaagaagatcctttgatcttttctactgaaccgctctagatttcagtgcaatttatctcttcaaatgtagcacctgaagtcagccccatacgatataagttgtaattctcatgttagtcatgccccgcgcccaccggaaggagctgactgggttgaaggctctcaagggcatcggtcgagatcccggtgcctaatgagtgagctaacttacattaattgcgttgcgctcactgcccgctttccagtcgggaaacctgtcgtgccagctgcattaatgaatcggccaacgcgcggggagaggcggtttgcgtattgggcgccagggtggtttttcttttcaccagtgagacgggcaacagctgattgcccttcaccgcctggccctgagagagttgcagcaagcggtccacgctggtttgccccagcaggcgaaaatcctgtttgatggtggttaacggcgggatataacatgagctgtcttcggtatcgtcgtatcccactaccgagatgtccgcaccaacgcgcagcccggactcggtaatggcgcgcattgcgcccagcgccatctgatcgttggcaaccagcatcgcagtgggaacgatgccctcattcagcatttgcatggtttgttgaaaaccggacatggcactccagtcgccttcccgttccgctatcggctgaatttgattgcgagtgagatatttatgccagccagccagacgcagacgcgccgagacagaacttaatgggcccgctaacagcgcgatttgctggtgacccaatgcgaccagatgctccacgcccagtcgcgtaccgtcttcatgggagaaaataatactgttgatgggtgtctggtcagagacatcaagaaataacgccggaacattagtgcaggcagcttccacagcaatggcatcctggtcatccagcggatagttaatgatcagcccactgacgcgttgcgcgagaagattgtgcaccgccgctttacaggcttcgacgccgcttcgttctaccatcgacaccaccacgctggcacccagttgatcggcgcgagatttaatcgccgcgacaatttgcgacggcgcgtgcagggccagactggaggtggcaacgccaatcagcaacgactgtttgcccgccagttgttgtgccacgcggttgggaatgtaattcagctccgccatcgccgcttccactttttcccgcgttttcgcagaaacgtggctggcctggttcaccacgcgggaaacggtctgataagagacaccggcatactctgcgacatcgtataacgttactggtttcac

SEQ ID NO: 856 - DNA, 12022 bp, Synthetic construct
  source 1..12022: mol_type = other DNA
ctctagatttcagtgcaatttatctcttcaaatgtagcacctgaagtcagccccatacgatataagttgtaattctcatgttagtcatgccccgcgcccaccggaaggagctgactgggttgaaggctctcaagggcatcggtcgagatcccggtgcctaatgagtgagctaacttacattaattgcgttgcgctcactgcccgctttccagtcgggaaacctgtcgtgccagctgcattaatgaatcggccaacgcgcggggagaggcggtttgcgtattgggcgccagggtggtttttcttttcaccagtgagacgggcaacagctgattgcccttcaccgcctggccctgagagagttgcagcaagcggtccacgctggtttgccccagcaggcgaaaatcctgtttgatggtggttaacggcgggatataacatgagctgtcttcggtatcgtcgtatcccactaccgagatgtccgcaccaacgcgcagcccggactcggtaatggcgcgcattgcgcccagcgccatctgatcgttggcaaccagcatcgcagtgggaacgatgccctcattcagcatttgcatggtttgttgaaaaccggacatggcactccagtcgccttcccgttccgctatcggctgaatttgattgcgagtgagatatttatgccagccagccagacgcagacgcgccgagacagaacttaatgggcccgctaacagcgcgatttgctggtgacccaatgcgaccagatgctccacgcccagtcgcgtaccgtcttcatgggagaaaataatactgttgatgggtgtctggtcagagacatcaagaaataacgccggaacattagtgcaggcagcttccacagcaatggcatcctggtcatccagcggatagttaatgatcagcccactgacgcgttgcgcgagaagattgtgcaccgccgctttacaggcttcgacgccgcttcgttctaccatcgacaccaccacgctggcacccagttgatcggcgcgagatttaatcgccgcgacaatttgcgacggcgcgtgcagggccagactggaggtggcaacgccaatcagcaacgactgtttgcccgccagttgttgtgccacgcggttgggaatgtaattcagctccgccatcgccgcttccactttttcccgcgttttcgcagaaacgtggctggcctggttcaccacgcgggaaacggtctgataagagacaccggcatactctgcgacatcgtataacgttactggtttcacattcaccaccctgaattgactctcttccgggcgctatcatgccataccgcgaaaggttttgcgccattcgatggtgtccgggatctcgacgctctcccttatgcgactcctgcattaggaaattaatacgactcactataggggaattgtgagcggataacaattcccctgtagaaataattttgtttaactttaataaggagatataccatgggcagcagccatcaccatcatcaccacagccaggatccgaattcgagctcggtataaggagatataccatggcgacaagtttacctacgccctcagcaattacgacttcggcgttagagtatgcattccatactcccgctcgcaatctaacgaaatctcgcggaaaaaacattcatcgttatgtcagtgtaaagatgagtaagaggattacggtagaatctactctagagtgtgatgcctgctatcactttgattttgagccaagtattgttcgcttttgcgctcaaccgattcgatttttatattatctcaatggtcagtctcactcctatgttcctgactttctagttcaatttgataccaacgagtttgttctatatgaagtaaagtcagcttatgctaagaacaaacctgattttgatgttgaatgggaggcgaaagtaaaagcagcaactgaactagggctagaattggagcttgttgaagagagtgatattagggatacggttgtattaaataatcttaagcgcatgcatcgttatgcttcgaaagatgagctgaataacgtacataactctctcttaaaaataataaagtacaatggcgcccaatctgcaagatgcttgggagaacagttgggtttaaaaggccgaactgttttaccaattttgtgcgatttgctgtcaaggtgtttactcgatacacgtttggataagcctctatctcttgaatctcgatttgagttggccagttatggctaagaaagggttctcaagtttccatagaaaagcagtctcttcccaagatacgcttgaatcgatagagcttgtctctagcgctaattgtctagaaagtgttacgtatcaagatatatcagcatttcccgaaacaattgcggtagagattaatttccgattaagcattcttcgctttttagcgcgaaagtgcgaaaccattgtggccaaatcaattgaaccacatcgtgtagagctacagcaaaactatagtagaaaaatacccagtgcaataacgatatatcgatggtggcttgcttttcgaaaatcagactacaaccccattagcttagcacctaatatcaaggatagaggtaatagagagacaaaagtgtcaacagttgttgattctattatggaacaggcagttgaaagagttatatctggacgaaaagtcaatgttagctctgcatataaacgtgttcgacgaaaagttcgtcaatacaatctaactcatggaacgaaatacacgtatcctaagtacgaatctgtaagaaagcgagtaaaaaagaaaaccccatttgagttattagccgcagggaaaggggagagagtagctaagagagagtttcgccgaatgggaaaaaagatcctcacgtctagcgtgctagagagggttgaaatagatcacactgtcgttgacctttttgcagtacacgaagagtatcgaatcccattgggccgaccttggcttactcaattggttgattgttacagtaaagctgtaatcggtttttatttaggtttcgagcctcctagctatgtgtcggtttcccttgcacttaagaatgcaatacaacgcaaagatgacttaatctcctcgtatgaatcgatcgagaatgaatggctatgttatggcatcccagacctactcgtaactgataatggtaaagagtttttgtcgaaagcatttgatcaagcatgtgaatcactattgatcaatgtgcatcaaaataaagttgagacgcccgacaacaaacctcatgttgaacgtaactacgggactattaatacttctctgttagacgatttacctgggaaatccttcagccagtaccttcaaagagaagggtacgactctgtgggagaagctacccttacactcaatgagattagagaaatttacttaatttggttggtggatatttatcataaaaaacccaatcagagaggcactaattgtcctaatgttgcgtggaaaaagggttgtcaagaatgggaaccagaggagttctctggttctaaagacgaattagactttaaatttgctattgttgattacaaacaacttactaaagtagggataactgtctacaaagaactgagttatagcaatgaccgtttagctgaatatagagggaagaaaggaaaccataaagttcagttcaagtataaccctgagtgtatggcagttatttgggtgttggatgaggatatgaatgagtactttacagttaatgcgattgactacgaatatgcaagtagagtatcactttggcaacataaatataacatgaaatatcaagcagaactaaattcagcagaatatgatgaggacaaggaaattgatgcagaaataaaaattgaagaaatcgcagatcgttcaattgttaagactaacaaaatcagagctcggaggcgtggcgctaggcatcaagagaatagcgcaagggctaagtcaatcagtaatgcgaacccggcctcgatacaaaaacatgaagatgaaatcgttagtgcagataatgacgattgggatattgattatgtctgagaaatcgtcaaatgagtgaaacgcgtgaggctcgtatatcaagagctaaaagggcatttgtatccacaccgagcgttaggaaaatcttgagttacatggatagatgtagagatctatcagacctagagtctgagcctacatgcatgatggtctatggtgcttcgggtgtaggtaaaacgaccgtcatcaagaaatacttaaatcaaaacagaagagagtccgaagccgggggcgatataataccggttttgcatattgagttgccagacaatgcgaagccagtagatgcagcaagggaattgctggttgaaatgggtgacccgctagcactttatgaaactgacttagctagattgacgaaaagactgactgaattaatccctgcggtcggcgtgaagctgattattatcgatgagttccaacatttggtggaagaaaggtcaaatcgggttcttacccaagtaggtaattggctaaaaatgatacttaacaaaacgaaatgtccaattgttatatttggtatgccatactcaaaagttgtactgcaagcaaactcgcaacttcacgggcgattttccattcaggttgaactgcgcccctttagctaccagggaggtagaggtgtatttaaaacttttttggaataccttgataaagccctaccttttgaaaaacaggctggcttagccaacgaaagtttgcagaaaaaattgtatgcattctctcagggaaacatgcgttcgttgagaaaccttatttatcaagcatctatcgaagcaattgataatcagcatgagacgataaccgaagaagatttcgtttttgcatcgaagttgacatcgggcgataaacccaactcatggaaaaatccttttgaggagggtgttgaggtaacagaagatatgttacgaccgccaccaaaagatattggttgggaggactatttgagacattcaaccccgagagtgagtaaaccaggtagaaataaaaactttttcgaataacctaggctgctgccctgcaggtcgacaagcttgcggccgcataatgcttaagtcgaacagaaagtaatcgtattgtacacggccgcataatcgaaattaatacgactcactataggggaattgtgagcggataacaattccccatcttagtatattagttaagtataagaaggagatatacatatgtttttgcaaagacctaaaccttacagcgatgaaagtttagaaagtttctttatccgagtggctaacaaaaatggctacggtgatgtccatcgcttcctagaagccactaaacgattccttcaagacattgaccataatggctatcaaacctttccgactgatataactcggataaacccatactcagctaaaaacagttccagcgcacgaactgcgtcattcctgaaacttgcacaattgacatttaatgaaccgccagagctacttgggttggcaattaacagaacaaacatgaaatactcgccgtcaactagcgcggttgttagaggtgcagaagtctttcctcgcagtttactacggacgcactccatcccctgctgtcctttgtgtctgcgagaaaatggctacgcctcctacctttggcactttcaggggtacgaatactgccacagccataacgtacctttaattaccacttgtagctgtggtaaggagtttgactaccgagtatctgggttaaagggcatttgctgcaaatgcaaggagcctatcaccttaaccagcagggagaacggtcatgaggcagcgtgtactgtttcaaactggcttgctggccatgaatctaaacctctgccaaatcttcctaaaagctaccgatggggtttagttcattggtggatgggtattaaagatagcgagttcgatcacttttcgttcgttcaatttttctcaaactggccaaggtcattccactcgataatcgaagatgaagtagagttcaaccttgagcatgctgttgtcagcacgtctgaattacgactaaaagatcttcttggtcgattgtttttcggttcaattcggttacctgagcggaatcttcaacacaatatcatccttggtgagcttctctgctatttagaaaatcgtttatggcaagacaagggattaatcgccaacctcaaaatgaacgcgttagaggcgactgtaatgttaaattgtagcctcgatcagattgcatcaatggttgaacaacgcatcttgaagccaaatcgaaaaagcaagcccaacagccctcttgatgttaccgattatctatttcatttcggcgatattttctgtctttggttagctgagttccaaagcgatgagtttaaccgttcgttttatgtgtcgaggtggtaaatgcaaactctgaaagaactaatcgcatccaatcctgacgacttaacaactgaacttaagagagcatttcgtccactcacaccgcatattgcaattgatggtaatgaacttgacgcactgacgatattagtcaatttaaccgataagactgatgatcagaaagacctgctcgatcgagccaaatgcaagcaaaaacttcgagatgaaaaatggtgggctagctgcataaattgcgttaattacagacaaagccataacccaaaattcccggatatacgttctgaaggcgtgattcgaacccaagccctgggtgaattaccgagtttcctactctcgtcctcaaaaatcccaccataccattggtcatatagccatgattcaaaatacgtcaacaaaagcgcattcctcaccaatgagttttgttgggatggtgagatctcatgtttgggtgagcttcttaaagatgcagatcacccactttggaatactttgaaaaagttaggttgttctcaaaaaacttgcaaagcaatggcaaaacaactagctgatattactctcacgactatcaatgtcacactcgcaccaaattacctgactcaaatatctctccccgatagtgatacatcctacatttcactctctcctgttgcatcgctatcgatgcaaagccactttcatcagaggctccaagatgaaaatcggcatagcgcgataacgcggtttagccgaactaccaacatgggggtcactgcgatgacatgtggcggcgcatttagaatgttaaagtctggcgctaagttttccagcccccctcatcaccgattaaacagtaaacgaagttggttgacgtcagagcatgttcagtcattaaaacagtaccagcgcctcaacaaaagcctcatacctgaaaactctcggattgcactccgtagaaaatacaaaatcgagcttcaaaatatggtcagatcttggtttgcaatgcaagaccatacccttgattcgaacatacttatccaacatttgaatcatgacctatcttacttaggagccacaaaacgttttgcatacgatccagcgatgaccaagctctttactgagcttttgaaacgagagttatcaaattcaatcaataatggtgagcaacacactaatggatcgtttttagtcctaccgaatatcagggtttgtggcgcaacagctttaagctccccggtaacggtggggattccatcacttacagctttctttggcttcgttcacgcatttgaacggaatataaatcgcaccacctcatcgtttcgtgttgaatcctttgcgatatgcgtccatcaactacatgtcgagaagcgaggtttgacagcagagtttgtggaaaaaggcgacgggactatatccgctcccgcgacccgggatgactggcagtgtgatgtcgtatttagccttattttgaacaccaactttgctcaacatattgaccaagatacgttagttacatcactaccaaagcgattggctcggggttcagcaaaaattgcgattgatgactttaaacatatcaactcattctcgacattagaaacagcgatcgaatctctgccaatagaagctggtaggtggttatcactttacgcacagtcaaacaataatctaagtgatctattagcagccatgacagaggaccatcagctcatggcaagctgcgtcggttaccacttgttagaagagcccaaagataaaccaaactccctcagaggttacaaacacgctatcgccgagtgcatcattggactcattaactcaatcacctttagctcagagactgatcccaacacaatcttttggtcgctaaagaactatcaaaactacctagtggtacagccaaggagtatcaacgatgaaactaccgacaaatctagcctatgagcgctctatcgacccatcagatgtctgtttttttgtcgtctggcccgatgatagaaaaacacctttaacctacaattctcgtactctgctcgggcaaatggaagcggcatcattagcctatgatgtctcaggtcaaccaataaaaagtgccaccgctgaggcgttagctcaagggaaccctcatcaagttgatttctgccacgttccatacggtgcgagtcatattgaatgcagtttctccgtctcgttttcttctgaactacgtcaaccatataagtgtaactcaagcaaagttaaacaaacgctagtgcaattagtcgagctctacgaaacgaaaatcggctggactgagctagcaacccgatatttgatgaacatttgcaacggtaaatggctgtggaaaaatacccgtaaagcctattgctggaacattgtacttacaccttggccttggaacggggaaaaggttggatttgaagatattcgtactaactacacctcacggcaagactttaaaaataataaaaattggtctgctatagttgaaatgatcaaaaccgcattttctagtactgatgggctggcgatatttgaagtcagggccaccttgcacttgccaacgaatgctatggtgcggccaagccaagttttcacagaaaaagaaagtggcagtaaaagtaaatctaaaactcaaaacagtcgagtttttcagagtacaactattgatggtgaacgatcgccaatactaggggcctttaaaacgggagcagctattgcaaccattgacgactggtatcctgaagccactgagccactaagggtcggacggtttggggttcatcgcgaagatgtcacttgctaccgtcatccgtctaccggaaaagattttttctcgatattacaacaagcagagcactatattgaagtgttgagcgccaacaaaactcccgctcaagaaactatcaacgacatgcactttttaatggctaacctgattaagggtgggatgttccagcataaaggagactgactgtgaaatggtattataagacaatcacctttctgccagagttgtgcaacaacgagtcactggctgcaaagtgtctccgcgttctgcatggatttaactatcagtatgagacacgaaatatcggcgtttcatttccgctttggtgtgatgcaacggttggaaaaaagatttcatttgtcagcaagaacaagatagaactcgacttactacttaaacaacactatttcgtccaaatggaacaacttcaatactttcatatatccaacactgttctcgtcccagaagattgtacatacgtttcctttagacgctgtcaatctatagataagctcacagcagcagggctggcaaggaaaatcagacgcctggagaaacgtgctctatctagaggcgagcaatttgacccatcatcttttgctcaaaaagagcatactgcaatagcgcactaccactcacttggggagtccagcaaacagacgaaccgcaactttcgactcaatatcaggatgctctcggagcaaccccgtgaggggaactcgatttttagtagctatggcttatcaaattcagaaaactcgtttcagcctgtacccttaatctgacgatataccatgggtgaactgccgagtaggtagctgataacgagacctctgtcttgtcagctagggtggtctcgtgaactgccgagtaggtagctgataacggatccgaattcgctgctgccaccgctgagcaataactagcataaccccttggggcctctaaacgggtcttgaggggttttttgctgaaacctcaggcatttgagaagcacacggtcacactgcttccggtagtcaataaaccggtaaaccagcaatagacataagcggctatttaacgaccctgccctgaaccgacgaccgggtcatcgtggccggatcttgcggcccctcggcttgaacgaattgttagacattatttgccgactaccttggtgatctcgcctttcacgtagtggacaaattcttccaactgatctgcgcgcgaggccaagcgatcttcttcttgtccaagataagcctgtctagcttcaagtatgacgggctgatactgggccggcaggcgctccattgcccagtcggcagcgacatccttcggcgcgattttgccggttactgcgctgtaccaaatgcgggacaacgtaagcactacatttcgctcatcgccagcccagtcgggcggcgagttccatagcgttaaggtttcatttagcgcctcaaatagatcctgttcaggaaccggatcaaagagttcctccgccgctggacctaccaaggcaacgctatgttctcttgcttttgtcagcaagatagccagatcaatgtcgatcgtggctggctcgaagatacctgcaagaatgtcattgcgctgccattctccaaattgcagttcgcgcttagctggataacgccacggaatgatgtcgtcgtgcacaacaatggtgacttctacagcgcggagaatctcgctctctccaggggaagccgaagtttccaaaaggtcgttgatcaaagctcgccgcgttgtttcatcaagccttacggtcaccgtaaccagcaaatcaatatcactgtgtggcttcaggccgccatccactgcggagccgtacaaatgtacggccagcaacgtcggttcgagatggcgctcgatgacgccaactacctctgatagttgagtcgatacttcggcgatcaccgcttccctcatactcttcctttttcaatattattgaagcatttatcagggttattgtctcatgagcggatacatatttgaatgtatttagaaaaataaacaaatagctagctcactcggtcgctacgctccgggcgtgagactgcggcgggcgctgcggacacatacaaagttacccacagattccgtggataagcaggggactaacatgtgaggcaaaacagcagggccgcgccggtggcgtttttccataggctccgccctcctgccagagttcacataaacagacgcttttccggtgcatctgtgggagccgtgaggctcaaccatgaatctgacagtacgggcgaaacccgacaggacttaaagatccccaccgtttccggcgggtcgctccctcttgcgctctcctgttccgaccctgccgtttaccggatacctgttccgcctttctcccttacgggaagtgtggcgctttctcatagctcacacactggtatctcggctcggtgtaggtcgttcgctccaagctgggctgtaagcaagaactccccgttcagcccgactgctgcgccttatccggtaactgttcacttgagtccaacccggaaaagcacggtaaaacgccactggcagcagccattggtaactgggagttcgcagaggatttgtttagctaaacacgcggttgctcttgaagtgtgcgccaaagtccggctacactggaaggacagatttggttgctgtgctctgcgaaagccagttaccacggttaagcagttccccaactgacttaaccttcgatcaaaccacctccccaggtggttttttcgtttacagggcaaaagattacgcgcagaaaaaaaggatctcaagaagatcctttgatcttttctactgaaccg

SEQ ID NO: 857 - DNA, 12022 bp, Synthetic construct
  source 1..12022: mol_type = other DNA
ggcagcttccacagcaatggcatcctggtcatccagcggatagttaatgatcagcccactgacgcgttgcgcgagaagattgtgcaccgccgctttacaggcttcgacgccgcttcgttctaccatcgacaccaccacgctggcacccagttgatcggcgcgagatttaatcgccgcgacaatttgcgacggcgcgtgcagggccagactggaggtggcaacgccaatcagcaacgactgtttgcccgccagttgttgtgccacgcggttgggaatgtaattcagctccgccatcgccgcttccactttttcccgcgttttcgcagaaacgtggctggcctggttcaccacgcgggaaacggtctgataagagacaccggcatactctgcgacatcgtataacgttactggtttcacattcaccaccctgaattgactctcttccgggcgctatcatgccataccgcgaaaggttttgcgccattcgatggtgtccgggatctcgacgctctcccttatgcgactcctgcattaggaaattaatacgactcactataggggaattgtgagcggataacaattcccctgtagaaataattttgtttaactttaataaggagatataccatgggcagcagccatcaccatcatcaccacagccaggatccgaattcgagctcggtataaggagatataccatggcgacaagtttacctacgccctcagcaattacgacttcggcgttagagtatgcattccatactcccgctcgcaatctaacgaaatctcgcggaaaaaacattcatcgttatgtcagtgtaaagatgagtaagaggattacggtagaatctactctagagtgtgatgcctgctatcactttgattttgagccaagtattgttcgcttttgcgctcaaccgattcgatttttatattatctcaatggtcagtctcactcctatgttcctgactttctagttcaatttgataccaacgagtttgttctatatgaagtaaagtcagcttatgctaagaacaaacctgattttgatgttgaatgggaggcgaaagtaaaagcagcaactgaactagggctagaattggagcttgttgaagagagtgatattagggatacggttgtattaaataatcttaagcgcatgcatcgttatgcttcgaaagatgagctgaataacgtacataactctctcttaaaaataataaagtacaatggcgcccaatctgcaagatgcttgggagaacagttgggtttaaaaggccgaactgttttaccaattttgtgcgatttgctgtcaaggtgtttactcgatacacgtttggataagcctctatctcttgaatctcgatttgagttggccagttatggctaagaaagggttctcaagtttccatagaaaagcagtctcttcccaagatacgcttgaatcgatagagcttgtctctagcgctaattgtctagaaagtgttacgtatcaagatatatcagcatttcccgaaacaattgcggtagagattaatttccgattaagcattcttcgctttttagcgcgaaagtgcgaaaccattgtggccaaatcaattgaaccacatcgtgtagagctacagcaaaactatagtagaaaaatacccagtgcaataacgatatatcgatggtggcttgcttttcgaaaatcagactacaaccccattagcttagcacctaatatcaaggatagaggtaatagagagacaaaagtgtcaacagttgttgattctattatggaacaggcagttgaaagagttatatctggacgaaaagtcaatgttagctctgcatataaacgtgttcgacgaaaagttcgtcaatacaatctaactcatggaacgaaatacacgtatcctaagtacgaatctgtaagaaagcgagtaaaaaagaaaaccccatttgagttattagccgcagggaaaggggagagagtagctaagagagagtttcgccgaatgggaaaaaagatcctcacgtctagcgtgctagagagggttgaaatagatcacactgtcgttgacctttttgcagtacacgaagagtatcgaatcccattgggccgaccttggcttactcaattggttgattgttacagtaaagctgtaatcggtttttatttaggtttcgagcctcctagctatgtgtcggtttcccttgcacttaagaatgcaatacaacgcaaagatgacttaatctcctcgtatgaatcgatcgagaatgaatggctatgttatggcatcccagacctactcgtaactgataatggtaaagagtttttgtcgaaagcatttgatcaagcatgtgaatcactattgatcaatgtgcatcaaaataaagttgagacgcccgacaacaaacctcatgttgaacgtaactacgggactattaatacttctctgttagacgatttacctgggaaatccttcagccagtaccttcaaagagaagggtacgactctgtgggagaagctacccttacactcaatgagattagagaaatttacttaatttggttggtggatatttatcataaaaaacccaatcagagaggcactaattgtcctaatgttgcgtggaaaaagggttgtcaagaatgggaaccagaggagttctctggttctaaagacgaattagactttaaatttgctattgttgattacaaacaacttactaaagtagggataactgtctacaaagaactgagttatagcaatgaccgtttagctgaatatagagggaagaaaggaaaccataaagttcagttcaagtataaccctgagtgtatggcagttatttgggtgttggatgaggatatgaatgagtactttacagttaatgcgattgactacgaatatgcaagtagagtatcactttggcaacataaatataacatgaaatatcaagcagaactaaattcagcagaatatgatgaggacaaggaaattgatgcagaaataaaaattgaagaaatcgcagatcgttcaattgttaagactaacaaaatcagagctcggaggcgtggcgctaggcatcaagagaatagcgcaagggctaagtcaatcagtaatgcgaacccggcctcgatacaaaaacatgaagatgaaatcgttagtgcagataatgacgattgggatattgattatgtctgagaaatcgtcaaatgagtgaaacgcgtgaggctcgtatatcaagagctaaaagggcatttgtatccacaccgagcgttaggaaaatcttgagttacatggatagatgtagagatctatcagacctagagtctgagcctacatgcatgatggtctatggtgcttcgggtgtaggtaaaacgaccgtcatcaagaaatacttaaatcaaaacagaagagagtccgaagccgggggcgatataataccggttttgcatattgagttgccagacaatgcgaagccagtagatgcagcaagggaattgctggttgaaatgggtgacccgctagcactttatgaaactgacttagctagattgacgaaaagactgactgaattaatccctgcggtcggcgtgaagctgattattatcgatgagttccaacatttggtggaagaaaggtcaaatcgggttcttacccaagtaggtaattggctaaaaatgatacttaacaaaacgaaatgtccaattgttatatttggtatgccatactcaaaagttgtactgcaagcaaactcgcaacttcacgggcgattttccattcaggttgaactgcgcccctttagctaccagggaggtagaggtgtatttaaaacttttttggaataccttgataaagccctaccttttgaaaaacaggctggcttagccaacgaaagtttgcagaaaaaattgtatgcattctctcagggaaacatgcgttcgttgagaaaccttatttatcaagcatctatcgaagcaattgataatcagcatgagacgataaccgaagaagatttcgtttttgcatcgaagttgacatcgggcgataaacccaactcatggaaaaatccttttgaggagggtgttgaggtaacagaagatatgttacgaccgccaccaaaagatattggttgggaggactatttgagacattcaaccccgagagtgagtaaaccaggtagaaataaaaactttttcgaataacctaggctgctgccctgcaggtcgacaagcttgcggccgcataatgcttaagtcgaacagaaagtaatcgtattgtacacggccgcataatcgaaattaatacgactcactataggggaattgtgagcggataacaattccccatcttagtatattagttaagtataagaaggagatatacatatgtttttgcaaagacctaaaccttacagcgatgaaagtttagaaagtttctttatccgagtggctaacaaaaatggctacggtgatgtccatcgcttcctagaagccactaaacgattccttcaagacattgaccataatggctatcaaacctttccgactgatataactcggataaacccatactcagctaaaaacagttccagcgcacgaactgcgtcattcctgaaacttgcacaattgacatttaatgaaccgccagagctacttgggttggcaattaacagaacaaacatgaaatactcgccgtcaactagcgcggttgttagaggtgcagaagtctttcctcgcagtttactacggacgcactccatcccctgctgtcctttgtgtctgcgagaaaatggctacgcctcctacctttggcactttcaggggtacgaatactgccacagccataacgtacctttaattaccacttgtagctgtggtaaggagtttgactaccgagtatctgggttaaagggcatttgctgcaaatgcaaggagcctatcaccttaaccagcagggagaacggtcatgaggcagcgtgtactgtttcaaactggcttgctggccatgaatctaaacctctgccaaatcttcctaaaagctaccgatggggtttagttcattggtggatgggtattaaagatagcgagttcgatcacttttcgttcgttcaatttttctcaaactggccaaggtcattccactcgataatcgaagatgaagtagagttcaaccttgagcatgctgttgtcagcacgtctgaattacgactaaaagatcttcttggtcgattgtttttcggttcaattcggttacctgagcggaatcttcaacacaatatcatccttggtgagcttctctgctatttagaaaatcgtttatggcaagacaagggattaatcgccaacctcaaaatgaacgcgttagaggcgactgtaatgttaaattgtagcctcgatcagattgcatcaatggttgaacaacgcatcttgaagccaaatcgaaaaagcaagcccaacagccctcttgatgttaccgattatctatttcatttcggcgatattttctgtctttggttagctgagttccaaagcgatgagtttaaccgttcgttttatgtgtcgaggtggtaaatgcaaactctgaaagaactaatcgcatccaatcctgacgacttaacaactgaacttaagagagcatttcgtccactcacaccgcatattgcaattgatggtaatgaacttgacgcactgacgatattagtcaatttaaccgataagactgatgatcagaaagacctgctcgatcgagccaaatgcaagcaaaaacttcgagatgaaaaatggtgggctagctgcataaattgcgttaattacagacaaagccataacccaaaattcccggatatacgttctgaaggcgtgattcgaacccaagccctgggtgaattaccgagtttcctactctcgtcctcaaaaatcccaccataccattggtcatatagccatgattcaaaatacgtcaacaaaagcgcattcctcaccaatgagttttgttgggatggtgagatctcatgtttgggtgagcttcttaaagatgcagatcacccactttggaatactttgaaaaagttaggttgttctcaaaaaacttgcaaagcaatggcaaaacaactagctgatattactctcacgactatcaatgtcacactcgcaccaaattacctgactcaaatatctctccccgatagtgatacatcctacatttcactctctcctgttgcatcgctatcgatgcaaagccactttcatcagaggctccaagatgaaaatcggcatagcgcgataacgcggtttagccgaactaccaacatgggggtcactgcgatgacatgtggcggcgcatttagaatgttaaagtctggcgctaagttttccagcccccctcatcaccgattaaacagtaaacgaagttggttgacgtcagagcatgttcagtcattaaaacagtaccagcgcctcaacaaaagcctcatacctgaaaactctcggattgcactccgtagaaaatacaaaatcgagcttcaaaatatggtcagatcttggtttgcaatgcaagaccatacccttgattcgaacatacttatccaacatttgaatcatgacctatcttacttaggagccacaaaacgttttgcatacgatccagcgatgaccaagctctttactgagcttttgaaacgagagttatcaaattcaatcaataatggtgagcaacacactaatggatcgtttttagtcctaccgaatatcagggtttgtggcgcaacagctttaagctccccggtaacggtggggattccatcacttacagctttctttggcttcgttcacgcatttgaacggaatataaatcgcaccacctcatcgtttcgtgttgaatcctttgcgatatgcgtccatcaactacatgtcgagaagcgaggtttgacagcagagtttgtggaaaaaggcgacgggactatatccgctcccgcgacccgggatgactggcagtgtgatgtcgtatttagccttattttgaacaccaactttgctcaacatattgaccaagatacgttagttacatcactaccaaagcgattggctcggggttcagcaaaaattgcgattgatgactttaaacatatcaactcattctcgacattagaaacagcgatcgaatctctgccaatagaagctggtaggtggttatcactttacgcacagtcaaacaataatctaagtgatctattagcagccatgacagaggaccatcagctcatggcaagctgcgtcggttaccacttgttagaagagcccaaagataaaccaaactccctcagaggttacaaacacgctatcgccgagtgcatcattggactcattaactcaatcacctttagctcagagactgatcccaacacaatcttttggtcgctaaagaactatcaaaactacctagtggtacagccaaggagtatcaacgatgaaactaccgacaaatctagcctatgagcgctctatcgacccatcagatgtctgtttttttgtcgtctggcccgatgatagaaaaacacctttaacctacaattctcgtactctgctcgggcaaatggaagcggcatcattagcctatgatgtctcaggtcaaccaataaaaagtgccaccgctgaggcgttagctcaagggaaccctcatcaagttgatttctgccacgttccatacggtgcgagtcatattgaatgcagtttctccgtctcgttttcttctgaactacgtcaaccatataagtgtaactcaagcaaagttaaacaaacgctagtgcaattagtcgagctctacgaaacgaaaatcggctggactgagctagcaacccgatatttgatgaacatttgcaacggtaaatggctgtggaaaaatacccgtaaagcctattgctggaacattgtacttacaccttggccttggaacggggaaaaggttggatttgaagatattcgtactaactacacctcacggcaagactttaaaaataataaaaattggtctgctatagttgaaatgatcaaaaccgcattttctagtactgatgggctggcgatatttgaagtcagggccaccttgcacttgccaacgaatgctatggtgcggccaagccaagttttcacagaaaaagaaagtggcagtaaaagtaaatctaaaactcaaaacagtcgagtttttcagagtacaactattgatggtgaacgatcgccaatactaggggcctttaaaacgggagcagctattgcaaccattgacgactggtatcctgaagccactgagccactaagggtcggacggtttggggttcatcgcgaagatgtcacttgctaccgtcatccgtctaccggaaaagattttttctcgatattacaacaagcagagcactatattgaagtgttgagcgccaacaaaactcccgctcaagaaactatcaacgacatgcactttttaatggctaacctgattaagggtgggatgttccagcataaaggagactgactgtgaaatggtattataagacaatcacctttctgccagagttgtgcaacaacgagtcactggctgcaaagtgtctccgcgttctgcatggatttaactatcagtatgagacacgaaatatcggcgtttcatttccgctttggtgtgatgcaacggttggaaaaaagatttcatttgtcagcaagaacaagatagaactcgacttactacttaaacaacactatttcgtccaaatggaacaacttcaatactttcatatatccaacactgttctcgtcccagaagattgtacatacgtttcctttagacgctgtcaatctatagataagctcacagcagcagggctggcaaggaaaatcagacgcctggagaaacgtgctctatctagaggcgagcaatttgacccatcatcttttgctcaaaaagagcatactgcaatagcgcactaccactcacttggggagtccagcaaacagacgaaccgcaactttcgactcaatatcaggatgctctcggagcaaccccgtgaggggaactcgatttttagtagctatggcttatcaaattcagaaaactcgtttcagcctgtacccttaatctgacgatataccatgggtgaactgccgagtaggtagctgataacagtacagcgcggctgaaatcatcattaaagcggtgaactgccgagtaggtagctgataacggatccgaattcgctgctgccaccgctgagcaataactagcataaccccttggggcctctaaacgggtcttgaggggttttttgctgaaacctcaggcatttgagaagcacacggtcacactgcttccggtagtcaataaaccggtaaaccagcaatagacataagcggctatttaacgaccctgccctgaaccgacgaccgggtcatcgtggccggatcttgcggcccctcggcttgaacgaattgttagacattatttgccgactaccttggtgatctcgcctttcacgtagtggacaaattcttccaactgatctgcgcgcgaggccaagcgatcttcttcttgtccaagataagcctgtctagcttcaagtatgacgggctgatactgggccggcaggcgctccattgcccagtcggcagcgacatccttcggcgcgattttgccggttactgcgctgtaccaaatgcgggacaacgtaagcactacatttcgctcatcgccagcccagtcgggcggcgagttccatagcgttaaggtttcatttagcgcctcaaatagatcctgttcaggaaccggatcaaagagttcctccgccgctggacctaccaaggcaacgctatgttctcttgcttttgtcagcaagatagccagatcaatgtcgatcgtggctggctcgaagatacctgcaagaatgtcattgcgctgccattctccaaattgcagttcgcgcttagctggataacgccacggaatgatgtcgtcgtgcacaacaatggtgacttctacagcgcggagaatctcgctctctccaggggaagccgaagtttccaaaaggtcgttgatcaaagctcgccgcgttgtttcatcaagccttacggtcaccgtaaccagcaaatcaatatcactgtgtggcttcaggccgccatccactgcggagccgtacaaatgtacggccagcaacgtcggttcgagatggcgctcgatgacgccaactacctctgatagttgagtcgatacttcggcgatcaccgcttccctcatactcttcctttttcaatattattgaagcatttatcagggttattgtctcatgagcggatacatatttgaatgtatttagaaaaataaacaaatagctagctcactcggtcgctacgctccgggcgtgagactgcggcgggcgctgcggacacatacaaagttacccacagattccgtggataagcaggggactaacatgtgaggcaaaacagcagggccgcgccggtggcgtttttccataggctccgccctcctgccagagttcacataaacagacgcttttccggtgcatctgtgggagccgtgaggctcaaccatgaatctgacagtacgggcgaaacccgacaggacttaaagatccccaccgtttccggcgggtcgctccctcttgcgctctcctgttccgaccctgccgtttaccggatacctgttccgcctttctcccttacgggaagtgtggcgctttctcatagctcacacactggtatctcggctcggtgtaggtcgttcgctccaagctgggctgtaagcaagaactccccgttcagcccgactgctgcgccttatccggtaactgttcacttgagtccaacccggaaaagcacggtaaaacgccactggcagcagccattggtaactgggagttcgcagaggatttgtttagctaaacacgcggttgctcttgaagtgtgcgccaaagtccggctacactggaaggacagatttggttgctgtgctctgcgaaagccagttaccacggttaagcagttccccaactgacttaaccttcgatcaaaccacctccccaggtggttttttcgtttacagggcaaaagattacgcgcagaaaaaaaggatctcaagaagatcctttgatcttttctactgaaccgctctagatttcagtgcaatttatctcttcaaatgtagcacctgaagtcagccccatacgatataagttgtaattctcatgttagtcatgccccgcgcccaccggaaggagctgactgggttgaaggctctcaagggcatcggtcgagatcccggtgcctaatgagtgagctaacttacattaattgcgttgcgctcactgcccgctttccagtcgggaaacctgtcgtgccagctgcattaatgaatcggccaacgcgcggggagaggcggtttgcgtattgggcgccagggtggtttttcttttcaccagtgagacgggcaacagctgattgcccttcaccgcctggccctgagagagttgcagcaagcggtccacgctggtttgccccagcaggcgaaaatcctgtttgatggtggttaacggcgggatataacatgagctgtcttcggtatcgtcgtatcccactaccgagatgtccgcaccaacgcgcagcccggactcggtaatggcgcgcattgcgcccagcgccatctgatcgttggcaaccagcatcgcagtgggaacgatgccctcattcagcatttgcatggtttgttgaaaaccggacatggcactccagtcgccttcccgttccgctatcggctgaatttgattgcgagtgagatatttatgccagccagccagacgcagacgcgccgagacagaacttaatgggcccgctaacagcgcgatttgctggtgacccaatgcgaccagatgctccacgcccagtcgcgtaccgtcttcatgggagaaaataatactgttgatgggtgtctggtcagagacatcaagaaataacgccggaacattagtgca

SEQ ID NO: 858 - DNA, 11866 bp, Synthetic construct
  source 1..11866: mol_type = other DNA
cgggatctcgacgctctcccttatgcgactcctgcattaggaaattaatacgactcactataggggaattgtgagcggataacaattcccctgtagaaataattttgtttaactttaataaggagatataccatgggcagcagccatcaccatcatcaccacagccaggatccgaattcgagctcggtataaggagatataccatggcgacaagtttacctacgccctcagcaattacgacttcggcgttagagtatgcattccatactcccgctcgcaatctaacgaaatctcgcggaaaaaacattcatcgttatgtcagtgtaaagatgagtaagaggattacggtagaatctactctagagtgtgatgcctgctatcactttgattttgagccaagtattgttcgcttttgcgctcaaccgattcgatttttatattatctcaatggtcagtctcactcctatgttcctgactttctagttcaatttgataccaacgagtttgttctatatgaagtaaagtcagcttatgctaagaacaaacctgattttgatgttgaatgggaggcgaaagtaaaagcagcaactgaactagggctagaattggagcttgttgaagagagtgatattagggatacggttgtattaaataatcttaagcgcatgcatcgttatgcttcgaaagatgagctgaataacgtacataactctctcttaaaaataataaagtacaatggcgcccaatctgcaagatgcttgggagaacagttgggtttaaaaggccgaactgttttaccaattttgtgcgatttgctgtcaaggtgtttactcgatacacgtttggataagcctctatctcttgaatctcgatttgagttggccagttatggctaagaaagggttctcaagtttccatagaaaagcagtctcttcccaagatacgcttgaatcgatagagcttgtctctagcgctaattgtctagaaagtgttacgtatcaagatatatcagcatttcccgaaacaattgcggtagagattaatttccgattaagcattcttcgctttttagcgcgaaagtgcgaaaccattgtggccaaatcaattgaaccacatcgtgtagagctacagcaaaactatagtagaaaaatacccagtgcaataacgatatatcgatggtggcttgcttttcgaaaatcagactacaaccccattagcttagcacctaatatcaaggatagaggtaatagagagacaaaagtgtcaacagttgttgattctattatggaacaggcagttgaaagagttatatctggacgaaaagtcaatgttagctctgcatataaacgtgttcgacgaaaagttcgtcaatacaatctaactcatggaacgaaatacacgtatcctaagtacgaatctgtaagaaagcgagtaaaaaagaaaaccccatttgagttattagccgcagggaaaggggagagagtagctaagagagagtttcgccgaatgggaaaaaagatcctcacgtctagcgtgctagagagggttgaaatagatcacactgtcgttgacctttttgcagtacacgaagagtatcgaatcccattgggccgaccttggcttactcaattggttgattgttacagtaaagctgtaatcggtttttatttaggtttcgagcctcctagctatgtgtcggtttcccttgcacttaagaatgcaatacaacgcaaagatgacttaatctcctcgtatgaatcgatcgagaatgaatggctatgttatggcatcccagacctactcgtaactgataatggtaaagagtttttgtcgaaagcatttgatcaagcatgtgaatcactattgatcaatgtgcatcaaaataaagttgagacgcccgacaacaaacctcatgttgaacgtaactacgggactattaatacttctctgttagacgatttacctgggaaatccttcagccagtaccttcaaagagaagggtacgactctgtgggagaagctacccttacactcaatgagattagagaaatttacttaatttggttggtggatatttatcataaaaaacccaatcagagaggcactaattgtcctaatgttgcgtggaaaaagggttgtcaagaatgggaaccagaggagttctctggttctaaagacgaattagactttaaatttgctattgttgattacaaacaacttactaaagtagggataactgtctacaaagaactgagttatagcaatgaccgtttagctgaatatagagggaagaaaggaaaccataaagttcagttcaagtataaccctgagtgtatggcagttatttgggtgttggatgaggatatgaatgagtactttacagttaatgcgattgactacgaatatgcaagtagagtatcactttggcaacataaatataacatgaaatatcaagcagaactaaattcagcagaatatgatgaggacaaggaaattgatgcagaaataaaaattgaagaaatcgcagatcgttcaattgttaagactaacaaaatcagagctcggaggcgtggcgctaggcatcaagagaatagcgcaagggctaagtcaatcagtaatgcgaacccggcctcgatacaaaaacatgaagatgaaatcgttagtgcagataatgacgattgggatattgattatgtctgagaaatcgtcaaatgagtgaaacgcgtgaggctcgtatatcaagagctaaaagggcatttgtatccacaccgagcgttaggaaaatcttgagttacatggatagatgtagagatctatcagacctagagtctgagcctacatgcatgatggtctatggtgcttcgggtgtaggtaaaacgaccgtcatcaagaaatacttaaatcaaaacagaagagagtccgaagccgggggcgatataataccggttttgcatattgagttgccagacaatgcgaagccagtagatgcagcaagggaattgctggttgaaatgggtgacccgctagcactttatgaaactgacttagctagattgacgaaaagactgactgaattaatccctgcggtcggcgtgaagctgattattatcgatgagttccaacatttggtggaagaaaggtcaaatcgggttcttacccaagtaggtaattggctaaaaatgatacttaacaaaacgaaatgtccaattgttatatttggtatgccatactcaaaagttgtactgcaagcaaactcgcaacttcacgggcgattttccattcaggttgaactgcgcccctttagctaccagggaggtagaggtgtatttaaaacttttttggaataccttgataaagccctaccttttgaaaaacaggctggcttagccaacgaaagtttgcagaaaaaattgtatgcattctctcagggaaacatgcgttcgttgagaaaccttatttatcaagcatctatcgaagcaattgataatcagcatgagacgataaccgaagaagatttcgtttttgcatcgaagttgacatcgggcgataaacccaactcatggaaaaatccttttgaggagggtgttgaggtaacagaagatatgttacgaccgccaccaaaagatattggttgggaggactatttgagacattcaaccccgagagtgagtaaaccaggtagaaataaaaactttttcgaataacctaggctgctggaaggagatatacatatgtttttgcaaagacctaaaccttacagcgatgaaagtttagaaagtttctttatccgagtggctaacaaaaatggctacggtgatgtccatcgcttcctagaagccactaaacgattccttcaagacattgaccataatggctatcaaacctttccgactgatataactcggataaacccatactcagctaaaaacagttccagcgcacgaactgcgtcattcctgaaacttgcacaattgacatttaatgaaccgccagagctacttgggttggcaattaacagaacaaacatgaaatactcgccgtcaactagcgcggttgttagaggtgcagaagtctttcctcgcagtttactacggacgcactccatcccctgctgtcctttgtgtctgcgagaaaatggctacgcctcctacctttggcactttcaggggtacgaatactgccacagccataacgtacctttaattaccacttgtagctgtggtaaggagtttgactaccgagtatctgggttaaagggcatttgctgcaaatgcaaggagcctatcaccttaaccagcagggagaacggtcatgaggcagcgtgtactgtttcaaactggcttgctggccatgaatctaaacctctgccaaatcttcctaaaagctaccgatggggtttagttcattggtggatgggtattaaagatagcgagttcgatcacttttcgttcgttcaatttttctcaaactggccaaggtcattccactcgataatcgaagatgaagtagagttcaaccttgagcatgctgttgtcagcacgtctgaattacgactaaaagatcttcttggtcgattgtttttcggttcaattcggttacctgagcggaatcttcaacacaatatcatccttggtgagcttctctgctatttagaaaatcgtttatggcaagacaagggattaatcgccaacctcaaaatgaacgcgttagaggcgactgtaatgttaaattgtagcctcgatcagattgcatcaatggttgaacaacgcatcttgaagccaaatcgaaaaagcaagcccaacagccctcttgatgttaccgattatctatttcatttcggcgatattttctgtctttggttagctgagttccaaagcgatgagtttaaccgttcgttttatgtgtcgaggtggtaaatgcaaactctgaaagaactaatcgcatccaatcctgacgacttaacaactgaacttaagagagcatttcgtccactcacaccgcatattgcaattgatggtaatgaacttgacgcactgacgatattagtcaatttaaccgataagactgatgatcagaaagacctgctcgatcgagccaaatgcaagcaaaaacttcgagatgaaaaatggtgggctagctgcataaattgcgttaattacagacaaagccataacccaaaattcccggatatacgttctgaaggcgtgattcgaacccaagccctgggtgaattaccgagtttcctactctcgtcctcaaaaatcccaccataccattggtcatatagccatgattcaaaatacgtcaacaaaagcgcattcctcaccaatgagttttgttgggatggtgagatctcatgtttgggtgagcttcttaaagatgcagatcacccactttggaatactttgaaaaagttaggttgttctcaaaaaacttgcaaagcaatggcaaaacaactagctgatattactctcacgactatcaatgtcacactcgcaccaaattacctgactcaaatatctctccccgatagtgatacatcctacatttcactctctcctgttgcatcgctatcgatgcaaagccactttcatcagaggctccaagatgaaaatcggcatagcgcgataacgcggtttagccgaactaccaacatgggggtcactgcgatgacatgtggcggcgcatttagaatgttaaagtctggcgctaagttttccagcccccctcatcaccgattaaacagtaaacgaagttggttgacgtcagagcatgttcagtcattaaaacagtaccagcgcctcaacaaaagcctcatacctgaaaactctcggattgcactccgtagaaaatacaaaatcgagcttcaaaatatggtcagatcttggtttgcaatgcaagaccatacccttgattcgaacatacttatccaacatttgaatcatgacctatcttacttaggagccacaaaacgttttgcatacgatccagcgatgaccaagctctttactgagcttttgaaacgagagttatcaaattcaatcaataatggtgagcaacacactaatggatcgtttttagtcctaccgaatatcagggtttgtggcgcaacagctttaagctccccggtaacggtggggattccatcacttacagctttctttggcttcgttcacgcatttgaacggaatataaatcgcaccacctcatcgtttcgtgttgaatcctttgcgatatgcgtccatcaactacatgtcgagaagcgaggtttgacagcagagtttgtggaaaaaggcgacgggactatatccgctcccgcgacccgggatgactggcagtgtgatgtcgtatttagccttattttgaacaccaactttgctcaacatattgaccaagatacgttagttacatcactaccaaagcgattggctcggggttcagcaaaaattgcgattgatgactttaaacatatcaactcattctcgacattagaaacagcgatcgaatctctgccaatagaagctggtaggtggttatcactttacgcacagtcaaacaataatctaagtgatctattagcagccatgacagaggaccatcagctcatggcaagctgcgtcggttaccacttgttagaagagcccaaagataaaccaaactccctcagaggttacaaacacgctatcgccgagtgcatcattggactcattaactcaatcacctttagctcagagactgatcccaacacaatcttttggtcgctaaagaactatcaaaactacctagtggtacagccaaggagtatcaacgatgaaactaccgacaaatctagcctatgagcgctctatcgacccatcagatgtctgtttttttgtcgtctggcccgatgatagaaaaacacctttaacctacaattctcgtactctgctcgggcaaatggaagcggcatcattagcctatgatgtctcaggtcaaccaataaaaagtgccaccgctgaggcgttagctcaagggaaccctcatcaagttgatttctgccacgttccatacggtgcgagtcatattgaatgcagtttctccgtctcgttttcttctgaactacgtcaaccatataagtgtaactcaagcaaagttaaacaaacgctagtgcaattagtcgagctctacgaaacgaaaatcggctggactgagctagcaacccgatatttgatgaacatttgcaacggtaaatggctgtggaaaaatacccgtaaagcctattgctggaacattgtacttacaccttggccttggaacggggaaaaggttggatttgaagatattcgtactaactacacctcacggcaagactttaaaaataataaaaattggtctgctatagttgaaatgatcaaaaccgcattttctagtactgatgggctggcgatatttgaagtcagggccaccttgcacttgccaacgaatgctatggtgcggccaagccaagttttcacagaaaaagaaagtggcagtaaaagtaaatctaaaactcaaaacagtcgagtttttcagagtacaactattgatggtgaacgatcgccaatactaggggcctttaaaacgggagcagctattgcaaccattgacgactggtatcctgaagccactgagccactaagggtcggacggtttggggttcatcgcgaagatgtcacttgctaccgtcatccgtctaccggaaaagattttttctcgatattacaacaagcagagcactatattgaagtgttgagcgccaacaaaactcccgctcaagaaactatcaacgacatgcactttttaatggctaacctgattaagggtgggatgttccagcataaaggagactgactgtgaaatggtattataagacaatcacctttctgccagagttgtgcaacaacgagtcactggctgcaaagtgtctccgcgttctgcatggatttaactatcagtatgagacacgaaatatcggcgtttcatttccgctttggtgtgatgcaacggttggaaaaaagatttcatttgtcagcaagaacaagatagaactcgacttactacttaaacaacactatttcgtccaaatggaacaacttcaatactttcatatatccaacactgttctcgtcccagaagattgtacatacgtttcctttagacgctgtcaatctatagataagctcacagcagcagggctggcaaggaaaatcagacgcctggagaaacgtgctctatctagaggcgagcaatttgacccatcatcttttgctcaaaaagagcatactgcaatagcgcactaccactcacttggggagtccagcaaacagacgaaccgcaactttcgactcaatatcaggatgctctcggagcaaccccgtgaggggaactcgatttttagtagctatggcttatcaaattcagaaaactcgtttcagcctgtacccttaatctgacgatataccatgggtgaactgccgagtaggtagctgataacgagacctctgtcttgtcagctagggtggtctcgtgaactgccgagtaggtagctgataacggatccgaattcgctgctgccaccgctgagcaataactagcataaccccttggggcctctaaacgggtcttgaggggttttttgctgaaacctcaggcatttgagaagcacacggtcacactgcttccggtagtcaataaaccggtaaaccagcaatagacataagcggctatttaacgaccctgccctgaaccgacgaccgggtcatcgtggccggatcttgcggcccctcggcttgaacgaattgttagacattatttgccgactaccttggtgatctcgcctttcacgtagtggacaaattcttccaactgatctgcgcgcgaggccaagcgatcttcttcttgtccaagataagcctgtctagcttcaagtatgacgggctgatactgggccggcaggcgctccattgcccagtcggcagcgacatccttcggcgcgattttgccggttactgcgctgtaccaaatgcgggacaacgtaagcactacatttcgctcatcgccagcccagtcgggcggcgagttccatagcgttaaggtttcatttagcgcctcaaatagatcctgttcaggaaccggatcaaagagttcctccgccgctggacctaccaaggcaacgctatgttctcttgcttttgtcagcaagatagccagatcaatgtcgatcgtggctggctcgaagatacctgcaagaatgtcattgcgctgccattctccaaattgcagttcgcgcttagctggataacgccacggaatgatgtcgtcgtgcacaacaatggtgacttctacagcgcggagaatctcgctctctccaggggaagccgaagtttccaaaaggtcgttgatcaaagctcgccgcgttgtttcatcaagccttacggtcaccgtaaccagcaaatcaatatcactgtgtggcttcaggccgccatccactgcggagccgtacaaatgtacggccagcaacgtcggttcgagatggcgctcgatgacgccaactacctctgatagttgagtcgatacttcggcgatcaccgcttccctcatactcttcctttttcaatattattgaagcatttatcagggttattgtctcatgagcggatacatatttgaatgtatttagaaaaataaacaaatagctagctcactcggtcgctacgctccgggcgtgagactgcggcgggcgctgcggacacatacaaagttacccacagattccgtggataagcaggggactaacatgtgaggcaaaacagcagggccgcgccggtggcgtttttccataggctccgccctcctgccagagttcacataaacagacgcttttccggtgcatctgtgggagccgtgaggctcaaccatgaatctgacagtacgggcgaaacccgacaggacttaaagatccccaccgtttccggcgggtcgctccctcttgcgctctcctgttccgaccctgccgtttaccggatacctgttccgcctttctcccttacgggaagtgtggcgctttctcatagctcacacactggtatctcggctcggtgtaggtcgttcgctccaagctgggctgtaagcaagaactccccgttcagcccgactgctgcgccttatccggtaactgttcacttgagtccaacccggaaaagcacggtaaaacgccactggcagcagccattggtaactgggagttcgcagaggatttgtttagctaaacacgcggttgctcttgaagtgtgcgccaaagtccggctacactggaaggacagatttggttgctgtgctctgcgaaagccagttaccacggttaagcagttccccaactgacttaaccttcgatcaaaccacctccccaggtggttttttcgtttacagggcaaaagattacgcgcagaaaaaaaggatctcaagaagatcctttgatcttttctactgaaccgctctagatttcagtgcaatttatctcttcaaatgtagcacctgaagtcagccccatacgatataagttgtaattctcatgttagtcatgccccgcgcccaccggaaggagctgactgggttgaaggctctcaagggcatcggtcgagatcccggtgcctaatgagtgagctaacttacattaattgcgttgcgctcactgcccgctttccagtcgggaaacctgtcgtgccagctgcattaatgaatcggccaacgcgcggggagaggcggtttgcgtattgggcgccagggtggtttttcttttcaccagtgagacgggcaacagctgattgcccttcaccgcctggccctgagagagttgcagcaagcggtccacgctggtttgccccagcaggcgaaaatcctgtttgatggtggttaacggcgggatataacatgagctgtcttcggtatcgtcgtatcccactaccgagatgtccgcaccaacgcgcagcccggactcggtaatggcgcgcattgcgcccagcgccatctgatcgttggcaaccagcatcgcagtgggaacgatgccctcattcagcatttgcatggtttgttgaaaaccggacatggcactccagtcgccttcccgttccgctatcggctgaatttgattgcgagtgagatatttatgccagccagccagacgcagacgcgccgagacagaacttaatgggcccgctaacagcgcgatttgctggtgacccaatgcgaccagatgctccacgcccagtcgcgtaccgtcttcatgggagaaaataatactgttgatgggtgtctggtcagagacatcaagaaataacgccggaacattagtgcaggcagcttccacagcaatggcatcctggtcatccagcggatagttaatgatcagcccactgacgcgttgcgcgagaagattgtgcaccgccgctttacaggcttcgacgccgcttcgttctaccatcgacaccaccacgctggcacccagttgatcggcgcgagatttaatcgccgcgacaatttgcgacggcgcgtgcagggccagactggaggtggcaacgccaatcagcaacgactgtttgcccgccagttgttgtgccacgcggttgggaatgtaattcagctccgccatcgccgcttccactttttcccgcgttttcgcagaaacgtggctggcctggttcaccacgcgggaaacggtctgataagagacaccggcatactctgcgacatcgtataacgttactggtttcacattcaccaccctgaattgactctcttccgggcgctatcatgccataccgcgaaaggttttgcgccattcgatggtgtc

SEQ ID NO: 859 - DNA, 11866 bp, Synthetic construct
  source 1..11866: mol_type = other DNA
cgggatctcgacgctctcccttatgcgactcctgcattaggaaattaatacgactcactataggggaattgtgagcggataacaattcccctgtagaaataattttgtttaactttaataaggagatataccatgggcagcagccatcaccatcatcaccacagccaggatccgaattcgagctcggtataaggagatataccatggcgacaagtttacctacgccctcagcaattacgacttcggcgttagagtatgcattccatactcccgctcgcaatctaacgaaatctcgcggaaaaaacattcatcgttatgtcagtgtaaagatgagtaagaggattacggtagaatctactctagagtgtgatgcctgctatcactttgattttgagccaagtattgttcgcttttgcgctcaaccgattcgatttttatattatctcaatggtcagtctcactcctatgttcctgactttctagttcaatttgataccaacgagtttgttctatatgaagtaaagtcagcttatgctaagaacaaacctgattttgatgttgaatgggaggcgaaagtaaaagcagcaactgaactagggctagaattggagcttgttgaagagagtgatattagggatacggttgtattaaataatcttaagcgcatgcatcgttatgcttcgaaagatgagctgaataacgtacataactctctcttaaaaataataaagtacaatggcgcccaatctgcaagatgcttgggagaacagttgggtttaaaaggccgaactgttttaccaattttgtgcgatttgctgtcaaggtgtttactcgatacacgtttggataagcctctatctcttgaatctcgatttgagttggccagttatggctaagaaagggttctcaagtttccatagaaaagcagtctcttcccaagatacgcttgaatcgatagagcttgtctctagcgctaattgtctagaaagtgttacgtatcaagatatatcagcatttcccgaaacaattgcggtagagattaatttccgattaagcattcttcgctttttagcgcgaaagtgcgaaaccattgtggccaaatcaattgaaccacatcgtgtagagctacagcaaaactatagtagaaaaatacccagtgcaataacgatatatcgatggtggcttgcttttcgaaaatcagactacaaccccattagcttagcacctaatatcaaggatagaggtaatagagagacaaaagtgtcaacagttgttgattctattatggaacaggcagttgaaagagttatatctggacgaaaagtcaatgttagctctgcatataaacgtgttcgacgaaaagttcgtcaatacaatctaactcatggaacgaaatacacgtatcctaagtacgaatctgtaagaaagcgagtaaaaaagaaaaccccatttgagttattagccgcagggaaaggggagagagtagctaagagagagtttcgccgaatgggaaaaaagatcctcacgtctagcgtgctagagagggttgaaatagatcacactgtcgttgacctttttgcagtacacgaagagtatcgaatcccattgggccgaccttggcttactcaattggttgattgttacagtaaagctgtaatcggtttttatttaggtttcgagcctcctagctatgtgtcggtttcccttgcacttaagaatgcaatacaacgcaaagatgacttaatctcctcgtatgaatcgatcgagaatgaatggctatgttatggcatcccagacctactcgtaactgataatggtaaagagtttttgtcgaaagcatttgatcaagcatgtgaatcactattgatcaatgtgcatcaaaataaagttgagacgcccgacaacaaacctcatgttgaacgtaactacgggactattaatacttctctgttagacgatttacctgggaaatccttcagccagtaccttcaaagagaagggtacgactctgtgggagaagctacccttacactcaatgagattagagaaatttacttaatttggttggtggatatttatcataaaaaacccaatcagagaggcactaattgtcctaatgttgcgtggaaaaagggttgtcaagaatgggaaccagaggagttctctggttctaaagacgaattagactttaaatttgctattgttgattacaaacaacttactaaagtagggataactgtctacaaagaactgagttatagcaatgaccgtttagctgaatatagagggaagaaaggaaaccataaagttcagttcaagtataaccctgagtgtatggcagttatttgggtgttggatgaggatatgaatgagtactttacagttaatgcgattgactacgaatatgcaagtagagtatcactttggcaacataaatataacatgaaatatcaagcagaactaaattcagcagaatatgatgaggacaaggaaattgatgcagaaataaaaattgaagaaatcgcagatcgttcaattgttaagactaacaaaatcagagctcggaggcgtggcgctaggcatcaagagaatagcgcaagggctaagtcaatcagtaatgcgaacccggcctcgatacaaaaacatgaagatgaaatcgttagtgcagataatgacgattgggatattgattatgtctgagaaatcgtcaaatgagtgaaacgcgtgaggctcgtatatcaagagctaaaagggcatttgtatccacaccgagcgttaggaaaatcttgagttacatggatagatgtagagatctatcagacctagagtctgagcctacatgcatgatggtctatggtgcttcgggtgtaggtaaaacgaccgtcatcaagaaatacttaaatcaaaacagaagagagtccgaagccgggggcgatataataccggttttgcatattgagttgccagacaatgcgaagccagtagatgcagcaagggaattgctggttgaaatgggtgacccgctagcactttatgaaactgacttagctagattgacgaaaagactgactgaattaatccctgcggtcggcgtgaagctgattattatcgatgagttccaacatttggtggaagaaaggtcaaatcgggttcttacccaagtaggtaattggctaaaaatgatacttaacaaaacgaaatgtccaattgttatatttggtatgccatactcaaaagttgtactgcaagcaaactcgcaacttcacgggcgattttccattcaggttgaactgcgcccctttagctaccagggaggtagaggtgtatttaaaacttttttggaataccttgataaagccctaccttttgaaaaacaggctggcttagccaacgaaagtttgcagaaaaaattgtatgcattctctcagggaaacatgcgttcgttgagaaaccttatttatcaagcatctatcgaagcaattgataatcagcatgagacgataaccgaagaagatttcgtttttgcatcgaagttgacatcgggcgataaacccaactcatggaaaaatccttttgaggagggtgttgaggtaacagaagatatgttacgaccgccaccaaaagatattggttgggaggactatttgagacattcaaccccgagagtgagtaaaccaggtagaaataaaaactttttcgaataacctaggctgctggaaggagatatacatatgtttttgcaaagacctaaaccttacagcgatgaaagtttagaaagtttctttatccgagtggctaacaaaaatggctacggtgatgtccatcgcttcctagaagccactaaacgattccttcaagacattgaccataatggctatcaaacctttccgactgatataactcggataaacccatactcagctaaaaacagttccagcgcacgaactgcgtcattcctgaaacttgcacaattgacatttaatgaaccgccagagctacttgggttggcaattaacagaacaaacatgaaatactcgccgtcaactagcgcggttgttagaggtgcagaagtctttcctcgcagtttactacggacgcactccatcccctgctgtcctttgtgtctgcgagaaaatggctacgcctcctacctttggcactttcaggggtacgaatactgccacagccataacgtacctttaattaccacttgtagctgtggtaaggagtttgactaccgagtatctgggttaaagggcatttgctgcaaatgcaaggagcctatcaccttaaccagcagggagaacggtcatgaggcagcgtgtactgtttcaaactggcttgctggccatgaatctaaacctctgccaaatcttcctaaaagctaccgatggggtttagttcattggtggatgggtattaaagatagcgagttcgatcacttttcgttcgttcaatttttctcaaactggccaaggtcattccactcgataatcgaagatgaagtagagttcaaccttgagcatgctgttgtcagcacgtctgaattacgactaaaagatcttcttggtcgattgtttttcggttcaattcggttacctgagcggaatcttcaacacaatatcatccttggtgagcttctctgctatttagaaaatcgtttatggcaagacaagggattaatcgccaacctcaaaatgaacgcgttagaggcgactgtaatgttaaattgtagcctcgatcagattgcatcaatggttgaacaacgcatcttgaagccaaatcgaaaaagcaagcccaacagccctcttgatgttaccgattatctatttcatttcggcgatattttctgtctttggttagctgagttccaaagcgatgagtttaaccgttcgttttatgtgtcgaggtggtaaatgcaaactctgaaagaactaatcgcatccaatcctgacgacttaacaactgaacttaagagagcatttcgtccactcacaccgcatattgcaattgatggtaatgaacttgacgcactgacgatattagtcaatttaaccgataagactgatgatcagaaagacctgctcgatcgagccaaatgcaagcaaaaacttcgagatgaaaaatggtgggctagctgcataaattgcgttaattacagacaaagccataacccaaaattcccggatatacgttctgaaggcgtgattcgaacccaagccctgggtgaattaccgagtttcctactctcgtcctcaaaaatcccaccataccattggtcatatagccatgattcaaaatacgtcaacaaaagcgcattcctcaccaatgagttttgttgggatggtgagatctcatgtttgggtgagcttcttaaagatgcagatcacccactttggaatactttgaaaaagttaggttgttctcaaaaaacttgcaaagcaatggcaaaacaactagctgatattactctcacgactatcaatgtcacactcgcaccaaattacctgactcaaatatctctccccgatagtgatacatcctacatttcactctctcctgttgcatcgctatcgatgcaaagccactttcatcagaggctccaagatgaaaatcggcatagcgcgataacgcggtttagccgaactaccaacatgggggtcactgcgatgacatgtggcggcgcatttagaatgttaaagtctggcgctaagttttccagcccccctcatcaccgattaaacagtaaacgaagttggttgacgtcagagcatgttcagtcattaaaacagtaccagcgcctcaacaaaagcctcatacctgaaaactctcggattgcactccgtagaaaatacaaaatcgagcttcaaaatatggtcagatcttggtttgcaatgcaagaccatacccttgattcgaacatacttatccaacatttgaatcatgacctatcttacttaggagccacaaaacgttttgcatacgatccagcgatgaccaagctctttactgagcttttgaaacgagagttatcaaattcaatcaataatggtgagcaacacactaatggatcgtttttagtcctaccgaatatcagggtttgtggcgcaacagctttaagctccccggtaacggtggggattccatcacttacagctttctttggcttcgttcacgcatttgaacggaatataaatcgcaccacctcatcgtttcgtgttgaatcctttgcgatatgcgtccatcaactacatgtcgagaagcgaggtttgacagcagagtttgtggaaaaaggcgacgggactatatccgctcccgcgacccgggatgactggcagtgtgatgtcgtatttagccttattttgaacaccaactttgctcaacatattgaccaagatacgttagttacatcactaccaaagcgattggctcggggttcagcaaaaattgcgattgatgactttaaacatatcaactcattctcgacattagaaacagcgatcgaatctctgccaatagaagctggtaggtggttatcactttacgcacagtcaaacaataatctaagtgatctattagcagccatgacagaggaccatcagctcatggcaagctgcgtcggttaccacttgttagaagagcccaaagataaaccaaactccctcagaggttacaaacacgctatcgccgagtgcatcattggactcattaactcaatcacctttagctcagagactgatcccaacacaatcttttggtcgctaaagaactatcaaaactacctagtggtacagccaaggagtatcaacgatgaaactaccgacaaatctagcctatgagcgctctatcgacccatcagatgtctgtttttttgtcgtctggcccgatgatagaaaaacacctttaacctacaattctcgtactctgctcgggcaaatggaagcggcatcattagcctatgatgtctcaggtcaaccaataaaaagtgccaccgctgaggcgttagctcaagggaaccctcatcaagttgatttctgccacgttccatacggtgcgagtcatattgaatgcagtttctccgtctcgttttcttctgaactacgtcaaccatataagtgtaactcaagcaaagttaaacaaacgctagtgcaattagtcgagctctacgaaacgaaaatcggctggactgagctagcaacccgatatttgatgaacatttgcaacggtaaatggctgtggaaaaatacccgtaaagcctattgctggaacattgtacttacaccttggccttggaacggggaaaaggttggatttgaagatattcgtactaactacacctcacggcaagactttaaaaataataaaaattggtctgctatagttgaaatgatcaaaaccgcattttctagtactgatgggctggcgatatttgaagtcagggccaccttgcacttgccaacgaatgctatggtgcggccaagccaagttttcacagaaaaagaaagtggcagtaaaagtaaatctaaaactcaaaacagtcgagtttttcagagtacaactattgatggtgaacgatcgccaatactaggggcctttaaaacgggagcagctattgcaaccattgacgactggtatcctgaagccactgagccactaagggtcggacggtttggggttcatcgcgaagatgtcacttgctaccgtcatccgtctaccggaaaagattttttctcgatattacaacaagcagagcactatattgaagtgttgagcgccaacaaaactcccgctcaagaaactatcaacgacatgcactttttaatggctaacctgattaagggtgggatgttccagcataaaggagactgactgtgaaatggtattataagacaatcacctttctgccagagttgtgcaacaacgagtcactggctgcaaagtgtctccgcgttctgcatggatttaactatcagtatgagacacgaaatatcggcgtttcatttccgctttggtgtgatgcaacggttggaaaaaagatttcatttgtcagcaagaacaagatagaactcgacttactacttaaacaacactatttcgtccaaatggaacaacttcaatactttcatatatccaacactgttctcgtcccagaagattgtacatacgtttcctttagacgctgtcaatctatagataagctcacagcagcagggctggcaaggaaaatcagacgcctggagaaacgtgctctatctagaggcgagcaatttgacccatcatcttttgctcaaaaagagcatactgcaatagcgcactaccactcacttggggagtccagcaaacagacgaaccgcaactttcgactcaatatcaggatgctctcggagcaaccccgtgaggggaactcgatttttagtagctatggcttatcaaattcagaaaactcgtttcagcctgtacccttaatctgacgatataccatgggtgaactgccgagtaggtagctgataactgggaggattcataaagcattgtttgttggctgtgaactgccgagtaggtagctgataacggatccgaattcgctgctgccaccgctgagcaataactagcataaccccttggggcctctaaacgggtcttgaggggttttttgctgaaacctcaggcatttgagaagcacacggtcacactgcttccggtagtcaataaaccggtaaaccagcaatagacataagcggctatttaacgaccctgccctgaaccgacgaccgggtcatcgtggccggatcttgcggcccctcggcttgaacgaattgttagacattatttgccgactaccttggtgatctcgcctttcacgtagtggacaaattcttccaactgatctgcgcgcgaggccaagcgatcttcttcttgtccaagataagcctgtctagcttcaagtatgacgggctgatactgggccggcaggcgctccattgcccagtcggcagcgacatccttcggcgcgattttgccggttactgcgctgtaccaaatgcgggacaacgtaagcactacatttcgctcatcgccagcccagtcgggcggcgagttccatagcgttaaggtttcatttagcgcctcaaatagatcctgttcaggaaccggatcaaagagttcctccgccgctggacctaccaaggcaacgctatgttctcttgcttttgtcagcaagatagccagatcaatgtcgatcgtggctggctcgaagatacctgcaagaatgtcattgcgctgccattctccaaattgcagttcgcgcttagctggataacgccacggaatgatgtcgtcgtgcacaacaatggtgacttctacagcgcggagaatctcgctctctccaggggaagccgaagtttccaaaaggtcgttgatcaaagctcgccgcgttgtttcatcaagccttacggtcaccgtaaccagcaaatcaatatcactgtgtggcttcaggccgccatccactgcggagccgtacaaatgtacggccagcaacgtcggttcgagatggcgctcgatgacgccaactacctctgatagttgagtcgatacttcggcgatcaccgcttccctcatactcttcctttttcaatattattgaagcatttatcagggttattgtctcatgagcggatacatatttgaatgtatttagaaaaataaacaaatagctagctcactcggtcgctacgctccgggcgtgagactgcggcgggcgctgcggacacatacaaagttacccacagattccgtggataagcaggggactaacatgtgaggcaaaacagcagggccgcgccggtggcgtttttccataggctccgccctcctgccagagttcacataaacagacgcttttccggtgcatctgtgggagccgtgaggctcaaccatgaatctgacagtacgggcgaaacccgacaggacttaaagatccccaccgtttccggcgggtcgctccctcttgcgctctcctgttccgaccctgccgtttaccggatacctgttccgcctttctcccttacgggaagtgtggcgctttctcatagctcacacactggtatctcggctcggtgtaggtcgttcgctccaagctgggctgtaagcaagaactccccgttcagcccgactgctgcgccttatccggtaactgttcacttgagtccaacccggaaaagcacggtaaaacgccactggcagcagccattggtaactgggagttcgcagaggatttgtttagctaaacacgcggttgctcttgaagtgtgcgccaaagtccggctacactggaaggacagatttggttgctgtgctctgcgaaagccagttaccacggttaagcagttccccaactgacttaaccttcgatcaaaccacctccccaggtggttttttcgtttacagggcaaaagattacgcgcagaaaaaaaggatctcaagaagatcctttgatcttttctactgaaccgctctagatttcagtgcaatttatctcttcaaatgtagcacctgaagtcagccccatacgatataagttgtaattctcatgttagtcatgccccgcgcccaccggaaggagctgactgggttgaaggctctcaagggcatcggtcgagatcccggtgcctaatgagtgagctaacttacattaattgcgttgcgctcactgcccgctttccagtcgggaaacctgtcgtgccagctgcattaatgaatcggccaacgcgcggggagaggcggtttgcgtattgggcgccagggtggtttttcttttcaccagtgagacgggcaacagctgattgcccttcaccgcctggccctgagagagttgcagcaagcggtccacgctggtttgccccagcaggcgaaaatcctgtttgatggtggttaacggcgggatataacatgagctgtcttcggtatcgtcgtatcccactaccgagatgtccgcaccaacgcgcagcccggactcggtaatggcgcgcattgcgcccagcgccatctgatcgttggcaaccagcatcgcagtgggaacgatgccctcattcagcatttgcatggtttgttgaaaaccggacatggcactccagtcgccttcccgttccgctatcggctgaatttgattgcgagtgagatatttatgccagccagccagacgcagacgcgccgagacagaacttaatgggcccgctaacagcgcgatttgctggtgacccaatgcgaccagatgctccacgcccagtcgcgtaccgtcttcatgggagaaaataatactgttgatgggtgtctggtcagagacatcaagaaataacgccggaacattagtgcaggcagcttccacagcaatggcatcctggtcatccagcggatagttaatgatcagcccactgacgcgttgcgcgagaagattgtgcaccgccgctttacaggcttcgacgccgcttcgttctaccatcgacaccaccacgctggcacccagttgatcggcgcgagatttaatcgccgcgacaatttgcgacggcgcgtgcagggccagactggaggtggcaacgccaatcagcaacgactgtttgcccgccagttgttgtgccacgcggttgggaatgtaattcagctccgccatcgccgcttccactttttcccgcgttttcgcagaaacgtggctggcctggttcaccacgcgggaaacggtctgataagagacaccggcatactctgcgacatcgtataacgttactggtttcacattcaccaccctgaattgactctcttccgggcgctatcatgccataccgcgaaaggttttgcgccattcgatggtgtc

SEQ ID NO: 860 - DNA, 11979 bp, Synthetic construct
  source 1..11979: mol_type = other DNA
tttcggggaaatgtgcgcggaacccctatttgtttatttttctaaatacattcaaatatgtatccgctcatgagacaataaccctgataaatgcttcaataatattgaaaaaggaagagtatgagtattcaacatttccgtgtcgcccttattcccttttttgcggcattttgccttcctgtttttgctcacccagaaacgctggtgaaagtaaaagatgctgaagatcagttgggtgcacgagtgggttacatcgaactggatctcaacagcggtaagatccttgagagttttcgccccgaagaacgttttccaatgatgagcacttttaaagttctgctatgtggcgcggtattatcccgtattgacgccgggcaagagcaactcggtcgccgcatacactattctcagaatgacttggttgagtactcaccagtcacagaaaagcatcttacggatggcatgacagtaagagaattatgcagtgctgccataaccatgagtgataacactgcggccaacttacttctgacaacgatcggaggaccgaaggagctaaccgcttttttgcacaacatgggggatcatgtaactcgccttgatcgttgggaaccggagctgaatgaagccataccaaacgacgagcgtgacaccacgatgcctgtagcaatggcaacaacgttgcgcaaactattaactggcgaactacttactctagcttcccggcaacaattaatagactggatggaggcggataaagttgcaggaccacttctgcgctcggcccttccggctggctggtttattgctgataaatctggagccggtgagcgtggctctcgcggtatcattgcagcactggggccagatggtaagccctcccgtatcgtagttatctacacgacggggagtcaggcaactatggatgaacgaaatagacagatcgctgagataggtgcctcactgattaagcattggtaactgtcagaccaagtttactcatatatactttagattgatttaaaacttcatttttaatttaaaaggatctaggtgaagatcctttttgataatctcatgaccaaaatcccttaacgtgagttttcgttccactgagcgtcagaccccgtagaaaagatcaaaggatcttcttgagatcctttttttctgcgcgtaatctgctgcttgcaaacaaaaaaaccaccgctaccagcggtggtttgtttgccggatcaagagctaccaactctttttccgaaggtaactggcttcagcagagcgcagataccaaatactgttcttctagtgtagccgtagttaggccaccacttcaagaactctgtagcaccgcctacatacctcgctctgctaatcctgttaccagtggctgctgccagtggcgataagtcgtgtcttaccgggttggactcaagacgatagttaccggataaggcgcagcggtcgggctgaacggggggttcgtgcacacagcccagcttggagcgaacgacctacaccgaactgagatacctacagcgtgagctatgagaaagcgccacgcttcccgaagggagaaaggcggacaggtatccggtaagcggcagggtcggaacaggagagcgcacgagggagcttccagggggaaacgcctggtatctttatagtcctgtcgggtttcgccacctctgacttgagcgtcgatttttgtgatgctcgtcaggggggcggagcctatggaaaaacgccagcaacgcggcctttttacggttcctggccttttgctggccttttgctcacatgttctttcctgcgttatcccctgattctgtggataaccgtattaccgcctttgagtgagctgataccgctcgccgcagccgaacgaccgagcgcagcgagtcagtgagcgaggagcgactcctgcattaggaaattaatacgactcactataggggaattgtgagcggataacaattcccctgtagaaataattttgtttaactttaataaggagatataccatgggtgaactgccgagtaggtagctgataacgagacctctgtcttgtcagctagggtggtctcgtgaactgccgagtaggtagctgataacggatccgaattcgagcgaaggagatatacatatgtttttgcaaagacctaaaccttacagcgatgaaagtttagaaagtttctttatccgagtggctaacaaaaatggctacggtgatgtccatcgcttcctagaagccactaaacgattccttcaagacattgaccataatggctatcaaacctttccgactgatataactcggataaacccatactcagctaaaaacagttccagcgcacgaactgcgtcattcctgaaacttgcacaattgacatttaatgaaccgccagagctacttgggttggcaattaacagaacaaacatgaaatactcgccgtcaactagcgcggttgttagaggtgcagaagtctttcctcgcagtttactacggacgcactccatcccctgctgtcctttgtgtctgcgagaaaatggctacgcctcctacctttggcactttcaggggtacgaatactgccacagccataacgtacctttaattaccacttgtagctgtggtaaggagtttgactaccgagtatctgggttaaagggcatttgctgcaaatgcaaggagcctatcaccttaaccagcagggagaacggtcatgaggcagcgtgtactgtttcaaactggcttgctggccatgaatctaaacctctgccaaatcttcctaaaagctaccgatggggtttagttcattggtggatgggtattaaagatagcgagttcgatcacttttcgttcgttcaatttttctcaaactggccaaggtcattccactcgataatcgaagatgaagtagagttcaaccttgagcatgctgttgtcagcacgtctgaattacgactaaaagatcttcttggtcgattgtttttcggttcaattcggttacctgagcggaatcttcaacacaatatcatccttggtgagcttctctgctatttagaaaatcgtttatggcaagacaagggattaatcgccaacctcaaaatgaacgcgttagaggcgactgtaatgttaaattgtagcctcgatcagattgcatcaatggttgaacaacgcatcttgaagccaaatcgaaaaagcaagcccaacagccctcttgatgttaccgattatctatttcatttcggcgatattttctgtctttggttagctgagttccaaagcgatgagtttaaccgttcgttttatgtgtcgaggtggtaaatgcaaactctgaaagaactaatcgcatccaatcctgacgacttaacaactgaacttaagagagcatttcgtccactcacaccgcatattgcaattgatggtaatgaacttgacgcactgacgatattagtcaatttaaccgataagactgatgatcagaaagacctgctcgatcgagccaaatgcaagcaaaaacttcgagatgaaaaatggtgggctagctgcataaattgcgttaattacagacaaagccataacccaaaattcccggatatacgttctgaaggcgtgattcgaacccaagccctgggtgaattaccgagtttcctactctcgtcctcaaaaatcccaccataccattggtcatatagccatgattcaaaatacgtcaacaaaagcgcattcctcaccaatgagttttgttgggatggtgagatctcatgtttgggtgagcttcttaaagatgcagatcacccactttggaatactttgaaaaagttaggttgttctcaaaaaacttgcaaagcaatggcaaaacaactagctgatattactctcacgactatcaatgtcacactcgcaccaaattacctgactcaaatatctctccccgatagtgatacatcctacatttcactctctcctgttgcatcgctatcgatgcaaagccactttcatcagaggctccaagatgaaaatcggcatagcgcgataacgcggtttagccgaactaccaacatgggggtcactgcgatgacatgtggcggcgcatttagaatgttaaagtctggcgctaagttttccagcccccctcatcaccgattaaacagtaaacgaagttggttgacgtcagagcatgttcagtcattaaaacagtaccagcgcctcaacaaaagcctcatacctgaaaactctcggattgcactccgtagaaaatacaaaatcgagcttcaaaatatggtcagatcttggtttgcaatgcaagaccatacccttgattcgaacatacttatccaacatttgaatcatgacctatcttacttaggagccacaaaacgttttgcatacgatccagcgatgaccaagctctttactgagcttttgaaacgagagttatcaaattcaatcaataatggtgagcaacacactaatggatcgtttttagtcctaccgaatatcagggtttgtggcgcaacagctttaagctccccggtaacggtggggattccatcacttacagctttctttggcttcgttcacgcatttgaacggaatataaatcgcaccacctcatcgtttcgtgttgaatcctttgcgatatgcgtccatcaactacatgtcgagaagcgaggtttgacagcagagtttgtggaaaaaggcgacgggactatatccgctcccgcgacccgggatgactggcagtgtgatgtcgtatttagccttattttgaacaccaactttgctcaacatattgaccaagatacgttagttacatcactaccaaagcgattggctcggggttcagcaaaaattgcgattgatgactttaaacatatcaactcattctcgacattagaaacagcgatcgaatctctgccaatagaagctggtaggtggttatcactttacgcacagtcaaacaataatctaagtgatctattagcagccatgacagaggaccatcagctcatggcaagctgcgtcggttaccacttgttagaagagcccaaagataaaccaaactccctcagaggttacaaacacgctatcgccgagtgcatcattggactcattaactcaatcacctttagctcagagactgatcccaacacaatcttttggtcgctaaagaactatcaaaactacctagtggtacagccaaggagtatcaacgatgaaactaccgacaaatctagcctatgagcgctctatcgacccatcagatgtctgtttttttgtcgtctggcccgatgatagaaaaacacctttaacctacaattctcgtactctgctcgggcaaatggaagcggcatcattagcctatgatgtctcaggtcaaccaataaaaagtgccaccgctgaggcgttagctcaagggaaccctcatcaagttgatttctgccacgttccatacggtgcgagtcatattgaatgcagtttctccgtctcgttttcttctgaactacgtcaaccatataagtgtaactcaagcaaagttaaacaaacgctagtgcaattagtcgagctctacgaaacgaaaatcggctggactgagctagcaacccgatatttgatgaacatttgcaacggtaaatggctgtggaaaaatacccgtaaagcctattgctggaacattgtacttacaccttggccttggaacggggaaaaggttggatttgaagatattcgtactaactacacctcacggcaagactttaaaaataataaaaattggtctgctatagttgaaatgatcaaaaccgcattttctagtactgatgggctggcgatatttgaagtcagggccaccttgcacttgccaacgaatgctatggtgcggccaagccaagttttcacagaaaaagaaagtggcagtaaaagtaaatctaaaactcaaaacagtcgagtttttcagagtacaactattgatggtgaacgatcgccaatactaggggcctttaaaacgggagcagctattgcaaccattgacgactggtatcctgaagccactgagccactaagggtcggacggtttggggttcatcgcgaagatgtcacttgctaccgtcatccgtctaccggaaaagattttttctcgatattacaacaagcagagcactatattgaagtgttgagcgccaacaaaactcccgctcaagaaactatcaacgacatgcactttttaatggctaacctgattaagggtgggatgttccagcataaaggagactgactgtgaaatggtattataagacaatcacctttctgccagagttgtgcaacaacgagtcactggctgcaaagtgtctccgcgttctgcatggatttaactatcagtatgagacacgaaatatcggcgtttcatttccgctttggtgtgatgcaacggttggaaaaaagatttcatttgtcagcaagaacaagatagaactcgacttactacttaaacaacactatttcgtccaaatggaacaacttcaatactttcatatatccaacactgttctcgtcccagaagattgtacatacgtttcctttagacgctgtcaatctatagataagctcacagcagcagggctggcaaggaaaatcagacgcctggagaaacgtgctctatctagaggcgagcaatttgacccatcatcttttgctcaaaaagagcatactgcaatagcgcactaccactcacttggggagtccagcaaacagacgaaccgcaactttcgactcaatatcaggatgctctcggagcaaccccgtgaggggaactcgatttttagtagctatggcttatcaaattcagaaaactcgtttcagcctgtacccttaatctgacctttaataaggagatataccatggcgacaagtttacctacgccctcagcaattacgacttcggcgttagagtatgcattccatactcccgctcgcaatctaacgaaatctcgcggaaaaaacattcatcgttatgtcagtgtaaagatgagtaagaggattacggtagaatctactctagagtgtgatgcctgctatcactttgattttgagccaagtattgttcgcttttgcgctcaaccgattcgatttttatattatctcaatggtcagtctcactcctatgttcctgactttctagttcaatttgataccaacgagtttgttctatatgaagtaaagtcagcttatgctaagaacaaacctgattttgatgttgaatgggaggcgaaagtaaaagcagcaactgaactagggctagaattggagcttgttgaagagagtgatattagggatacggttgtattaaataatcttaagcgcatgcatcgttatgcttcgaaagatgagctgaataacgtacataactctctcttaaaaataataaagtacaatggcgcccaatctgcaagatgcttgggagaacagttgggtttaaaaggccgaactgttttaccaattttgtgcgatttgctgtcaaggtgtttactcgatacacgtttggataagcctctatctcttgaatctcgatttgagttggccagttatggctaagaaagggttctcaagtttccatagaaaagcagtctcttcccaagatacgcttgaatcgatagagcttgtctctagcgctaattgtctagaaagtgttacgtatcaagatatatcagcatttcccgaaacaattgcggtagagattaatttccgattaagcattcttcgctttttagcgcgaaagtgcgaaaccattgtggccaaatcaattgaaccacatcgtgtagagctacagcaaaactatagtagaaaaatacccagtgcaataacgatatatcgatggtggcttgcttttcgaaaatcagactacaaccccattagcttagcacctaatatcaaggatagaggtaatagagagacaaaagtgtcaacagttgttgattctattatggaacaggcagttgaaagagttatatctggacgaaaagtcaatgttagctctgcatataaacgtgttcgacgaaaagttcgtcaatacaatctaactcatggaacgaaatacacgtatcctaagtacgaatctgtaagaaagcgagtaaaaaagaaaaccccatttgagttattagccgcagggaaaggggagagagtagctaagagagagtttcgccgaatgggaaaaaagatcctcacgtctagcgtgctagagagggttgaaatagatcacactgtcgttgacctttttgcagtacacgaagagtatcgaatcccattgggccgaccttggcttactcaattggttgattgttacagtaaagctgtaatcggtttttatttaggtttcgagcctcctagctatgtgtcggtttcccttgcacttaagaatgcaatacaacgcaaagatgacttaatctcctcgtatgaatcgatcgagaatgaatggctatgttatggcatcccagacctactcgtaactgataatggtaaagagtttttgtcgaaagcatttgatcaagcatgtgaatcactattgatcaatgtgcatcaaaataaagttgagacgcccgacaacaaacctcatgttgaacgtaactacgggactattaatacttctctgttagacgatttacctgggaaatccttcagccagtaccttcaaagagaagggtacgactctgtgggagaagctacccttacactcaatgagattagagaaatttacttaatttggttggtggatatttatcataaaaaacccaatcagagaggcactaattgtcctaatgttgcgtggaaaaagggttgtcaagaatgggaaccagaggagttctctggttctaaagacgaattagactttaaatttgctattgttgattacaaacaacttactaaagtagggataactgtctacaaagaactgagttatagcaatgaccgtttagctgaatatagagggaagaaaggaaaccataaagttcagttcaagtataaccctgagtgtatggcagttatttgggtgttggatgaggatatgaatgagtactttacagttaatgcgattgactacgaatatgcaagtagagtatcactttggcaacataaatataacatgaaatatcaagcagaactaaattcagcagaatatgatgaggacaaggaaattgatgcagaaataaaaattgaagaaatcgcagatcgttcaattgttaagactaacaaaatcagagctcggaggcgtggcgctaggcatcaagagaatagcgcaagggctaagtcaatcagtaatgcgaacccggcctcgatacaaaaacatgaagatgaaatcgttagtgcagataatgacgattgggatattgattatgtctgagaaatcgtcaaatgagtgaaacgcgtgaggctcgtatatcaagagctaaaagggcatttgtatccacaccgagcgttaggaaaatcttgagttacatggatagatgtagagatctatcagacctagagtctgagcctacatgcatgatggtctatggtgcttcgggtgtaggtaaaacgaccgtcatcaagaaatacttaaatcaaaacagaagagagtccgaagccgggggcgatataataccggttttgcatattgagttgccagacaatgcgaagccagtagatgcagcaagggaattgctggttgaaatgggtgacccgctagcactttatgaaactgacttagctagattgacgaaaagactgactgaattaatccctgcggtcggcgtgaagctgattattatcgatgagttccaacatttggtggaagaaaggtcaaatcgggttcttacccaagtaggtaattggctaaaaatgatacttaacaaaacgaaatgtccaattgttatatttggtatgccatactcaaaagttgtactgcaagcaaactcgcaacttcacgggcgattttccattcaggttgaactgcgcccctttagctaccagggaggtagaggtgtatttaaaacttttttggaataccttgataaagccctaccttttgaaaaacaggctggcttagccaacgaaagtttgcagaaaaaattgtatgcattctctcagggaaacatgcgttcgttgagaaaccttatttatcaagcatctatcgaagcaattgataatcagcatgagacgataaccgaagaagatttcgtttttgcatcgaagttgacatcgggcgataaacccaactcatggaaaaatccttttgaggagggtgttgaggtaacagaagatatgttacgaccgccaccaaaagatattggttgggaggactatttgagacattcaaccccgagagtgagtaaaccaggtagaaataaaaactttttcgaataacctaggctgctgcgctgctgccaccgctgagcaataactagcataaccccttggggcctctaaacgggtcttgaggggttttttgctgaaacctcaggcatttgttgttgatacaaccataaaatgataattacacccataaattgataattatcacacccataaattgatattgcctcttcatggtctaaacttcagtaagtttacgacattttcctcgaggtcatttccggggatccatggagaaaaaaatcactggatataccaccgttgatatatcccaatggcatcgtaaagaacattttgaggcatttcagtcagttgctcaatgtacctataaccagaccgttcagctggatattacggcctttttaaagaccgtaaagaaaaataagcacaagttttatccggcctttattcacattcttgcccgcctgatgaatgctcatccggagttccgtatggcaatgaaagacggtgagctggtgatatgggatagtgttcacccttgttacaccgttttccatgagcaaactgaaacgttttcatcgctctggagtgaataccacgacgatttccggcagtttctacacatatattcgcaagatgtggcgtgttacggtgaaaacctggcctatttccctaaagggtttattgagaatatgtttttcgtctcagccaatccctgggtgagtttcaccagttttgatttaaacgtggccaatatggacaacttcttcgcccccgttttcactatgggcaaatattatacgcaaggcgacaaggtgctgatgccgctggcgattcaggttcatcatgccgtttgtgatggcttccatgtcggcagaatgcttaatgaattacaacagtactgcgatgagtggcagggcggggcgtaatttttttaaggcagttattggtgcccttctagagtccttactgcagtagttttgctgaaatactcgattcacaaaaatatcaacttatggttgttttgtgagatatcaatatatggttgttttgtggttaagttgctgattataaataattattaaatatcactttatggttgcatcaacaggtaccgagctcgaattcactggccgtcgttttacaacgtcgtgactgggaaaaccctggcgttacccaacttaatcgccttgcagcacatccccctttcgccagctggcgtaatagcgaagaggcccgcaccgatcgcccttcccaacagttgcgcagcctgaatggcgaatggcgcctgatgcggtattttctccttacgcatctgtgcggtatttcacaccgcatatggtgcactctcagtacaatctgctctgatgccgcatagttaagccagccccgacacccgccaacacccgctgacgcgccctgacgggcttgtctgctcccggcatccgcttacagacaagctgtgaccgtctccgggagctgcatgtgtcagaggttttcaccgtcatcaccgaaacgcgcgagacgaaagggcctcgtgatacgcctatttttataggttaatgtcatgataataatggtttcttagacgtcaggtggcact

SEQ ID NO: 861 - DNA, 11979 bp, Synthetic construct
  source 1..11979: mol_type = other DNA
tttcggggaaatgtgcgcggaacccctatttgtttatttttctaaatacattcaaatatgtatccgctcatgagacaataaccctgataaatgcttcaataatattgaaaaaggaagagtatgagtattcaacatttccgtgtcgcccttattcccttttttgcggcattttgccttcctgtttttgctcacccagaaacgctggtgaaagtaaaagatgctgaagatcagttgggtgcacgagtgggttacatcgaactggatctcaacagcggtaagatccttgagagttttcgccccgaagaacgttttccaatgatgagcacttttaaagttctgctatgtggcgcggtattatcccgtattgacgccgggcaagagcaactcggtcgccgcatacactattctcagaatgacttggttgagtactcaccagtcacagaaaagcatcttacggatggcatgacagtaagagaattatgcagtgctgccataaccatgagtgataacactgcggccaacttacttctgacaacgatcggaggaccgaaggagctaaccgcttttttgcacaacatgggggatcatgtaactcgccttgatcgttgggaaccggagctgaatgaagccataccaaacgacgagcgtgacaccacgatgcctgtagcaatggcaacaacgttgcgcaaactattaactggcgaactacttactctagcttcccggcaacaattaatagactggatggaggcggataaagttgcaggaccacttctgcgctcggcccttccggctggctggtttattgctgataaatctggagccggtgagcgtggctctcgcggtatcattgcagcactggggccagatggtaagccctcccgtatcgtagttatctacacgacggggagtcaggcaactatggatgaacgaaatagacagatcgctgagataggtgcctcactgattaagcattggtaactgtcagaccaagtttactcatatatactttagattgatttaaaacttcatttttaatttaaaaggatctaggtgaagatcctttttgataatctcatgaccaaaatcccttaacgtgagttttcgttccactgagcgtcagaccccgtagaaaagatcaaaggatcttcttgagatcctttttttctgcgcgtaatctgctgcttgcaaacaaaaaaaccaccgctaccagcggtggtttgtttgccggatcaagagctaccaactctttttccgaaggtaactggcttcagcagagcgcagataccaaatactgttcttctagtgtagccgtagttaggccaccacttcaagaactctgtagcaccgcctacatacctcgctctgctaatcctgttaccagtggctgctgccagtggcgataagtcgtgtcttaccgggttggactcaagacgatagttaccggataaggcgcagcggtcgggctgaacggggggttcgtgcacacagcccagcttggagcgaacgacctacaccgaactgagatacctacagcgtgagctatgagaaagcgccacgcttcccgaagggagaaaggcggacaggtatccggtaagcggcagggtcggaacaggagagcgcacgagggagcttccagggggaaacgcctggtatctttatagtcctgtcgggtttcgccacctctgacttgagcgtcgatttttgtgatgctcgtcaggggggcggagcctatggaaaaacgccagcaacgcggcctttttacggttcctggccttttgctggccttttgctcacatgttctttcctgcgttatcccctgattctgtggataaccgtattaccgcctttgagtgagctgataccgctcgccgcagccgaactaccgagcgcagcgagtcagtgagcgaggagcgactcctgcattaggaaattaatacgactcactataggggaattgtgagcggataacaattcccctgtagaaataattttgtttaactttaataaggagatataccatgggtgaactgccgagtaggtagctgataacagtacagcgcggctgaaatcatcattaaagcggtgaactgccgagtaggtagctgataacggatccgaattcgagcgaaggagatatacatatgtttttgcaaagacctaaaccttacagcgatgaaagtttagaaagtttctttatccgagtggctaacaaaaatggctacggtgatgtccatcgcttcctagaagccactaaacgattccttcaagacattgaccataatggctatcaaacctttccgactgatataactcggataaacccatactcagctaaaaacagttccagcgcacgaactgcgtcattcctgaaacttgcacaattgacatttaatgaaccgccagagctacttgggttggcaattaacagaacaaacatgaaatactcgccgtcaactagcgcggttgttagaggtgcagaagtctttcctcgcagtttactacggacgcactccatcccctgctgtcctttgtgtctgcgagaaaatggctacgcctcctacctttggcactttcaggggtacgaatactgccacagccataacgtacctttaattaccacttgtagctgtggtaaggagtttgactaccgagtatctgggttaaagggcatttgctgcaaatgcaaggagcctatcaccttaaccagcagggagaacggtcatgaggcagcgtgtactgtttcaaactggcttgctggccatgaatctaaacctctgccaaatcttcctaaaagctaccgatggggtttagttcattggtggatgggtattaaagatagcgagttcgatcacttttcgttcgttcaatttttctcaaactggccaaggtcattccactcgataatcgaagatgaagtagagttcaaccttgagcatgctgttgtcagcacgtctgaattacgactaaaagatcttcttggtcgattgtttttcggttcaattcggttacctgagcggaatcttcaacacaatatcatccttggtgagcttctctgctatttagaaaatcgtttatggcaagacaagggattaatcgccaacctcaaaatgaacgcgttagaggcgactgtaatgttaaattgtagcctcgatcagattgcatcaatggttgaacaacgcatcttgaagccaaatcgaaaaagcaagcccaacagccctcttgatgttaccgattatctatttcatttcggcgatattttctgtctttggttagctgagttccaaagcgatgagtttaaccgttcgttttatgtgtcgaggtggtaaatgcaaactctgaaagaactaatcgcatccaatcctgacgacttaacaactgaacttaagagagcatttcgtccactcacaccgcatattgcaattgatggtaatgaacttgacgcactgacgatattagtcaatttaaccgataagactgatgatcagaaagacctgctcgatcgagccaaatgcaagcaaaaacttcgagatgaaaaatggtgggctagctgcataaattgcgttaattacagacaaagccataacccaaaattcccggatatacgttctgaaggcgtgattcgaacccaagccctgggtgaattaccgagtttcctactctcgtcctcaaaaatcccaccataccattggtcatatagccatgattcaaaatacgtcaacaaaagcgcattcctcaccaatgagttttgttgggatggtgagatctcatgtttgggtgagcttcttaaagatgcagatcacccactttggaatactttgaaaaagttaggttgttctcaaaaaacttgcaaagcaatggcaaaacaactagctgatattactctcacgactatcaatgtcacactcgcaccaaattacctgactcaaatatctctccccgatagtgatacatcctacatttcactctctcctgttgcatcgctatcgatgcaaagccactttcatcagaggctccaagatgaaaatcggcatagcgcgataacgcggtttagccgaactaccaacatgggggtcactgcgatgacatgtggcggcgcatttagaatgttaaagtctggcgctaagttttccagcccccctcatcaccgattaaacagtaaacgaagttggttgacgtcagagcatgttcagtcattaaaacagtaccagcgcctcaacaaaagcctcatacctgaaaactctcggattgcactccgtagaaaatacaaaatcgagcttcaaaatatggtcagatcttggtttgcaatgcaagaccatacccttgattcgaacatacttatccaacatttgaatcatgacctatcttacttaggagccacaaaacgttttgcatacgatccagcgatgaccaagctctttactgagcttttgaaacgagagttatcaaattcaatcaataatggtgagcaacacactaatggatcgtttttagtcctaccgaatatcagggtttgtggcgcaacagctttaagctccccggtaacggtggggattccatcacttacagctttctttggcttcgttcacgcatttgaacggaatataaatcgcaccacctcatcgtttcgtgttgaatcctttgcgatatgcgtccatcaactacatgtcgagaagcgaggtttgacagcagagtttgtggaaaaaggcgacgggactatatccgctcccgcgacccgggatgactggcagtgtgatgtcgtatttagccttattttgaacaccaactttgctcaacatattgaccaagatacgttagttacatcactaccaaagcgattggctcggggttcagcaaaaattgcgattgatgactttaaacatatcaactcattctcgacattagaaacagcgatcgaatctctgccaatagaagctggtaggtggttatcactttacgcacagtcaaacaataatctaagtgatctattagcagccatgacagaggaccatcagctcatggcaagctgcgtcggttaccacttgttagaagagcccaaagataaaccaaactccctcagaggttacaaacacgctatcgccgagtgcatcattggactcattaactcaatcacctttagctcagagactgatcccaacacaatcttttggtcgctaaagaactatcaaaactacctagtggtacagccaaggagtatcaacgatgaaactaccgacaaatctagcctatgagcgctctatcgacccatcagatgtctgtttttttgtcgtctggcccgatgatagaaaaacacctttaacctacaattctcgtactctgctcgggcaaatggaagcggcatcattagcctatgatgtctcaggtcaaccaataaaaagtgccaccgctgaggcgttagctcaagggaaccctcatcaagttgatttctgccacgttccatacggtgcgagtcatattgaatgcagtttctccgtctcgttttcttctgaactacgtcaaccatataagtgtaactcaagcaaagttaaacaaacgctagtgcaattagtcgagctctacgaaacgaaaatcggctggactgagctagcaacccgatatttgatgaacatttgcaacggtaaatggctgtggaaaaatacccgtaaagcctattgctggaacattgtacttacaccttggccttggaacggggaaaaggttggatttgaagatattcgtactaactacacctcacggcaagactttaaaaataataaaaattggtctgctatagttgaaatgatcaaaaccgcattttctagtactgatgggctggcgatatttgaagtcagggccaccttgcacttgccaacgaatgctatggtgcggccaagccaagttttcacagaaaaagaaagtggcagtaaaagtaaatctaaaactcaaaacagtcgagtttttcagagtacaactattgatggtgaacgatcgccaatactaggggcctttaaaacgggagcagctattgcaaccattgacgactggtatcctgaagccactgagccactaagggtcggacggtttggggttcatcgcgaagatgtcacttgctaccgtcatccgtctaccggaaaagattttttctcgatattacaacaagcagagcactatattgaagtgttgagcgccaacaaaactcccgctcaagaaactatcaacgacatgcactttttaatggctaacctgattaagggtgggatgttccagcataaaggagactgactgtgaaatggtattataagacaatcacctttctgccagagttgtgcaacaacgagtcactggctgcaaagtgtctccgcgttctgcatggatttaactatcagtatgagacacgaaatatcggcgtttcatttccgctttggtgtgatgcaacggttggaaaaaagatttcatttgtcagcaagaacaagatagaactcgacttactacttaaacaacactatttcgtccaaatggaacaacttcaatactttcatatatccaacactgttctcgtcccagaagattgtacatacgtttcctttagacgctgtcaatctatagataagctcacagcagcagggctggcaaggaaaatcagacgcctggagaaacgtgctctatctagaggcgagcaatttgacccatcatcttttgctcaaaaagagcatactgcaatagcgcactaccactcacttggggagtccagcaaacagacgaaccgcaactttcgactcaatatcaggatgctctcggagcaaccccgtgaggggaactcgatttttagtagctatggcttatcaaattcagaaaactcgtttcagcctgtacccttaatctgacctttaataaggagatataccatggcgacaagtttacctacgccctcagcaattacgacttcggcgttagagtatgcattccatactcccgctcgcaatctaacgaaatctcgcggaaaaaacattcatcgttatgtcagtgtaaagatgagtaagaggattacggtagaatctactctagagtgtgatgcctgctatcactttgattttgagccaagtattgttcgcttttgcgctcaaccgattcgatttttatattatctcaatggtcagtctcactcctatgttcctgactttctagttcaatttgataccaacgagtttgttctatatgaagtaaagtcagcttatgctaagaacaaacctgattttgatgttgaatgggaggcgaaagtaaaagcagcaactgaactagggctagaattggagcttgttgaagagagtgatattagggatacggttgtattaaataatcttaagcgcatgcatcgttatgcttcgaaagatgagctgaataacgtacataactctctcttaaaaataataaagtacaatggcgcccaatctgcaagatgcttgggagaacagttgggtttaaaaggccgaactgttttaccaattttgtgcgatttgctgtcaaggtgtttactcgatacacgtttggataagcctctatctcttgaatctcgatttgagttggccagttatggctaagaaagggttctcaagtttccatagaaaagcagtctcttcccaagatacgcttgaatcgatagagcttgtctctagcgctaattgtctagaaagtgttacgtatcaagatatatcagcatttcccgaaacaattgcggtagagattaatttccgattaagcattcttcgctttttagcgcgaaagtgcgaaaccattgtggccaaatcaattgaaccacatcgtgtagagctacagcaaaactatagtagaaaaatacccagtgcaataacgatatatcgatggtggcttgcttttcgaaaatcagactacaaccccattagcttagcacctaatatcaaggatagaggtaatagagagacaaaagtgtcaacagttgttgattctattatggaacaggcagttgaaagagttatatctggacgaaaagtcaatgttagctctgcatataaacgtgttcgacgaaaagttcgtcaatacaatctaactcatggaacgaaatacacgtatcctaagtacgaatctgtaagaaagcgagtaaaaaagaaaaccccatttgagttattagccgcagggaaaggggagagagtagctaagagagagtttcgccgaatgggaaaaaagatcctcacgtctagcgtgctagagagggttgaaatagatcacactgtcgttgacctttttgcagtacacgaagagtatcgaatcccattgggccgaccttggcttactcaattggttgattgttacagtaaagctgtaatcggtttttatttaggtttcgagcctcctagctatgtgtcggtttcccttgcacttaagaatgcaatacaacgcaaagatgacttaatctcctcgtatgaatcgatcgagaatgaatggctatgttatggcatcccagacctactcgtaactgataatggtaaagagtttttgtcgaaagcatttgatcaagcatgtgaatcactattgatcaatgtgcatcaaaataaagttgagacgcccgacaacaaacctcatgttgaacgtaactacgggactattaatacttctctgttagacgatttacctgggaaatccttcagccagtaccttcaaagagaagggtacgactctgtgggagaagctacccttacactcaatgagattagagaaatttacttaatttggttggtggatatttatcataaaaaacccaatcagagaggcactaattgtcctaatgttgcgtggaaaaagggttgtcaagaatgggaaccagaggagttctctggttctaaagacgaattagactttaaatttgctattgttgattacaaacaacttactaaagtagggataactgtctacaaagaactgagttatagcaatgaccgtttagctgaatatagagggaagaaaggaaaccataaagttcagttcaagtataaccctgagtgtatggcagttatttgggtgttggatgaggatatgaatgagtactttacagttaatgcgattgactacgaatatgcaagtagagtatcactttggcaacataaatataacatgaaatatcaagcagaactaaattcagcagaatatgatgaggacaaggaaattgatgcagaaataaaaattgaagaaatcgcagatcgttcaattgttaagactaacaaaatcagagctcggaggcgtggcgctaggcatcaagagaatagcgcaagggctaagtcaatcagtaatgcgaacccggcctcgatacaaaaacatgaagatgaaatcgttagtgcagataatgacgattgggatattgattatgtctgagaaatcgtcaaatgagtgaaacgcgtgaggctcgtatatcaagagctaaaagggcatttgtatccacaccgagcgttaggaaaatcttgagttacatggatagatgtagagatctatcagacctagagtctgagcctacatgcatgatggtctatggtgcttcgggtgtaggtaaaacgaccgtcatcaagaaatacttaaatcaaaacagaagagagtccgaagccgggggcgatataataccggttttgcatattgagttgccagacaatgcgaagccagtagatgcagcaagggaattgctggttgaaatgggtgacccgctagcactttatgaaactgacttagctagattgacgaaaagactgactgaattaatccctgcggtcggcgtgaagctgattattatcgatgagttccaacatttggtggaagaaaggtcaaatcgggttcttacccaagtaggtaattggctaaaaatgatacttaacaaaacgaaatgtccaattgttatatttggtatgccatactcaaaagttgtactgcaagcaaactcgcaacttcacgggcgattttccattcaggttgaactgcgcccctttagctaccagggaggtagaggtgtatttaaaacttttttggaataccttgataaagccctaccttttgaaaaacaggctggcttagccaacgaaagtttgcagaaaaaattgtatgcattctctcagggaaacatgcgttcgttgagaaaccttatttatcaagcatctatcgaagcaattgataatcagcatgagacgataaccgaagaagatttcgtttttgcatcgaagttgacatcgggcgataaacccaactcatggaaaaatccttttgaggagggtgttgaggtaacagaagatatgttacgaccgccaccaaaagatattggttgggaggactatttgagacattcaaccccgagagtgagtaaaccaggtagaaataaaaactttttcgaataacctaggctgctgcgctgctgccaccgctgagcaataactagcataaccccttggggcctctaaacgggtcttgaggggttttttgctgaaacctcaggcatttgttgttgatacaaccataaaatgataattacacccataaattgataattatcacacccataaattgatattgcctcttcatggtctaaacttcagtaagtttacgacattttcctcgaggtcatttccggggatccatggagaaaaaaatcactggatataccaccgttgatatatcccaatggcatcgtaaagaacattttgaggcatttcagtcagttgctcaatgtacctataaccagaccgttcagctggatattacggcctttttaaagaccgtaaagaaaaataagcacaagttttatccggcctttattcacattcttgcccgcctgatgaatgctcatccggagttccgtatggcaatgaaagacggtgagctggtgatatgggatagtgttcacccttgttacaccgttttccatgagcaaactgaaacgttttcatcgctctggagtgaataccacgacgatttccggcagtttctacacatatattcgcaagatgtggcgtgttacggtgaaaacctggcctatttccctaaagggtttattgagaatatgtttttcgtctcagccaatccctgggtgagtttcaccagttttgatttaaacgtggccaatatggacaacttcttcgcccccgttttcactatgggcaaatattatacgcaaggcgacaaggtgctgatgccgctggcgattcaggttcatcatgccgtttgtgatggcttccatgtcggcagaatgcttaatgaattacaacagtactgcgatgagtggcagggcggggcgtaatttttttaaggcagttattggtgcccttctagagtccttactgcagtagttttgctgaaatactcgattcacaaaaatatcaacttatggttgttttgtgagatatcaatatatggttgttttgtggttaagttgctgattataaataattattaaatatcactttatggttgcatcaacaggtaccgagctcgaattcactggccgtcgttttacaacgtcgtgactgggaaaaccctggcgttacccaacttaatcgccttgcagcacatccccctttcgccagctggcgtaatagcgaagaggcccgcaccgatcgcccttcccaacagttgcgcagcctgaatggcgaatggcgcctgatgcggtattttctccttacgcatctgtgcggtatttcacaccgcatatggtgcactctcagtacaatctgctctgatgccgcatagttaagccagccccgacacccgccaacacccgctgacgcgccctgacgggcttgtctgctcccggcatccgcttacagacaagctgtgaccgtctccgggagctgcatgtgtcagaggttttcaccgtcatcaccgaaacgcgcgagacgaaagggcctcgtgatacgcctatttttataggttaatgtcatgataataatggtttcttagacgtcaggtggcact

SEQ ID NO: 862 - DNA, 11353 bp, Synthetic construct
  source 1..11353: mol_type = other DNA
tttcggggaaatgtgcgcggaacccctatttgtttatttttctaaatacattcaaatatgtatccgctcatgagacaataaccctgataaatgcttcaataatattgaaaaaggaagagtatgagtattcaacatttccgtgtcgcccttattcccttttttgcggcattttgccttcctgtttttgctcacccagaaacgctggtgaaagtaaaagatgctgaagatcagttgggtgcacgagtgggttacatcgaactggatctcaacagcggtaagatccttgagagttttcgccccgaagaacgttttccaatgatgagcacttttaaagttctgctatgtggcgcggtattatcccgtattgacgccgggcaagagcaactcggtcgccgcatacactattctcagaatgacttggttgagtactcaccagtcacagaaaagcatcttacggatggcatgacagtaagagaattatgcagtgctgccataaccatgagtgataacactgcggccaacttacttctgacaacgatcggaggaccgaaggagctaaccgcttttttgcacaacatgggggatcatgtaactcgccttgatcgttgggaaccggagctgaatgaagccataccaaacgacgagcgtgacaccacgatgcctgtagcaatggcaacaacgttgcgcaaactattaactggcgaactacttactctagcttcccggcaacaattaatagactggatggaggcggataaagttgcaggaccacttctgcgctcggcccttccggctggctggtttattgctgataaatctggagccggtgagcgtggctctcgcggtatcattgcagcactggggccagatggtaagccctcccgtatcgtagttatctacacgacggggagtcaggcaactatggatgaacgaaatagacagatcgctgagataggtgcctcactgattaagcattggtaactgtcagaccaagtttactcatatatactttagattgatttaaaacttcatttttaatttaaaaggatctaggtgaagatcctttttgataatctcatgaccaaaatcccttaacgtgagttttcgttccactgagcgtcagaccccgtagaaaagatcaaaggatcttcttgagatcctttttttctgcgcgtaatctgctgcttgcaaacaaaaaaaccaccgctaccagcggtggtttgtttgccggatcaagagctaccaactctttttccgaaggtaactggcttcagcagagcgcagataccaaatactgttcttctagtgtagccgtagttaggccaccacttcaagaactctgtagcaccgcctacatacctcgctctgctaatcctgttaccagtggctgctgccagtggcgataagtcgtgtcttaccgggttggactcaagacgatagttaccggataaggcgcagcggtcgggctgaacggggggttcgtgcacacagcccagcttggagcgaacgacctacaccgaactgagatacctacagcgtgagctatgagaaagcgccacgcttcccgaagggagaaaggcggacaggtatccggtaagcggcagggtcggaacaggagagcgcacgagggagcttccagggggaaacgcctggtatctttatagtcctgtcgggtttcgccacctctgacttgagcgtcgatttttgtgatgctcgtcaggggggcggagcctatggaaaaacgccagcaacgcggcctttttacggttcctggccttttgctggccttttgctcacatgttctttcctgcgttatcccctgattctgtggataaccgtattaccgcctttgagtgagctgataccgctcgccgcagccgaacgaccgagcgcagcgagtcagtgagcgaggaagcggaagagcgcccaatacgcaaaccgcctctccccgcgcgttggccgattcattaatgcagcccaagctttgttgatacaaccataaaatgataattacacccataaattgataattatcacacccataaattgatattgcctcttcatggtctaaacttcagtaagtttacgacattttcctcgaggtcatttccggggcgactcctgcattaggaaattaatacgactcactataggggaattgtgagcggataacaattcccctgtagaaataattttgtttaactttaataaggagatataccatgggtgaactgccgagtaggtagctgataacgagacctctgtcttgtcagctagggtggtctcgtgaactgccgagtaggtagctgataacggatccgaattcgagcgaaggagatatacatatgtttttgcaaagacctaaaccttacagcgatgaaagtttagaaagtttctttatccgagtggctaacaaaaatggctacggtgatgtccatcgcttcctagaagccactaaacgattccttcaagacattgaccataatggctatcaaacctttccgactgatataactcggataaacccatactcagctaaaaacagttccagcgcacgaactgcgtcattcctgaaacttgcacaattgacatttaatgaaccgccagagctacttgggttggcaattaacagaacaaacatgaaatactcgccgtcaactagcgcggttgttagaggtgcagaagtctttcctcgcagtttactacggacgcactccatcccctgctgtcctttgtgtctgcgagaaaatggctacgcctcctacctttggcactttcaggggtacgaatactgccacagccataacgtacctttaattaccacttgtagctgtggtaaggagtttgactaccgagtatctgggttaaagggcatttgctgcaaatgcaaggagcctatcaccttaaccagcagggagaacggtcatgaggcagcgtgtactgtttcaaactggcttgctggccatgaatctaaacctctgccaaatcttcctaaaagctaccgatggggtttagttcattggtggatgggtattaaagatagcgagttcgatcacttttcgttcgttcaatttttctcaaactggccaaggtcattccactcgataatcgaagatgaagtagagttcaaccttgagcatgctgttgtcagcacgtctgaattacgactaaaagatcttcttggtcgattgtttttcggttcaattcggttacctgagcggaatcttcaacacaatatcatccttggtgagcttctctgctatttagaaaatcgtttatggcaagacaagggattaatcgccaacctcaaaatgaacgcgttagaggcgactgtaatgttaaattgtagcctcgatcagattgcatcaatggttgaacaacgcatcttgaagccaaatcgaaaaagcaagcccaacagccctcttgatgttaccgattatctatttcatttcggcgatattttctgtctttggttagctgagttccaaagcgatgagtttaaccgttcgttttatgtgtcgaggtggtaaatgcaaactctgaaagaactaatcgcatccaatcctgacgacttaacaactgaacttaagagagcatttcgtccactcacaccgcatattgcaattgatggtaatgaacttgacgcactgacgatattagtcaatttaaccgataagactgatgatcagaaagacctgctcgatcgagccaaatgcaagcaaaaacttcgagatgaaaaatggtgggctagctgcataaattgcgttaattacagacaaagccataacccaaaattcccggatatacgttctgaaggcgtgattcgaacccaagccctgggtgaattaccgagtttcctactctcgtcctcaaaaatcccaccataccattggtcatatagccatgattcaaaatacgtcaacaaaagcgcattcctcaccaatgagttttgttgggatggtgagatctcatgtttgggtgagcttcttaaagatgcagatcacccactttggaatactttgaaaaagttaggttgttctcaaaaaacttgcaaagcaatggcaaaacaactagctgatattactctcacgactatcaatgtcacactcgcaccaaattacctgactcaaatatctctccccgatagtgatacatcctacatttcactctctcctgttgcatcgctatcgatgcaaagccactttcatcagaggctccaagatgaaaatcggcatagcgcgataacgcggtttagccgaactaccaacatgggggtcactgcgatgacatgtggcggcgcatttagaatgttaaagtctggcgctaagttttccagcccccctcatcaccgattaaacagtaaacgaagttggttgacgtcagagcatgttcagtcattaaaacagtaccagcgcctcaacaaaagcctcatacctgaaaactctcggattgcactccgtagaaaatacaaaatcgagcttcaaaatatggtcagatcttggtttgcaatgcaagaccatacccttgattcgaacatacttatccaacatttgaatcatgacctatcttacttaggagccacaaaacgttttgcatacgatccagcgatgaccaagctctttactgagcttttgaaacgagagttatcaaattcaatcaataatggtgagcaacacactaatggatcgtttttagtcctaccgaatatcagggtttgtggcgcaacagctttaagctccccggtaacggtggggattccatcacttacagctttctttggcttcgttcacgcatttgaacggaatataaatcgcaccacctcatcgtttcgtgttgaatcctttgcgatatgcgtccatcaactacatgtcgagaagcgaggtttgacagcagagtttgtggaaaaaggcgacgggactatatccgctcccgcgacccgggatgactggcagtgtgatgtcgtatttagccttattttgaacaccaactttgctcaacatattgaccaagatacgttagttacatcactaccaaagcgattggctcggggttcagcaaaaattgcgattgatgactttaaacatatcaactcattctcgacattagaaacagcgatcgaatctctgccaatagaagctggtaggtggttatcactttacgcacagtcaaacaataatctaagtgatctattagcagccatgacagaggaccatcagctcatggcaagctgcgtcggttaccacttgttagaagagcccaaagataaaccaaactccctcagaggttacaaacacgctatcgccgagtgcatcattggactcattaactcaatcacctttagctcagagactgatcccaacacaatcttttggtcgctaaagaactatcaaaactacctagtggtacagccaaggagtatcaacgatgaaactaccgacaaatctagcctatgagcgctctatcgacccatcagatgtctgtttttttgtcgtctggcccgatgatagaaaaacacctttaacctacaattctcgtactctgctcgggcaaatggaagcggcatcattagcctatgatgtctcaggtcaaccaataaaaagtgccaccgctgaggcgttagctcaagggaaccctcatcaagttgatttctgccacgttccatacggtgcgagtcatattgaatgcagtttctccgtctcgttttcttctgaactacgtcaaccatataagtgtaactcaagcaaagttaaacaaacgctagtgcaattagtcgagctctacgaaacgaaaatcggctggactgagctagcaacccgatatttgatgaacatttgcaacggtaaatggctgtggaaaaatacccgtaaagcctattgctggaacattgtacttacaccttggccttggaacggggaaaaggttggatttgaagatattcgtactaactacacctcacggcaagactttaaaaataataaaaattggtctgctatagttgaaatgatcaaaaccgcattttctagtactgatgggctggcgatatttgaagtcagggccaccttgcacttgccaacgaatgctatggtgcggccaagccaagttttcacagaaaaagaaagtggcagtaaaagtaaatctaaaactcaaaacagtcgagtttttcagagtacaactattgatggtgaacgatcgccaatactaggggcctttaaaacgggagcagctattgcaaccattgacgactggtatcctgaagccactgagccactaagggtcggacggtttggggttcatcgcgaagatgtcacttgctaccgtcatccgtctaccggaaaagattttttctcgatattacaacaagcagagcactatattgaagtgttgagcgccaacaaaactcccgctcaagaaactatcaacgacatgcactttttaatggctaacctgattaagggtgggatgttccagcataaaggagactgactgtgaaatggtattataagacaatcacctttctgccagagttgtgcaacaacgagtcactggctgcaaagtgtctccgcgttctgcatggatttaactatcagtatgagacacgaaatatcggcgtttcatttccgctttggtgtgatgcaacggttggaaaaaagatttcatttgtcagcaagaacaagatagaactcgacttactacttaaacaacactatttcgtccaaatggaacaacttcaatactttcatatatccaacactgttctcgtcccagaagattgtacatacgtttcctttagacgctgtcaatctatagataagctcacagcagcagggctggcaaggaaaatcagacgcctggagaaacgtgctctatctagaggcgagcaatttgacccatcatcttttgctcaaaaagagcatactgcaatagcgcactaccactcacttggggagtccagcaaacagacgaaccgcaactttcgactcaatatcaggatgctctcggagcaaccccgtgaggggaactcgatttttagtagctatggcttatcaaattcagaaaactcgtttcagcctgtacccttaatctgacctttaataaggagatataccatggcgacaagtttacctacgccctcagcaattacgacttcggcgttagagtatgcattccatactcccgctcgcaatctaacgaaatctcgcggaaaaaacattcatcgttatgtcagtgtaaagatgagtaagaggattacggtagaatctactctagagtgtgatgcctgctatcactttgattttgagccaagtattgttcgcttttgcgctcaaccgattcgatttttatattatctcaatggtcagtctcactcctatgttcctgactttctagttcaatttgataccaacgagtttgttctatatgaagtaaagtcagcttatgctaagaacaaacctgattttgatgttgaatgggaggcgaaagtaaaagcagcaactgaactagggctagaattggagcttgttgaagagagtgatattagggatacggttgtattaaataatcttaagcgcatgcatcgttatgcttcgaaagatgagctgaataacgtacataactctctcttaaaaataataaagtacaatggcgcccaatctgcaagatgcttgggagaacagttgggtttaaaaggccgaactgttttaccaattttgtgcgatttgctgtcaaggtgtttactcgatacacgtttggataagcctctatctcttgaatctcgatttgagttggccagttatggctaagaaagggttctcaagtttccatagaaaagcagtctcttcccaagatacgcttgaatcgatagagcttgtctctagcgctaattgtctagaaagtgttacgtatcaagatatatcagcatttcccgaaacaattgcggtagagattaatttccgattaagcattcttcgctttttagcgcgaaagtgcgaaaccattgtggccaaatcaattgaaccacatcgtgtagagctacagcaaaactatagtagaaaaatacccagtgcaataacgatatatcgatggtggcttgcttttcgaaaatcagactacaaccccattagcttagcacctaatatcaaggatagaggtaatagagagacaaaagtgtcaacagttgttgattctattatggaacaggcagttgaaagagttatatctggacgaaaagtcaatgttagctctgcatataaacgtgttcgacgaaaagttcgtcaatacaatctaactcatggaacgaaatacacgtatcctaagtacgaatctgtaagaaagcgagtaaaaaagaaaaccccatttgagttattagccgcagggaaaggggagagagtagctaagagagagtttcgccgaatgggaaaaaagatcctcacgtctagcgtgctagagagggttgaaatagatcacactgtcgttgacctttttgcagtacacgaagagtatcgaatcccattgggccgaccttggcttactcaattggttgattgttacagtaaagctgtaatcggtttttatttaggtttcgagcctcctagctatgtgtcggtttcccttgcacttaagaatgcaatacaacgcaaagatgacttaatctcctcgtatgaatcgatcgagaatgaatggctatgttatggcatcccagacctactcgtaactgataatggtaaagagtttttgtcgaaagcatttgatcaagcatgtgaatcactattgatcaatgtgcatcaaaataaagttgagacgcccgacaacaaacctcatgttgaacgtaactacgggactattaatacttctctgttagacgatttacctgggaaatccttcagccagtaccttcaaagagaagggtacgactctgtgggagaagctacccttacactcaatgagattagagaaatttacttaatttggttggtggatatttatcataaaaaacccaatcagagaggcactaattgtcctaatgttgcgtggaaaaagggttgtcaagaatgggaaccagaggagttctctggttctaaagacgaattagactttaaatttgctattgttgattacaaacaacttactaaagtagggataactgtctacaaagaactgagttatagcaatgaccgtttagctgaatatagagggaagaaaggaaaccataaagttcagttcaagtataaccctgagtgtatggcagttatttgggtgttggatgaggatatgaatgagtactttacagttaatgcgattgactacgaatatgcaagtagagtatcactttggcaacataaatataacatgaaatatcaagcagaactaaattcagcagaatatgatgaggacaaggaaattgatgcagaaataaaaattgaagaaatcgcagatcgttcaattgttaagactaacaaaatcagagctcggaggcgtggcgctaggcatcaagagaatagcgcaagggctaagtcaatcagtaatgcgaacccggcctcgatacaaaaacatgaagatgaaatcgttagtgcagataatgacgattgggatattgattatgtctgagaaatcgtcaaatgagtgaaacgcgtgaggctcgtatatcaagagctaaaagggcatttgtatccacaccgagcgttaggaaaatcttgagttacatggatagatgtagagatctatcagacctagagtctgagcctacatgcatgatggtctatggtgcttcgggtgtaggtaaaacgaccgtcatcaagaaatacttaaatcaaaacagaagagagtccgaagccgggggcgatataataccggttttgcatattgagttgccagacaatgcgaagccagtagatgcagcaagggaattgctggttgaaatgggtgacccgctagcactttatgaaactgacttagctagattgacgaaaagactgactgaattaatccctgcggtcggcgtgaagctgattattatcgatgagttccaacatttggtggaagaaaggtcaaatcgggttcttacccaagtaggtaattggctaaaaatgatacttaacaaaacgaaatgtccaattgttatatttggtatgccatactcaaaagttgtactgcaagcaaactcgcaacttcacgggcgattttccattcaggttgaactgcgcccctttagctaccagggaggtagaggtgtatttaaaacttttttggaataccttgataaagccctaccttttgaaaaacaggctggcttagccaacgaaagtttgcagaaaaaattgtatgcattctctcagggaaacatgcgttcgttgagaaaccttatttatcaagcatctatcgaagcaattgataatcagcatgagacgataaccgaagaagatttcgtttttgcatcgaagttgacatcgggcgataaacccaactcatggaaaaatccttttgaggagggtgttgaggtaacagaagatatgttacgaccgccaccaaaagatattggttgggaggactatttgagacattcaaccccgagagtgagtaaaccaggtagaaataaaaactttttcgaataacctaggctgctgcgctgctgccaccgctgagcaataactagcataaccccttggggcctctaaacgggtcttgaggggttttttgctgaaacctcaggcatttgagtccttactgcagtagttttgctgaaatactcgattcacaaaaatatcaacttatggttgttttgtgagatatcaatatatggttgttttgtggttaagttgctgattataaataattattaaatatcactttatggttgcatcaacaggtaccgagctcgaattcactggccgtcgttttacaacgtcgtgactgggaaaaccctggcgttacccaacttaatcgccttgcagcacatccccctttcgccagctggcgtaatagcgaagaggcccgcaccgatcgcccttcccaacagttgcgcagcctgaatggcgaatggcgcctgatgcggtattttctccttacgcatctgtgcggtatttcacaccgcatatggtgcactctcagtacaatctgctctgatgccgcatagttaagccagccccgacacccgccaacacccgctgacgcgccctgacgggcttgtctgctcccggcatccgcttacagacaagctgtgaccgtctccgggagctgcatgtgtcagaggttttcaccgtcatcaccgaaacgcgcgagacgaaagggcctcgtgatacgcctatttttataggttaatgtcatgataataatggtttcttagacgtcaggtggcact

SEQ ID NO: 863 - DNA, 11358 bp, Synthetic construct
  source 1..11358: mol_type = other DNA
tttcggggaaatgtgcgcggaacccctatttgtttatttttctaaatacattcaaatatgtatccgctcatgagacaataaccctgataaatgcttcaataatattgaaaaaggaagagtatgagtattcaacatttccgtgtcgcccttattcccttttttgcggcattttgccttcctgtttttgctcacccagaaacgctggtgaaagtaaaagatgctgaagatcagttgggtgcacgagtgggttacatcgaactggatctcaacagcggtaagatccttgagagttttcgccccgaagaacgttttccaatgatgagcacttttaaagttctgctatgtggcgcggtattatcccgtattgacgccgggcaagagcaactcggtcgccgcatacactattctcagaatgacttggttgagtactcaccagtcacagaaaagcatcttacggatggcatgacagtaagagaattatgcagtgctgccataaccatgagtgataacactgcggccaacttacttctgacaacgatcggaggaccgaaggagctaaccgcttttttgcacaacatgggggatcatgtaactcgccttgatcgttgggaaccggagctgaatgaagccataccaaacgacgagcgtgacaccacgatgcctgtagcaatggcaacaacgttgcgcaaactattaactggcgaactacttactctagcttcccggcaacaattaatagactggatggaggcggataaagttgcaggaccacttctgcgctcggcccttccggctggctggtttattgctgataaatctggagccggtgagcgtggctctcgcggtatcattgcagcactggggccagatggtaagccctcccgtatcgtagttatctacacgacggggagtcaggcaactatggatgaacgaaatagacagatcgctgagataggtgcctcactgattaagcattggtaactgtcagaccaagtttactcatatatactttagattgatttaaaacttcatttttaatttaaaaggatctaggtgaagatcctttttgataatctcatgaccaaaatcccttaacgtgagttttcgttccactgagcgtcagaccccgtagaaaagatcaaaggatcttcttgagatcctttttttctgcgcgtaatctgctgcttgcaaacaaaaaaaccaccgctaccagcggtggtttgtttgccggatcaagagctaccaactctttttccgaaggtaactggcttcagcagagcgcagataccaaatactgttcttctagtgtagccgtagttaggccaccacttcaagaactctgtagcaccgcctacatacctcgctctgctaatcctgttaccagtggctgctgccagtggcgataagtcgtgtcttaccgggttggactcaagacgatagttaccggataaggcgcagcggtcgggctgaacggggggttcgtgcacacagcccagcttggagcgaacgacctacaccgaactgagatacctacagcgtgagctatgagaaagcgccacgcttcccgaagggagaaaggcggacaggtatccggtaagcggcagggtcggaacaggagagcgcacgagggagcttccagggggaaacgcctggtatctttatagtcctgtcgggtttcgccacctctgacttgagcgtcgatttttgtgatgctcgtcaggggggcggagcctatggaaaaacgccagcaacgcggcctttttacggttcctggccttttgctggccttttgctcacatgttctttcctgcgttatcccctgattctgtggataaccgtattaccgcctttgagtgagctgataccgctcgccgcagccgaacgaccgagcgcagcgagtcagtgagcgaggaagcggaagagcgcccaatacgcaaaccgcctctccccgcgcgttggccgattcattaatgcagcccaagctttgttgatacaaccataaaatgataattacacccataaattgataattatcacacccataaattgatattgcctcttcatggtctaaacttcagtaagtttacgacattttcatgaactcgaggtcatttccggggcgactcctgcattaggaaattaatacgactcactataggggaattgtgagcggataacaattcccctgtagaaataattttgtttaactttaataaggagatataccatgggtgaactgccgagtaggtagctgataacagtacagcgcggctgaaatcatcattaaagcggtgaactgccgagtaggtagctgataacggatccgaattcgagcgaaggagatatacatatgtttttgcaaagacctaaaccttacagcgatgaaagtttagaaagtttctttatccgagtggctaacaaaaatggctacggtgatgtccatcgcttcctagaagccactaaacgattccttcaagacattgaccataatggctatcaaacctttccgactgatataactcggataaacccatactcagctaaaaacagttccagcgcacgaactgcgtcattcctgaaacttgcacaattgacatttaatgaaccgccagagctacttgggttggcaattaacagaacaaacatgaaatactcgccgtcaactagcgcggttgttagaggtgcagaagtctttcctcgcagtttactacggacgcactccatcccctgctgtcctttgtgtctgcgagaaaatggctacgcctcctacctttggcactttcaggggtacgaatactgccacagccataacgtacctttaattaccacttgtagctgtggtaaggagtttgactaccgagtatctgggttaaagggcatttgctgcaaatgcaaggagcctatcaccttaaccagcagggagaacggtcatgaggcagcgtgtactgtttcaaactggcttgctggccatgaatctaaacctctgccaaatcttcctaaaagctaccgatggggtttagttcattggtggatgggtattaaagatagcgagttcgatcacttttcgttcgttcaatttttctcaaactggccaaggtcattccactcgataatcgaagatgaagtagagttcaaccttgagcatgctgttgtcagcacgtctgaattacgactaaaagatcttcttggtcgattgtttttcggttcaattcggttacctgagcggaatcttcaacacaatatcatccttggtgagcttctctgctatttagaaaatcgtttatggcaagacaagggattaatcgccaacctcaaaatgaacgcgttagaggcgactgtaatgttaaattgtagcctcgatcagattgcatcaatggttgaacaacgcatcttgaagccaaatcgaaaaagcaagcccaacagccctcttgatgttaccgattatctatttcatttcggcgatattttctgtctttggttagctgagttccaaagcgatgagtttaaccgttcgttttatgtgtcgaggtggtaaatgcaaactctgaaagaactaatcgcatccaatcctgacgacttaacaactgaacttaagagagcatttcgtccactcacaccgcatattgcaattgatggtaatgaacttgacgcactgacgatattagtcaatttaaccgataagactgatgatcagaaagacctgctcgatcgagccaaatgcaagcaaaaacttcgagatgaaaaatggtgggctagctgcataaattgcgttaattacagacaaagccataacccaaaattcccggatatacgttctgaaggcgtgattcgaacccaagccctgggtgaattaccgagtttcctactctcgtcctcaaaaatcccaccataccattggtcatatagccatgattcaaaatacgtcaacaaaagcgcattcctcaccaatgagttttgttgggatggtgagatctcatgtttgggtgagcttcttaaagatgcagatcacccactttggaatactttgaaaaagttaggttgttctcaaaaaacttgcaaagcaatggcaaaacaactagctgatattactctcacgactatcaatgtcacactcgcaccaaattacctgactcaaatatctctccccgatagtgatacatcctacatttcactctctcctgttgcatcgctatcgatgcaaagccactttcatcagaggctccaagatgaaaatcggcatagcgcgataacgcggtttagccgaactaccaacatgggggtcactgcgatgacatgtggcggcgcatttagaatgttaaagtctggcgctaagttttccagcccccctcatcaccgattaaacagtaaacgaagttggttgacgtcagagcatgttcagtcattaaaacagtaccagcgcctcaacaaaagcctcatacctgaaaactctcggattgcactccgtagaaaatacaaaatcgagcttcaaaatatggtcagatcttggtttgcaatgcaagaccatacccttgattcgaacatacttatccaacatttgaatcatgacctatcttacttaggagccacaaaacgttttgcatacgatccagcgatgaccaagctctttactgagcttttgaaacgagagttatcaaattcaatcaataatggtgagcaacacactaatggatcgtttttagtcctaccgaatatcagggtttgtggcgcaacagctttaagctccccggtaacggtggggattccatcacttacagctttctttggcttcgttcacgcatttgaacggaatataaatcgcaccacctcatcgtttcgtgttgaatcctttgcgatatgcgtccatcaactacatgtcgagaagcgaggtttgacagcagagtttgtggaaaaaggcgacgggactatatccgctcccgcgacccgggatgactggcagtgtgatgtcgtatttagccttattttgaacaccaactttgctcaacatattgaccaagatacgttagttacatcactaccaaagcgattggctcggggttcagcaaaaattgcgattgatgactttaaacatatcaactcattctcgacattagaaacagcgatcgaatctctgccaatagaagctggtaggtggttatcactttacgcacagtcaaacaataatctaagtgatctattagcagccatgacagaggaccatcagctcatggcaagctgcgtcggttaccacttgttagaagagcccaaagataaaccaaactccctcagaggttacaaacacgctatcgccgagtgcatcattggactcattaactcaatcacctttagctcagagactgatcccaacacaatcttttggtcgctaaagaactatcaaaactacctagtggtacagccaaggagtatcaacgatgaaactaccgacaaatctagcctatgagcgctctatcgacccatcagatgtctgtttttttgtcgtctggcccgatgatagaaaaacacctttaacctacaattctcgtactctgctcgggcaaatggaagcggcatcattagcctatgatgtctcaggtcaaccaataaaaagtgccaccgctgaggcgttagctcaagggaaccctcatcaagttgatttctgccacgttccatacggtgcgagtcatattgaatgcagtttctccgtctcgttttcttctgaactacgtcaaccatataagtgtaactcaagcaaagttaaacaaacgctagtgcaattagtcgagctctacgaaacgaaaatcggctggactgagctagcaacccgatatttgatgaacatttgcaacggtaaatggctgtggaaaaatacccgtaaagcctattgctggaacattgtacttacaccttggccttggaacggggaaaaggttggatttgaagatattcgtactaactacacctcacggcaagactttaaaaataataaaaattggtctgctatagttgaaatgatcaaaaccgcattttctagtactgatgggctggcgatatttgaagtcagggccaccttgcacttgccaacgaatgctatggtgcggccaagccaagttttcacagaaaaagaaagtggcagtaaaagtaaatctaaaactcaaaacagtcgagtttttcagagtacaactattgatggtgaacgatcgccaatactaggggcctttaaaacgggagcagctattgcaaccattgacgactggtatcctgaagccactgagccactaagggtcggacggtttggggttcatcgcgaagatgtcacttgctaccgtcatccgtctaccggaaaagattttttctcgatattacaacaagcagagcactatattgaagtgttgagcgccaacaaaactcccgctcaagaaactatcaacgacatgcactttttaatggctaacctgattaagggtgggatgttccagcataaaggagactgactgtgaaatggtattataagacaatcacctttctgccagagttgtgcaacaacgagtcactggctgcaaagtgtctccgcgttctgcatggatttaactatcagtatgagacacgaaatatcggcgtttcatttccgctttggtgtgatgcaacggttggaaaaaagatttcatttgtcagcaagaacaagatagaactcgacttactacttaaacaacactatttcgtccaaatggaacaacttcaatactttcatatatccaacactgttctcgtcccagaagattgtacatacgtttcctttagacgctgtcaatctatagataagctcacagcagcagggctggcaaggaaaatcagacgcctggagaaacgtgctctatctagaggcgagcaatttgacccatcatcttttgctcaaaaagagcatactgcaatagcgcactaccactcacttggggagtccagcaaacagacgaaccgcaactttcgactcaatatcaggatgctctcggagcaaccccgtgaggggaactcgatttttagtagctatggcttatcaaattcagaaaactcgtttcagcctgtacccttaatctgacctttaataaggagatataccatggcgacaagtttacctacgccctcagcaattacgacttcggcgttagagtatgcattccatactcccgctcgcaatctaacgaaatctcgcggaaaaaacattcatcgttatgtcagtgtaaagatgagtaagaggattacggtagaatctactctagagtgtgatgcctgctatcactttgattttgagccaagtattgttcgcttttgcgctcaaccgattcgatttttatattatctcaatggtcagtctcactcctatgttcctgactttctagttcaatttgataccaacgagtttgttctatatgaagtaaagtcagcttatgctaagaacaaacctgattttgatgttgaatgggaggcgaaagtaaaagcagcaactgaactagggctagaattggagcttgttgaagagagtgatattagggatacggttgtattaaataatcttaagcgcatgcatcgttatgcttcgaaagatgagctgaataacgtacataactctctcttaaaaataataaagtacaatggcgcccaatctgcaagatgcttgggagaacagttgggtttaaaaggccgaactgttttaccaattttgtgcgatttgctgtcaaggtgtttactcgatacacgtttggataagcctctatctcttgaatctcgatttgagttggccagttatggctaagaaagggttctcaagtttccatagaaaagcagtctcttcccaagatacgcttgaatcgatagagcttgtctctagcgctaattgtctagaaagtgttacgtatcaagatatatcagcatttcccgaaacaattgcggtagagattaatttccgattaagcattcttcgctttttagcgcgaaagtgcgaaaccattgtggccaaatcaattgaaccacatcgtgtagagctacagcaaaactatagtagaaaaatacccagtgcaataacgatatatcgatggtggcttgcttttcgaaaatcagactacaaccccattagcttagcacctaatatcaaggatagaggtaatagagagacaaaagtgtcaacagttgttgattctattatggaacaggcagttgaaagagttatatctggacgaaaagtcaatgttagctctgcatataaacgtgttcgacgaaaagttcgtcaatacaatctaactcatggaacgaaatacacgtatcctaagtacgaatctgtaagaaagcgagtaaaaaagaaaaccccatttgagttattagccgcagggaaaggggagagagtagctaagagagagtttcgccgaatgggaaaaaagatcctcacgtctagcgtgctagagagggttgaaatagatcacactgtcgttgacctttttgcagtacacgaagagtatcgaatcccattgggccgaccttggcttactcaattggttgattgttacagtaaagctgtaatcggtttttatttaggtttcgagcctcctagctatgtgtcggtttcccttgcacttaagaatgcaatacaacgcaaagatgacttaatctcctcgtatgaatcgatcgagaatgaatggctatgttatggcatcccagacctactcgtaactgataatggtaaagagtttttgtcgaaagcatttgatcaagcatgtgaatcactattgatcaatgtgcatcaaaataaagttgagacgcccgacaacaaacctcatgttgaacgtaactacgggactattaatacttctctgttagacgatttacctgggaaatccttcagccagtaccttcaaagagaagggtacgactctgtgggagaagctacccttacactcaatgagattagagaaatttacttaatttggttggtggatatttatcataaaaaacccaatcagagaggcactaattgtcctaatgttgcgtggaaaaagggttgtcaagaatgggaaccagaggagttctctggttctaaagacgaattagactttaaatttgctattgttgattacaaacaacttactaaagtagggataactgtctacaaagaactgagttatagcaatgaccgtttagctgaatatagagggaagaaaggaaaccataaagttcagttcaagtataaccctgagtgtatggcagttatttgggtgttggatgaggatatgaatgagtactttacagttaatgcgattgactacgaatatgcaagtagagtatcactttggcaacataaatataacatgaaatatcaagcagaactaaattcagcagaatatgatgaggacaaggaaattgatgcagaaataaaaattgaagaaatcgcagatcgttcaattgttaagactaacaaaatcagagctcggaggcgtggcgctaggcatcaagagaatagcgcaagggctaagtcaatcagtaatgcgaacccggcctcgatacaaaaacatgaagatgaaatcgttagtgcagataatgacgattgggatattgattatgtctgagaaatcgtcaaatgagtgaaacgcgtgaggctcgtatatcaagagctaaaagggcatttgtatccacaccgagcgttaggaaaatcttgagttacatggatagatgtagagatctatcagacctagagtctgagcctacatgcatgatggtctatggtgcttcgggtgtaggtaaaacgaccgtcatcaagaaatacttaaatcaaaacagaagagagtccgaagccgggggcgatataataccggttttgcatattgagttgccagacaatgcgaagccagtagatgcagcaagggaattgctggttgaaatgggtgacccgctagcactttatgaaactgacttagctagattgacgaaaagactgactgaattaatccctgcggtcggcgtgaagctgattattatcgatgagttccaacatttggtggaagaaaggtcaaatcgggttcttacccaagtaggtaattggctaaaaatgatacttaacaaaacgaaatgtccaattgttatatttggtatgccatactcaaaagttgtactgcaagcaaactcgcaacttcacgggcgattttccattcaggttgaactgcgcccctttagctaccagggaggtagaggtgtatttaaaacttttttggaataccttgataaagccctaccttttgaaaaacaggctggcttagccaacgaaagtttgcagaaaaaattgtatgcattctctcagggaaacatgcgttcgttgagaaaccttatttatcaagcatctatcgaagcaattgataatcagcatgagacgataaccgaagaagatttcgtttttgcatcgaagttgacatcgggcgataaacccaactcatggaaaaatccttttgaggagggtgttgaggtaacagaagatatgttacgaccgccaccaaaagatattggttgggaggactatttgagacattcaaccccgagagtgagtaaaccaggtagaaataaaaactttttcgaataacctaggctgctgcgctgctgccaccgctgagcaataactagcataaccccttggggcctctaaacgggtcttgaggggttttttgctgaaacctcaggcatttgagtccttactgcagtagttttgctgaaatactcgattcacaaaaatatcaacttatggttgttttgtgagatatcaatatatggttgttttgtggttaagttgctgattataaataattattaaatatcactttatggttgcatcaacaggtaccgagctcgaattcactggccgtcgttttacaacgtcgtgactgggaaaaccctggcgttacccaacttaatcgccttgcagcacatccccctttcgccagctggcgtaatagcgaagaggcccgcaccgatcgcccttcccaacagttgcgcagcctgaatggcgaatggcgcctgatgcggtattttctccttacgcatctgtgcggtatttcacaccgcatatggtgcactctcagtacaatctgctctgatgccgcatagttaagccagccccgacacccgccaacacccgctgacgcgccctgacgggcttgtctgctcccggcatccgcttacagacaagctgtgaccgtctccgggagctgcatgtgtcagaggttttcaccgtcatcaccgaaacgcgcgagacgaaagggcctcgtgatacgcctatttttataggttaatgtcatgataataatggtttcttagacgtcaggtggcact

SEQ ID NO: 864 - DNA, 11927 bp, Synthetic construct
  source 1..11927: mol_type = other DNA
tttcggggaaatgtgcgcggaacccctatttgtttatttttctaaatacattcaaatatgtatccgctcatgagacaataaccctgataaatgcttcaataatattgaaaaaggaagagtatgagtattcaacatttccgtgtcgcccttattcccttttttgcggcattttgccttcctgtttttgctcacccagaaacgctggtgaaagtaaaagatgctgaagatcagttgggtgcacgagtgggttacatcgaactggatctcaacagcggtaagatccttgagagttttcgccccgaagaacgttttccaatgatgagcacttttaaagttctgctatgtggcgcggtattatcccgtattgacgccgggcaagagcaactcggtcgccgcatacactattctcagaatgacttggttgagtactcaccagtcacagaaaagcatcttacggatggcatgacagtaagagaattatgcagtgctgccataaccatgagtgataacactgcggccaacttacttctgacaacgatcggaggaccgaaggagctaaccgcttttttgcacaacatgggggatcatgtaactcgccttgatcgttgggaaccggagctgaatgaagccataccaaacgacgagcgtgacaccacgatgcctgtagcaatggcaacaacgttgcgcaaactattaactggcgaactacttactctagcttcccggcaacaattaatagactggatggaggcggataaagttgcaggaccacttctgcgctcggcccttccggctggctggtttattgctgataaatctggagccggtgagcgtggctctcgcggtatcattgcagcactggggccagatggtaagccctcccgtatcgtagttatctacacgacggggagtcaggcaactatggatgaacgaaatagacagatcgctgagataggtgcctcactgattaagcattggtaactgtcagaccaagtttactcatatatactttagattgatttaaaacttcatttttaatttaaaaggatctaggtgaagatcctttttgataatctcatgaccaaaatcccttaacgtgagttttcgttccactgagcgtcagaccccgtagaaaagatcaaaggatcttcttgagatcctttttttctgcgcgtaatctgctgcttgcaaacaaaaaaaccaccgctaccagcggtggtttgtttgccggatcaagagctaccaactctttttccgaaggtaactggcttcagcagagcgcagataccaaatactgttcttctagtgtagccgtagttaggccaccacttcaagaactctgtagcaccgcctacatacctcgctctgctaatcctgttaccagtggctgctgccagtggcgataagtcgtgtcttaccgggttggactcaagacgatagttaccggataaggcgcagcggtcgggctgaacggggggttcgtgcacacagcccagcttggagcgaacgacctacaccgaactgagatacctacagcgtgagctatgagaaagcgccacgcttcccgaagggagaaaggcggacaggtatccggtaagcggcagggtcggaacaggagagcgcacgagggagcttccagggggaaacgcctggtatctttatagtcctgtcgggtttcgccacctctgacttgagcgtcgatttttgtgatgctcgtcaggggggcggagcctatggaaaaacgccagcaacgcggcctttttacggttcctggccttttgctggccttttgctcacatgttctttcctgcgttatcccctgattctgtggataaccgtattaccgcctttgagtgagctgataccgctcgccgcagccgaacgaccgagcgcagcgagtcagtgagcgaggattgacagctagctcagtcctaggtataatactagccacgtggagatataccatgggtgaactgccgagtaggtagctgataacagtacagcgcggctgaaatcatcattaaagcggtgaactgccgagtaggtagctgataacggatccgaattcgagcgaaggagatatacatatgtttttgcaaagacctaaaccttacagcgatgaaagtttagaaagtttctttatccgagtggctaacaaaaatggctacggtgatgtccatcgcttcctagaagccactaaacgattccttcaagacattgaccataatggctatcaaacctttccgactgatataactcggataaacccatactcagctaaaaacagttccagcgcacgaactgcgtcattcctgaaacttgcacaattgacatttaatgaaccgccagagctacttgggttggcaattaacagaacaaacatgaaatactcgccgtcaactagcgcggttgttagaggtgcagaagtctttcctcgcagtttactacggacgcactccatcccctgctgtcctttgtgtctgcgagaaaatggctacgcctcctacctttggcactttcaggggtacgaatactgccacagccataacgtacctttaattaccacttgtagctgtggtaaggagtttgactaccgagtatctgggttaaagggcatttgctgcaaatgcaaggagcctatcaccttaaccagcagggagaacggtcatgaggcagcgtgtactgtttcaaactggcttgctggccatgaatctaaacctctgccaaatcttcctaaaagctaccgatggggtttagttcattggtggatgggtattaaagatagcgagttcgatcacttttcgttcgttcaatttttctcaaactggccaaggtcattccactcgataatcgaagatgaagtagagttcaaccttgagcatgctgttgtcagcacgtctgaattacgactaaaagatcttcttggtcgattgtttttcggttcaattcggttacctgagcggaatcttcaacacaatatcatccttggtgagcttctctgctatttagaaaatcgtttatggcaagacaagggattaatcgccaacctcaaaatgaacgcgttagaggcgactgtaatgttaaattgtagcctcgatcagattgcatcaatggttgaacaacgcatcttgaagccaaatcgaaaaagcaagcccaacagccctcttgatgttaccgattatctatttcatttcggcgatattttctgtctttggttagctgagttccaaagcgatgagtttaaccgttcgttttatgtgtcgaggtggtaaatgcaaactctgaaagaactaatcgcatccaatcctgacgacttaacaactgaacttaagagagcatttcgtccactcacaccgcatattgcaattgatggtaatgaacttgacgcactgacgatattagtcaatttaaccgataagactgatgatcagaaagacctgctcgatcgagccaaatgcaagcaaaaacttcgagatgaaaaatggtgggctagctgcataaattgcgttaattacagacaaagccataacccaaaattcccggatatacgttctgaaggcgtgattcgaacccaagccctgggtgaattaccgagtttcctactctcgtcctcaaaaatcccaccataccattggtcatatagccatgattcaaaatacgtcaacaaaagcgcattcctcaccaatgagttttgttgggatggtgagatctcatgtttgggtgagcttcttaaagatgcagatcacccactttggaatactttgaaaaagttaggttgttctcaaaaaacttgcaaagcaatggcaaaacaactagctgatattactctcacgactatcaatgtcacactcgcaccaaattacctgactcaaatatctctccccgatagtgatacatcctacatttcactctctcctgttgcatcgctatcgatgcaaagccactttcatcagaggctccaagatgaaaatcggcatagcgcgataacgcggtttagccgaactaccaacatgggggtcactgcgatgacatgtggcggcgcatttagaatgttaaagtctggcgctaagttttccagcccccctcatcaccgattaaacagtaaacgaagttggttgacgtcagagcatgttcagtcattaaaacagtaccagcgcctcaacaaaagcctcatacctgaaaactctcggattgcactccgtagaaaatacaaaatcgagcttcaaaatatggtcagatcttggtttgcaatgcaagaccatacccttgattcgaacatacttatccaacatttgaatcatgacctatcttacttaggagccacaaaacgttttgcatacgatccagcgatgaccaagctctttactgagcttttgaaacgagagttatcaaattcaatcaataatggtgagcaacacactaatggatcgtttttagtcctaccgaatatcagggtttgtggcgcaacagctttaagctccccggtaacggtggggattccatcacttacagctttctttggcttcgttcacgcatttgaacggaatataaatcgcaccacctcatcgtttcgtgttgaatcctttgcgatatgcgtccatcaactacatgtcgagaagcgaggtttgacagcagagtttgtggaaaaaggcgacgggactatatccgctcccgcgacccgggatgactggcagtgtgatgtcgtatttagccttattttgaacaccaactttgctcaacatattgaccaagatacgttagttacatcactaccaaagcgattggctcggggttcagcaaaaattgcgattgatgactttaaacatatcaactcattctcgacattagaaacagcgatcgaatctctgccaatagaagctggtaggtggttatcactttacgcacagtcaaacaataatctaagtgatctattagcagccatgacagaggaccatcagctcatggcaagctgcgtcggttaccacttgttagaagagcccaaagataaaccaaactccctcagaggttacaaacacgctatcgccgagtgcatcattggactcattaactcaatcacctttagctcagagactgatcccaacacaatcttttggtcgctaaagaactatcaaaactacctagtggtacagccaaggagtatcaacgatgaaactaccgacaaatctagcctatgagcgctctatcgacccatcagatgtctgtttttttgtcgtctggcccgatgatagaaaaacacctttaacctacaattctcgtactctgctcgggcaaatggaagcggcatcattagcctatgatgtctcaggtcaaccaataaaaagtgccaccgctgaggcgttagctcaagggaaccctcatcaagttgatttctgccacgttccatacggtgcgagtcatattgaatgcagtttctccgtctcgttttcttctgaactacgtcaaccatataagtgtaactcaagcaaagttaaacaaacgctagtgcaattagtcgagctctacgaaacgaaaatcggctggactgagctagcaacccgatatttgatgaacatttgcaacggtaaatggctgtggaaaaatacccgtaaagcctattgctggaacattgtacttacaccttggccttggaacggggaaaaggttggatttgaagatattcgtactaactacacctcacggcaagactttaaaaataataaaaattggtctgctatagttgaaatgatcaaaaccgcattttctagtactgatgggctggcgatatttgaagtcagggccaccttgcacttgccaacgaatgctatggtgcggccaagccaagttttcacagaaaaagaaagtggcagtaaaagtaaatctaaaactcaaaacagtcgagtttttcagagtacaactattgatggtgaacgatcgccaatactaggggcctttaaaacgggagcagctattgcaaccattgacgactggtatcctgaagccactgagccactaagggtcggacggtttggggttcatcgcgaagatgtcacttgctaccgtcatccgtctaccggaaaagattttttctcgatattacaacaagcagagcactatattgaagtgttgagcgccaacaaaactcccgctcaagaaactatcaacgacatgcactttttaatggctaacctgattaagggtgggatgttccagcataaaggagactgactgtgaaatggtattataagacaatcacctttctgccagagttgtgcaacaacgagtcactggctgcaaagtgtctccgcgttctgcatggatttaactatcagtatgagacacgaaatatcggcgtttcatttccgctttggtgtgatgcaacggttggaaaaaagatttcatttgtcagcaagaacaagatagaactcgacttactacttaaacaacactatttcgtccaaatggaacaacttcaatactttcatatatccaacactgttctcgtcccagaagattgtacatacgtttcctttagacgctgtcaatctatagataagctcacagcagcagggctggcaaggaaaatcagacgcctggagaaacgtgctctatctagaggcgagcaatttgacccatcatcttttgctcaaaaagagcatactgcaatagcgcactaccactcacttggggagtccagcaaacagacgaaccgcaactttcgactcaatatcaggatgctctcggagcaaccccgtgaggggaactcgatttttagtagctatggcttatcaaattcagaaaactcgtttcagcctgtacccttaatctgacctttaataaggagatataccatggcgacaagtttacctacgccctcagcaattacgacttcggcgttagagtatgcattccatactcccgctcgcaatctaacgaaatctcgcggaaaaaacattcatcgttatgtcagtgtaaagatgagtaagaggattacggtagaatctactctagagtgtgatgcctgctatcactttgattttgagccaagtattgttcgcttttgcgctcaaccgattcgatttttatattatctcaatggtcagtctcactcctatgttcctgactttctagttcaatttgataccaacgagtttgttctatatgaagtaaagtcagcttatgctaagaacaaacctgattttgatgttgaatgggaggcgaaagtaaaagcagcaactgaactagggctagaattggagcttgttgaagagagtgatattagggatacggttgtattaaataatcttaagcgcatgcatcgttatgcttcgaaagatgagctgaataacgtacataactctctcttaaaaataataaagtacaatggcgcccaatctgcaagatgcttgggagaacagttgggtttaaaaggccgaactgttttaccaattttgtgcgatttgctgtcaaggtgtttactcgatacacgtttggataagcctctatctcttgaatctcgatttgagttggccagttatggctaagaaagggttctcaagtttccatagaaaagcagtctcttcccaagatacgcttgaatcgatagagcttgtctctagcgctaattgtctagaaagtgttacgtatcaagatatatcagcatttcccgaaacaattgcggtagagattaatttccgattaagcattcttcgctttttagcgcgaaagtgcgaaaccattgtggccaaatcaattgaaccacatcgtgtagagctacagcaaaactatagtagaaaaatacccagtgcaataacgatatatcgatggtggcttgcttttcgaaaatcagactacaaccccattagcttagcacctaatatcaaggatagaggtaatagagagacaaaagtgtcaacagttgttgattctattatggaacaggcagttgaaagagttatatctggacgaaaagtcaatgttagctctgcatataaacgtgttcgacgaaaagttcgtcaatacaatctaactcatggaacgaaatacacgtatcctaagtacgaatctgtaagaaagcgagtaaaaaagaaaaccccatttgagttattagccgcagggaaaggggagagagtagctaagagagagtttcgccgaatgggaaaaaagatcctcacgtctagcgtgctagagagggttgaaatagatcacactgtcgttgacctttttgcagtacacgaagagtatcgaatcccattgggccgaccttggcttactcaattggttgattgttacagtaaagctgtaatcggtttttatttaggtttcgagcctcctagctatgtgtcggtttcccttgcacttaagaatgcaatacaacgcaaagatgacttaatctcctcgtatgaatcgatcgagaatgaatggctatgttatggcatcccagacctactcgtaactgataatggtaaagagtttttgtcgaaagcatttgatcaagcatgtgaatcactattgatcaatgtgcatcaaaataaagttgagacgcccgacaacaaacctcatgttgaacgtaactacgggactattaatacttctctgttagacgatttacctgggaaatccttcagccagtaccttcaaagagaagggtacgactctgtgggagaagctacccttacactcaatgagattagagaaatttacttaatttggttggtggatatttatcataaaaaacccaatcagagaggcactaattgtcctaatgttgcgtggaaaaagggttgtcaagaatgggaaccagaggagttctctggttctaaagacgaattagactttaaatttgctattgttgattacaaacaacttactaaagtagggataactgtctacaaagaactgagttatagcaatgaccgtttagctgaatatagagggaagaaaggaaaccataaagttcagttcaagtataaccctgagtgtatggcagttatttgggtgttggatgaggatatgaatgagtactttacagttaatgcgattgactacgaatatgcaagtagagtatcactttggcaacataaatataacatgaaatatcaagcagaactaaattcagcagaatatgatgaggacaaggaaattgatgcagaaataaaaattgaagaaatcgcagatcgttcaattgttaagactaacaaaatcagagctcggaggcgtggcgctaggcatcaagagaatagcgcaagggctaagtcaatcagtaatgcgaacccggcctcgatacaaaaacatgaagatgaaatcgttagtgcagataatgacgattgggatattgattatgtctgagaaatcgtcaaatgagtgaaacgcgtgaggctcgtatatcaagagctaaaagggcatttgtatccacaccgagcgttaggaaaatcttgagttacatggatagatgtagagatctatcagacctagagtctgagcctacatgcatgatggtctatggtgcttcgggtgtaggtaaaacgaccgtcatcaagaaatacttaaatcaaaacagaagagagtccgaagccgggggcgatataataccggttttgcatattgagttgccagacaatgcgaagccagtagatgcagcaagggaattgctggttgaaatgggtgacccgctagcactttatgaaactgacttagctagattgacgaaaagactgactgaattaatccctgcggtcggcgtgaagctgattattatcgatgagttccaacatttggtggaagaaaggtcaaatcgggttcttacccaagtaggtaattggctaaaaatgatacttaacaaaacgaaatgtccaattgttatatttggtatgccatactcaaaagttgtactgcaagcaaactcgcaacttcacgggcgattttccattcaggttgaactgcgcccctttagctaccagggaggtagaggtgtatttaaaacttttttggaataccttgataaagccctaccttttgaaaaacaggctggcttagccaacgaaagtttgcagaaaaaattgtatgcattctctcagggaaacatgcgttcgttgagaaaccttatttatcaagcatctatcgaagcaattgataatcagcatgagacgataaccgaagaagatttcgtttttgcatcgaagttgacatcgggcgataaacccaactcatggaaaaatccttttgaggagggtgttgaggtaacagaagatatgttacgaccgccaccaaaagatattggttgggaggactatttgagacattcaaccccgagagtgagtaaaccaggtagaaataaaaactttttcgaataacctaggctgctgcgctgctgccaccgctgagcaataactagcataaccccttggggcctctaaacgggtcttgaggggttttttgctgaaacctcaggcatttgttgttgatacaaccataaaatgataattacacccataaattgataattatcacacccataaattgatattgcctcttcatggtctaaacttcagtaagtttacgacattttcatgaactcgaggtcatttccggggatccatggagaaaaaaatcactggatataccaccgttgatatatcccaatggcatcgtaaagaacattttgaggcatttcagtcagttgctcaatgtacctataaccagaccgttcagctggatattacggcctttttaaagaccgtaaagaaaaataagcacaagttttatccggcctttattcacattcttgcccgcctgatgaatgctcatccggagttccgtatggcaatgaaagacggtgagctggtgatatgggatagtgttcacccttgttacaccgttttccatgagcaaactgaaacgttttcatcgctctggagtgaataccacgacgatttccggcagtttctacacatatattcgcaagatgtggcgtgttacggtgaaaacctggcctatttccctaaagggtttattgagaatatgtttttcgtctcagccaatccctgggtgagtttcaccagttttgatttaaacgtggccaatatggacaacttcttcgcccccgttttcactatgggcaaatattatacgcaaggcgacaaggtgctgatgccgctggcgattcaggttcatcatgccgtttgtgatggcttccatgtcggcagaatgcttaatgaattacaacagtactgcgatgagtggcagggcggggcgtaatttttttaaggcagttattggtgcccttctagagtccttactgcagtagttttgctgaaatactcgattcacaaaaatatcaacttatggttgttttgtgagatatcaatatatggttgttttgtggttaagttgctgattataaataattattaaatatcactttatggttgcatcaacaggtaccgagctcgaattcactggccgtcgttttacaacgtcgtgactgggaaaaccctggcgttacccaacttaatcgccttgcagcacatccccctttcgccagctggcgtaatagcgaagaggcccgcaccgatcgcccttcccaacagttgcgcagcctgaatggcgaatggcgcctgatgcggtattttctccttacgcatctgtgcggtatttcacaccgcatatggtgcactctcagtacaatctgctctgatgccgcatagttaagccagccccgacacccgccaacacccgctgacgcgccctgacgggcttgtctgctcccggcatccgcttacagacaagctgtgaccgtctccgggagctgcatgtgtcagaggttttcaccgtcatcaccgaaacgcgcgagacgaaagggcctcgtgatacgcctatttttataggttaatgtcatgataataatggtttcttagacgtcaggtggcact

SEQ ID NO: 865 - DNA, 11927 bp, Synthetic construct
  source 1..11927: mol_type = other DNA
tttcggggaaatgtgcgcggaacccctatttgtttatttttctaaatacattcaaatatgtatccgctcatgagacaataaccctgataaatgcttcaataatattgaaaaaggaagagtatgagtattcaacatttccgtgtcgcccttattcccttttttgcggcattttgccttcctgtttttgctcacccagaaacgctggtgaaagtaaaagatgctgaagatcagttgggtgcacgagtgggttacatcgaactggatctcaacagcggtaagatccttgagagttttcgccccgaagaacgttttccaatgatgagcacttttaaagttctgctatgtggcgcggtattatcccgtattgacgccgggcaagagcaactcggtcgccgcatacactattctcagaatgacttggttgagtactcaccagtcacagaaaagcatcttacggatggcatgacagtaagagaattatgcagtgctgccataaccatgagtgataacactgcggccaacttacttctgacaacgatcggaggaccgaaggagctaaccgcttttttgcacaacatgggggatcatgtaactcgccttgatcgttgggaaccggagctgaatgaagccataccaaacgacgagcgtgacaccacgatgcctgtagcaatggcaacaacgttgcgcaaactattaactggcgaactacttactctagcttcccggcaacaattaatagactggatggaggcggataaagttgcaggaccacttctgcgctcggcccttccggctggctggtttattgctgataaatctggagccggtgagcgtggctctcgcggtatcattgcagcactggggccagatggtaagccctcccgtatcgtagttatctacacgacggggagtcaggcaactatggatgaacgaaatagacagatcgctgagataggtgcctcactgattaagcattggtaactgtcagaccaagtttactcatatatactttagattgatttaaaacttcatttttaatttaaaaggatctaggtgaagatcctttttgataatctcatgaccaaaatcccttaacgtgagttttcgttccactgagcgtcagaccccgtagaaaagatcaaaggatcttcttgagatcctttttttctgcgcgtaatctgctgcttgcaaacaaaaaaaccaccgctaccagcggtggtttgtttgccggatcaagagctaccaactctttttccgaaggtaactggcttcagcagagcgcagataccaaatactgttcttctagtgtagccgtagttaggccaccacttcaagaactctgtagcaccgcctacatacctcgctctgctaatcctgttaccagtggctgctgccagtggcgataagtcgtgtcttaccgggttggactcaagacgatagttaccggataaggcgcagcggtcgggctgaacggggggttcgtgcacacagcccagcttggagcgaacgacctacaccgaactgagatacctacagcgtgagctatgagaaagcgccacgcttcccgaagggagaaaggcggacaggtatccggtaagcggcagggtcggaacaggagagcgcacgagggagcttccagggggaaacgcctggtatctttatagtcctgtcgggtttcgccacctctgacttgagcgtcgatttttgtgatgctcgtcaggggggcggagcctatggaaaaacgccagcaacgcggcctttttacggttcctggccttttgctggccttttgctcacatgttctttcctgcgttatcccctgattctgtggataaccgtattaccgcctttgagtgagctgataccgctcgccgcagccgaacgaccgagcgcagcgagtcagtgagcgaggatttacagctagctcagtcctaggtattatgctagccacgtggagatataccatgggtgaactgccgagtaggtagctgataacagtacagcgcggctgaaatcatcattaaagcggtgaactgccgagtaggtagctgataacggatccgaattcgagcgaaggagatatacatatgtttttgcaaagacctaaaccttacagcgatgaaagtttagaaagtttctttatccgagtggctaacaaaaatggctacggtgatgtccatcgcttcctagaagccactaaacgattccttcaagacattgaccataatggctatcaaacctttccgactgatataactcggataaacccatactcagctaaaaacagttccagcgcacgaactgcgtcattcctgaaacttgcacaattgacatttaatgaaccgccagagctacttgggttggcaattaacagaacaaacatgaaatactcgccgtcaactagcgcggttgttagaggtgcagaagtctttcctcgcagtttactacggacgcactccatcccctgctgtcctttgtgtctgcgagaaaatggctacgcctcctacctttggcactttcaggggtacgaatactgccacagccataacgtacctttaattaccacttgtagctgtggtaaggagtttgactaccgagtatctgggttaaagggcatttgctgcaaatgcaaggagcctatcaccttaaccagcagggagaacggtcatgaggcagcgtgtactgtttcaaactggcttgctggccatgaatctaaacctctgccaaatcttcctaaaagctaccgatggggtttagttcattggtggatgggtattaaagatagcgagttcgatcacttttcgttcgttcaatttttctcaaactggccaaggtcattccactcgataatcgaagatgaagtagagttcaaccttgagcatgctgttgtcagcacgtctgaattacgactaaaagatcttcttggtcgattgtttttcggttcaattcggttacctgagcggaatcttcaacacaatatcatccttggtgagcttctctgctatttagaaaatcgtttatggcaagacaagggattaatcgccaacctcaaaatgaacgcgttagaggcgactgtaatgttaaattgtagcctcgatcagattgcatcaatggttgaacaacgcatcttgaagccaaatcgaaaaagcaagcccaacagccctcttgatgttaccgattatctatttcatttcggcgatattttctgtctttggttagctgagttccaaagcgatgagtttaaccgttcgttttatgtgtcgaggtggtaaatgcaaactctgaaagaactaatcgcatccaatcctgacgacttaacaactgaacttaagagagcatttcgtccactcacaccgcatattgcaattgatggtaatgaacttgacgcactgacgatattagtcaatttaaccgataagactgatgatcagaaagacctgctcgatcgagccaaatgcaagcaaaaacttcgagatgaaaaatggtgggctagctgcataaattgcgttaattacagacaaagccataacccaaaattcccggatatacgttctgaaggcgtgattcgaacccaagccctgggtgaattaccgagtttcctactctcgtcctcaaaaatcccaccataccattggtcatatagccatgattcaaaatacgtcaacaaaagcgcattcctcaccaatgagttttgttgggatggtgagatctcatgtttgggtgagcttcttaaagatgcagatcacccactttggaatactttgaaaaagttaggttgttctcaaaaaacttgcaaagcaatggcaaaacaactagctgatattactctcacgactatcaatgtcacactcgcaccaaattacctgactcaaatatctctccccgatagtgatacatcctacatttcactctctcctgttgcatcgctatcgatgcaaagccactttcatcagaggctccaagatgaaaatcggcatagcgcgataacgcggtttagccgaactaccaacatgggggtcactgcgatgacatgtggcggcgcatttagaatgttaaagtctggcgctaagttttccagcccccctcatcaccgattaaacagtaaacgaagttggttgacgtcagagcatgttcagtcattaaaacagtaccagcgcctcaacaaaagcctcatacctgaaaactctcggattgcactccgtagaaaatacaaaatcgagcttcaaaatatggtcagatcttggtttgcaatgcaagaccatacccttgattcgaacatacttatccaacatttgaatcatgacctatcttacttaggagccacaaaacgttttgcatacgatccagcgatgaccaagctctttactgagcttttgaaacgagagttatcaaattcaatcaataatggtgagcaacacactaatggatcgtttttagtcctaccgaatatcagggtttgtggcgcaacagctttaagctccccggtaacggtggggattccatcacttacagctttctttggcttcgttcacgcatttgaacggaatataaatcgcaccacctcatcgtttcgtgttgaatcctttgcgatatgcgtccatcaactacatgtcgagaagcgaggtttgacagcagagtttgtggaaaaaggcgacgggactatatccgctcccgcgacccgggatgactggcagtgtgatgtcgtatttagccttattttgaacaccaactttgctcaacatattgaccaagatacgttagttacatcactaccaaagcgattggctcggggttcagcaaaaattgcgattgatgactttaaacatatcaactcattctcgacattagaaacagcgatcgaatctctgccaatagaagctggtaggtggttatcactttacgcacagtcaaacaataatctaagtgatctattagcagccatgacagaggaccatcagctcatggcaagctgcgtcggttaccacttgttagaagagcccaaagataaaccaaactccctcagaggttacaaacacgctatcgccgagtgcatcattggactcattaactcaatcacctttagctcagagactgatcccaacacaatcttttggtcgctaaagaactatcaaaactacctagtggtacagccaaggagtatcaacgatgaaactaccgacaaatctagcctatgagcgctctatcgacccatcagatgtctgtttttttgtcgtctggcccgatgatagaaaaacacctttaacctacaattctcgtactctgctcgggcaaatggaagcggcatcattagcctatgatgtctcaggtcaaccaataaaaagtgccaccgctgaggcgttagctcaagggaaccctcatcaagttgatttctgccacgttccatacggtgcgagtcatattgaatgcagtttctccgtctcgttttcttctgaactacgtcaaccatataagtgtaactcaagcaaagttaaacaaacgctagtgcaattagtcgagctctacgaaacgaaaatcggctggactgagctagcaacccgatatttgatgaacatttgcaacggtaaatggctgtggaaaaatacccgtaaagcctattgctggaacattgtacttacaccttggccttggaacggggaaaaggttggatttgaagatattcgtactaactacacctcacggcaagactttaaaaataataaaaattggtctgctatagttgaaatgatcaaaaccgcattttctagtactgatgggctggcgatatttgaagtcagggccaccttgcacttgccaacgaatgctatggtgcggccaagccaagttttcacagaaaaagaaagtggcagtaaaagtaaatctaaaactcaaaacagtcgagtttttcagagtacaactattgatggtgaacgatcgccaatactaggggcctttaaaacgggagcagctattgcaaccattgacgactggtatcctgaagccactgagccactaagggtcggacggtttggggttcatcgcgaagatgtcacttgctaccgtcatccgtctaccggaaaagattttttctcgatattacaacaagcagagcactatattgaagtgttgagcgccaacaaaactcccgctcaagaaactatcaacgacatgcactttttaatggctaacctgattaagggtgggatgttccagcataaaggagactgactgtgaaatggtattataagacaatcacctttctgccagagttgtgcaacaacgagtcactggctgcaaagtgtctccgcgttctgcatggatttaactatcagtatgagacacgaaatatcggcgtttcatttccgctttggtgtgatgcaacggttggaaaaaagatttcatttgtcagcaagaacaagatagaactcgacttactacttaaacaacactatttcgtccaaatggaacaacttcaatactttcatatatccaacactgttctcgtcccagaagattgtacatacgtttcctttagacgctgtcaatctatagataagctcacagcagcagggctggcaaggaaaatcagacgcctggagaaacgtgctctatctagaggcgagcaatttgacccatcatcttttgctcaaaaagagcatactgcaatagcgcactaccactcacttggggagtccagcaaacagacgaaccgcaactttcgactcaatatcaggatgctctcggagcaaccccgtgaggggaactcgatttttagtagctatggcttatcaaattcagaaaactcgtttcagcctgtacccttaatctgacctttaataaggagatataccatggcgacaagtttacctacgccctcagcaattacgacttcggcgttagagtatgcattccatactcccgctcgcaatctaacgaaatctcgcggaaaaaacattcatcgttatgtcagtgtaaagatgagtaagaggattacggtagaatctactctagagtgtgatgcctgctatcactttgattttgagccaagtattgttcgcttttgcgctcaaccgattcgatttttatattatctcaatggtcagtctcactcctatgttcctgactttctagttcaatttgataccaacgagtttgttctatatgaagtaaagtcagcttatgctaagaacaaacctgattttgatgttgaatgggaggcgaaagtaaaagcagcaactgaactagggctagaattggagcttgttgaagagagtgatattagggatacggttgtattaaataatcttaagcgcatgcatcgttatgcttcgaaagatgagctgaataacgtacataactctctcttaaaaataataaagtacaatggcgcccaatctgcaagatgcttgggagaacagttgggtttaaaaggccgaactgttttaccaattttgtgcgatttgctgtcaaggtgtttactcgatacacgtttggataagcctctatctcttgaatctcgatttgagttggccagttatggctaagaaagggttctcaagtttccatagaaaagcagtctcttcccaagatacgcttgaatcgatagagcttgtctctagcgctaattgtctagaaagtgttacgtatcaagatatatcagcatttcccgaaacaattgcggtagagattaatttccgattaagcattcttcgctttttagcgcgaaagtgcgaaaccattgtggccaaatcaattgaaccacatcgtgtagagctacagcaaaactatagtagaaaaatacccagtgcaataacgatatatcgatggtggcttgcttttcgaaaatcagactacaaccccattagcttagcacctaatatcaaggatagaggtaatagagagacaaaagtgtcaacagttgttgattctattatggaacaggcagttgaaagagttatatctggacgaaaagtcaatgttagctctgcatataaacgtgttcgacgaaaagttcgtcaatacaatctaactcatggaacgaaatacacgtatcctaagtacgaatctgtaagaaagcgagtaaaaaagaaaaccccatttgagttattagccgcagggaaaggggagagagtagctaagagagagtttcgccgaatgggaaaaaagatcctcacgtctagcgtgctagagagggttgaaatagatcacactgtcgttgacctttttgcagtacacgaagagtatcgaatcccattgggccgaccttggcttactcaattggttgattgttacagtaaagctgtaatcggtttttatttaggtttcgagcctcctagctatgtgtcggtttcccttgcacttaagaatgcaatacaacgcaaagatgacttaatctcctcgtatgaatcgatcgagaatgaatggctatgttatggcatcccagacctactcgtaactgataatggtaaagagtttttgtcgaaagcatttgatcaagcatgtgaatcactattgatcaatgtgcatcaaaataaagttgagacgcccgacaacaaacctcatgttgaacgtaactacgggactattaatacttctctgttagacgatttacctgggaaatccttcagccagtaccttcaaagagaagggtacgactctgtgggagaagctacccttacactcaatgagattagagaaatttacttaatttggttggtggatatttatcataaaaaacccaatcagagaggcactaattgtcctaatgttgcgtggaaaaagggttgtcaagaatgggaaccagaggagttctctggttctaaagacgaattagactttaaatttgctattgttgattacaaacaacttactaaagtagggataactgtctacaaagaactgagttatagcaatgaccgtttagctgaatatagagggaagaaaggaaaccataaagttcagttcaagtataaccctgagtgtatggcagttatttgggtgttggatgaggatatgaatgagtactttacagttaatgcgattgactacgaatatgcaagtagagtatcactttggcaacataaatataacatgaaatatcaagcagaactaaattcagcagaatatgatgaggacaaggaaattgatgcagaaataaaaattgaagaaatcgcagatcgttcaattgttaagactaacaaaatcagagctcggaggcgtggcgctaggcatcaagagaatagcgcaagggctaagtcaatcagtaatgcgaacccggcctcgatacaaaaacatgaagatgaaatcgttagtgcagataatgacgattgggatattgattatgtctgagaaatcgtcaaatgagtgaaacgcgtgaggctcgtatatcaagagctaaaagggcatttgtatccacaccgagcgttaggaaaatcttgagttacatggatagatgtagagatctatcagacctagagtctgagcctacatgcatgatggtctatggtgcttcgggtgtaggtaaaacgaccgtcatcaagaaatacttaaatcaaaacagaagagagtccgaagccgggggcgatataataccggttttgcatattgagttgccagacaatgcgaagccagtagatgcagcaagggaattgctggttgaaatgggtgacccgctagcactttatgaaactgacttagctagattgacgaaaagactgactgaattaatccctgcggtcggcgtgaagctgattattatcgatgagttccaacatttggtggaagaaaggtcaaatcgggttcttacccaagtaggtaattggctaaaaatgatacttaacaaaacgaaatgtccaattgttatatttggtatgccatactcaaaagttgtactgcaagcaaactcgcaacttcacgggcgattttccattcaggttgaactgcgcccctttagctaccagggaggtagaggtgtatttaaaacttttttggaataccttgataaagccctaccttttgaaaaacaggctggcttagccaacgaaagtttgcagaaaaaattgtatgcattctctcagggaaacatgcgttcgttgagaaaccttatttatcaagcatctatcgaagcaattgataatcagcatgagacgataaccgaagaagatttcgtttttgcatcgaagttgacatcgggcgataaacccaactcatggaaaaatccttttgaggagggtgttgaggtaacagaagatatgttacgaccgccaccaaaagatattggttgggaggactatttgagacattcaaccccgagagtgagtaaaccaggtagaaataaaaactttttcgaataacctaggctgctgcgctgctgccaccgctgagcaataactagcataaccccttggggcctctaaacgggtcttgaggggttttttgctgaaacctcaggcatttgttgttgatacaaccataaaatgataattacacccataaattgataattatcacacccataaattgatattgcctcttcatggtctaaacttcagtaagtttacgacattttcatgaactcgaggtcatttccggggatccatggagaaaaaaatcactggatataccaccgttgatatatcccaatggcatcgtaaagaacattttgaggcatttcagtcagttgctcaatgtacctataaccagaccgttcagctggatattacggcctttttaaagaccgtaaagaaaaataagcacaagttttatccggcctttattcacattcttgcccgcctgatgaatgctcatccggagttccgtatggcaatgaaagacggtgagctggtgatatgggatagtgttcacccttgttacaccgttttccatgagcaaactgaaacgttttcatcgctctggagtgaataccacgacgatttccggcagtttctacacatatattcgcaagatgtggcgtgttacggtgaaaacctggcctatttccctaaagggtttattgagaatatgtttttcgtctcagccaatccctgggtgagtttcaccagttttgatttaaacgtggccaatatggacaacttcttcgcccccgttttcactatgggcaaatattatacgcaaggcgacaaggtgctgatgccgctggcgattcaggttcatcatgccgtttgtgatggcttccatgtcggcagaatgcttaatgaattacaacagtactgcgatgagtggcagggcggggcgtaatttttttaaggcagttattggtgcccttctagagtccttactgcagtagttttgctgaaatactcgattcacaaaaatatcaacttatggttgttttgtgagatatcaatatatggttgttttgtggttaagttgctgattataaataattattaaatatcactttatggttgcatcaacaggtaccgagctcgaattcactggccgtcgttttacaacgtcgtgactgggaaaaccctggcgttacccaacttaatcgccttgcagcacatccccctttcgccagctggcgtaatagcgaagaggcccgcaccgatcgcccttcccaacagttgcgcagcctgaatggcgaatggcgcctgatgcggtattttctccttacgcatctgtgcggtatttcacaccgcatatggtgcactctcagtacaatctgctctgatgccgcatagttaagccagccccgacacccgccaacacccgctgacgcgccctgacgggcttgtctgctcccggcatccgcttacagacaagctgtgaccgtctccgggagctgcatgtgtcagaggttttcaccgtcatcaccgaaacgcgcgagacgaaagggcctcgtgatacgcctatttttataggttaatgtcatgataataatggtttcttagacgtcaggtggcact

SEQ ID NO: 866 - DNA, 11927 bp, Synthetic construct
  source 1..11927: mol_type = other DNA
tttcggggaaatgtgcgcggaacccctatttgtttatttttctaaatacattcaaatatgtatccgctcatgagacaataaccctgataaatgcttcaataatattgaaaaaggaagagtatgagtattcaacatttccgtgtcgcccttattcccttttttgcggcattttgccttcctgtttttgctcacccagaaacgctggtgaaagtaaaagatgctgaagatcagttgggtgcacgagtgggttacatcgaactggatctcaacagcggtaagatccttgagagttttcgccccgaagaacgttttccaatgatgagcacttttaaagttctgctatgtggcgcggtattatcccgtattgacgccgggcaagagcaactcggtcgccgcatacactattctcagaatgacttggttgagtactcaccagtcacagaaaagcatcttacggatggcatgacagtaagagaattatgcagtgctgccataaccatgagtgataacactgcggccaacttacttctgacaacgatcggaggaccgaaggagctaaccgcttttttgcacaacatgggggatcatgtaactcgccttgatcgttgggaaccggagctgaatgaagccataccaaacgacgagcgtgacaccacgatgcctgtagcaatggcaacaacgttgcgcaaactattaactggcgaactacttactctagcttcccggcaacaattaatagactggatggaggcggataaagttgcaggaccacttctgcgctcggcccttccggctggctggtttattgctgataaatctggagccggtgagcgtggctctcgcggtatcattgcagcactggggccagatggtaagccctcccgtatcgtagttatctacacgacggggagtcaggcaactatggatgaacgaaatagacagatcgctgagataggtgcctcactgattaagcattggtaactgtcagaccaagtttactcatatatactttagattgatttaaaacttcatttttaatttaaaaggatctaggtgaagatcctttttgataatctcatgaccaaaatcccttaacgtgagttttcgttccactgagcgtcagaccccgtagaaaagatcaaaggatcttcttgagatcctttttttctgcgcgtaatctgctgcttgcaaacaaaaaaaccaccgctaccagcggtggtttgtttgccggatcaagagctaccaactctttttccgaaggtaactggcttcagcagagcgcagataccaaatactgttcttctagtgtagccgtagttaggccaccacttcaagaactctgtagcaccgcctacatacctcgctctgctaatcctgttaccagtggctgctgccagtggcgataagtcgtgtcttaccgggttggactcaagacgatagttaccggataaggcgcagcggtcgggctgaacggggggttcgtgcacacagcccagcttggagcgaacgacctacaccgaactgagatacctacagcgtgagctatgagaaagcgccacgcttcccgaagggagaaaggcggacaggtatccggtaagcggcagggtcggaacaggagagcgcacgagggagcttccagggggaaacgcctggtatctttatagtcctgtcgggtttcgccacctctgacttgagcgtcgatttttgtgatgctcgtcaggggggcggagcctatggaaaaacgccagcaacgcggcctttttacggttcctggccttttgctggccttttgctcacatgttctttcctgcgttatcccctgattctgtggataaccgtattaccgcctttgagtgagctgataccgctcgccgcagccgaacgaccgagcgcagcgagtcagtgagcgaggatttacggctagctcagtcctaggtactatgctagccacgtggagatataccatgggtgaactgccgagtaggtagctgataacagtacagcgcggctgaaatcatcattaaagcggtgaactgccgagtaggtagctgataacggatccgaattcgagcgaaggagatatacatatgtttttgcaaagacctaaaccttacagcgatgaaagtttagaaagtttctttatccgagtggctaacaaaaatggctacggtgatgtccatcgcttcctagaagccactaaacgattccttcaagacattgaccataatggctatcaaacctttccgactgatataactcggataaacccatactcagctaaaaacagttccagcgcacgaactgcgtcattcctgaaacttgcacaattgacatttaatgaaccgccagagctacttgggttggcaattaacagaacaaacatgaaatactcgccgtcaactagcgcggttgttagaggtgcagaagtctttcctcgcagtttactacggacgcactccatcccctgctgtcctttgtgtctgcgagaaaatggctacgcctcctacctttggcactttcaggggtacgaatactgccacagccataacgtacctttaattaccacttgtagctgtggtaaggagtttgactaccgagtatctgggttaaagggcatttgctgcaaatgcaaggagcctatcaccttaaccagcagggagaacggtcatgaggcagcgtgtactgtttcaaactggcttgctggccatgaatctaaacctctgccaaatcttcctaaaagctaccgatggggtttagttcattggtggatgggtattaaagatagcgagttcgatcacttttcgttcgttcaatttttctcaaactggccaaggtcattccactcgataatcgaagatgaagtagagttcaaccttgagcatgctgttgtcagcacgtctgaattacgactaaaagatcttcttggtcgattgtttttcggttcaattcggttacctgagcggaatcttcaacacaatatcatccttggtgagcttctctgctatttagaaaatcgtttatggcaagacaagggattaatcgccaacctcaaaatgaacgcgttagaggcgactgtaatgttaaattgtagcctcgatcagattgcatcaatggttgaacaacgcatcttgaagccaaatcgaaaaagcaagcccaacagccctcttgatgttaccgattatctatttcatttcggcgatattttctgtctttggttagctgagttccaaagcgatgagtttaaccgttcgttttatgtgtcgaggtggtaaatgcaaactctgaaagaactaatcgcatccaatcctgacgacttaacaactgaacttaagagagcatttcgtccactcacaccgcatattgcaattgatggtaatgaacttgacgcactgacgatattagtcaatttaaccgataagactgatgatcagaaagacctgctcgatcgagccaaatgcaagcaaaaacttcgagatgaaaaatggtgggctagctgcataaattgcgttaattacagacaaagccataacccaaaattcccggatatacgttctgaaggcgtgattcgaacccaagccctgggtgaattaccgagtttcctactctcgtcctcaaaaatcccaccataccattggtcatatagccatgattcaaaatacgtcaacaaaagcgcattcctcaccaatgagttttgttgggatggtgagatctcatgtttgggtgagcttcttaaagatgcagatcacccactttggaatactttgaaaaagttaggttgttctcaaaaaacttgcaaagcaatggcaaaacaactagctgatattactctcacgactatcaatgtcacactcgcaccaaattacctgactcaaatatctctccccgatagtgatacatcctacatttcactctctcctgttgcatcgctatcgatgcaaagccactttcatcagaggctccaagatgaaaatcggcatagcgcgataacgcggtttagccgaactaccaacatgggggtcactgcgatgacatgtggcggcgcatttagaatgttaaagtctggcgctaagttttccagcccccctcatcaccgattaaacagtaaacgaagttggttgacgtcagagcatgttcagtcattaaaacagtaccagcgcctcaacaaaagcctcatacctgaaaactctcggattgcactccgtagaaaatacaaaatcgagcttcaaaatatggtcagatcttggtttgcaatgcaagaccatacccttgattcgaacatacttatccaacatttgaatcatgacctatcttacttaggagccacaaaacgttttgcatacgatccagcgatgaccaagctctttactgagcttttgaaacgagagttatcaaattcaatcaataatggtgagcaacacactaatggatcgtttttagtcctaccgaatatcagggtttgtggcgcaacagctttaagctccccggtaacggtggggattccatcacttacagctttctttggcttcgttcacgcatttgaacggaatataaatcgcaccacctcatcgtttcgtgttgaatcctttgcgatatgcgtccatcaactacatgtcgagaagcgaggtttgacagcagagtttgtggaaaaaggcgacgggactatatccgctcccgcgacccgggatgactggcagtgtgatgtcgtatttagccttattttgaacaccaactttgctcaacatattgaccaagatacgttagttacatcactaccaaagcgattggctcggggttcagcaaaaattgcgattgatgactttaaacatatcaactcattctcgacattagaaacagcgatcgaatctctgccaatagaagctggtaggtggttatcactttacgcacagtcaaacaataatctaagtgatctattagcagccatgacagaggaccatcagctcatggcaagctgcgtcggttaccacttgttagaagagcccaaagataaaccaaactccctcagaggttacaaacacgctatcgccgagtgcatcattggactcattaactcaatcacctttagctcagagactgatcccaacacaatcttttggtcgctaaagaactatcaaaactacctagtggtacagccaaggagtatcaacgatgaaactaccgacaaatctagcctatgagcgctctatcgacccatcagatgtctgtttttttgtcgtctggcccgatgatagaaaaacacctttaacctacaattctcgtactctgctcgggcaaatggaagcggcatcattagcctatgatgtctcaggtcaaccaataaaaagtgccaccgctgaggcgttagctcaagggaaccctcatcaagttgatttctgccacgttccatacggtgcgagtcatattgaatgcagtttctccgtctcgttttcttctgaactacgtcaaccatataagtgtaactcaagcaaagttaaacaaacgctagtgcaattagtcgagctctacgaaacgaaaatcggctggactgagctagcaacccgatatttgatgaacatttgcaacggtaaatggctgtggaaaaatacccgtaaagcctattgctggaacattgtacttacaccttggccttggaacggggaaaaggttggatttgaagatattcgtactaactacacctcacggcaagactttaaaaataataaaaattggtctgctatagttgaaatgatcaaaaccgcattttctagtactgatgggctggcgatatttgaagtcagggccaccttgcacttgccaacgaatgctatggtgcggccaagccaagttttcacagaaaaagaaagtggcagtaaaagtaaatctaaaactcaaaacagtcgagtttttcagagtacaactattgatggtgaacgatcgccaatactaggggcctttaaaacgggagcagctattgcaaccattgacgactggtatcctgaagccactgagccactaagggtcggacggtttggggttcatcgcgaagatgtcacttgctaccgtcatccgtctaccggaaaagattttttctcgatattacaacaagcagagcactatattgaagtgttgagcgccaacaaaactcccgctcaagaaactatcaacgacatgcactttttaatggctaacctgattaagggtgggatgttccagcataaaggagactgactgtgaaatggtattataagacaatcacctttctgccagagttgtgcaacaacgagtcactggctgcaaagtgtctccgcgttctgcatggatttaactatcagtatgagacacgaaatatcggcgtttcatttccgctttggtgtgatgcaacggttggaaaaaagatttcatttgtcagcaagaacaagatagaactcgacttactacttaaacaacactatttcgtccaaatggaacaacttcaatactttcatatatccaacactgttctcgtcccagaagattgtacatacgtttcctttagacgctgtcaatctatagataagctcacagcagcagggctggcaaggaaaatcagacgcctggagaaacgtgctctatctagaggcgagcaatttgacccatcatcttttgctcaaaaagagcatactgcaatagcgcactaccactcacttggggagtccagcaaacagacgaaccgcaactttcgactcaatatcaggatgctctcggagcaaccccgtgaggggaactcgatttttagtagctatggcttatcaaattcagaaaactcgtttcagcctgtacccttaatctgacctttaataaggagatataccatggcgacaagtttacctacgccctcagcaattacgacttcggcgttagagtatgcattccatactcccgctcgcaatctaacgaaatctcgcggaaaaaacattcatcgttatgtcagtgtaaagatgagtaagaggattacggtagaatctactctagagtgtgatgcctgctatcactttgattttgagccaagtattgttcgcttttgcgctcaaccgattcgatttttatattatctcaatggtcagtctcactcctatgttcctgactttctagttcaatttgataccaacgagtttgttctatatgaagtaaagtcagcttatgctaagaacaaacctgattttgatgttgaatgggaggcgaaagtaaaagcagcaactgaactagggctagaattggagcttgttgaagagagtgatattagggatacggttgtattaaataatcttaagcgcatgcatcgttatgcttcgaaagatgagctgaataacgtacataactctctcttaaaaataataaagtacaatggcgcccaatctgcaagatgcttgggagaacagttgggtttaaaaggccgaactgttttaccaattttgtgcgatttgctgtcaaggtgtttactcgatacacgtttggataagcctctatctcttgaatctcgatttgagttggccagttatggctaagaaagggttctcaagtttccatagaaaagcagtctcttcccaagatacgcttgaatcgatagagcttgtctctagcgctaattgtctagaaagtgttacgtatcaagatatatcagcatttcccgaaacaattgcggtagagattaatttccgattaagcattcttcgctttttagcgcgaaagtgcgaaaccattgtggccaaatcaattgaaccacatcgtgtagagctacagcaaaactatagtagaaaaatacccagtgcaataacgatatatcgatggtggcttgcttttcgaaaatcagactacaaccccattagcttagcacctaatatcaaggatagaggtaatagagagacaaaagtgtcaacagttgttgattctattatggaacaggcagttgaaagagttatatctggacgaaaagtcaatgttagctctgcatataaacgtgttcgacgaaaagttcgtcaatacaatctaactcatggaacgaaatacacgtatcctaagtacgaatctgtaagaaagcgagtaaaaaagaaaaccccatttgagttattagccgcagggaaaggggagagagtagctaagagagagtttcgccgaatgggaaaaaagatcctcacgtctagcgtgctagagagggttgaaatagatcacactgtcgttgacctttttgcagtacacgaagagtatcgaatcccattgggccgaccttggcttactcaattggttgattgttacagtaaagctgtaatcggtttttatttaggtttcgagcctcctagctatgtgtcggtttcccttgcacttaagaatgcaatacaacgcaaagatgacttaatctcctcgtatgaatcgatcgagaatgaatggctatgttatggcatcccagacctactcgtaactgataatggtaaagagtttttgtcgaaagcatttgatcaagcatgtgaatcactattgatcaatgtgcatcaaaataaagttgagacgcccgacaacaaacctcatgttgaacgtaactacgggactattaatacttctctgttagacgatttacctgggaaatccttcagccagtaccttcaaagagaagggtacgactctgtgggagaagctacccttacactcaatgagattagagaaatttacttaatttggttggtggatatttatcataaaaaacccaatcagagaggcactaattgtcctaatgttgcgtggaaaaagggttgtcaagaatgggaaccagaggagttctctggttctaaagacgaattagactttaaatttgctattgttgattacaaacaacttactaaagtagggataactgtctacaaagaactgagttatagcaatgaccgtttagctgaatatagagggaagaaaggaaaccataaagttcagttcaagtataaccctgagtgtatggcagttatttgggtgttggatgaggatatgaatgagtactttacagttaatgcgattgactacgaatatgcaagtagagtatcactttggcaacataaatataacatgaaatatcaagcagaactaaattcagcagaatatgatgaggacaaggaaattgatgcagaaataaaaattgaagaaatcgcagatcgttcaattgttaagactaacaaaatcagagctcggaggcgtggcgctaggcatcaagagaatagcgcaagggctaagtcaatcagtaatgcgaacccggcctcgatacaaaaacatgaagatgaaatcgttagtgcagataatgacgattgggatattgattatgtctgagaaatcgtcaaatgagtgaaacgcgtgaggctcgtatatcaagagctaaaagggcatttgtatccacaccgagcgttaggaaaatcttgagttacatggatagatgtagagatctatcagacctagagtctgagcctacatgcatgatggtctatggtgcttcgggtgtaggtaaaacgaccgtcatcaagaaatacttaaatcaaaacagaagagagtccgaagccgggggcgatataataccggttttgcatattgagttgccagacaatgcgaagccagtagatgcagcaagggaattgctggttgaaatgggtgacccgctagcactttatgaaactgacttagctagattgacgaaaagactgactgaattaatccctgcggtcggcgtgaagctgattattatcgatgagttccaacatttggtggaagaaaggtcaaatcgggttcttacccaagtaggtaattggctaaaaatgatacttaacaaaacgaaatgtccaattgttatatttggtatgccatactcaaaagttgtactgcaagcaaactcgcaacttcacgggcgattttccattcaggttgaactgcgcccctttagctaccagggaggtagaggtgtatttaaaacttttttggaataccttgataaagccctaccttttgaaaaacaggctggcttagccaacgaaagtttgcagaaaaaattgtatgcattctctcagggaaacatgcgttcgttgagaaaccttatttatcaagcatctatcgaagcaattgataatcagcatgagacgataaccgaagaagatttcgtttttgcatcgaagttgacatcgggcgataaacccaactcatggaaaaatccttttgaggagggtgttgaggtaacagaagatatgttacgaccgccaccaaaagatattggttgggaggactatttgagacattcaaccccgagagtgagtaaaccaggtagaaataaaaactttttcgaataacctaggctgctgcgctgctgccaccgctgagcaataactagcataaccccttggggcctctaaacgggtcttgaggggttttttgctgaaacctcaggcatttgttgttgatacaaccataaaatgataattacacccataaattgataattatcacacccataaattgatattgcctcttcatggtctaaacttcagtaagtttacgacattttcatgaactcgaggtcatttccggggatccatggagaaaaaaatcactggatataccaccgttgatatatcccaatggcatcgtaaagaacattttgaggcatttcagtcagttgctcaatgtacctataaccagaccgttcagctggatattacggcctttttaaagaccgtaaagaaaaataagcacaagttttatccggcctttattcacattcttgcccgcctgatgaatgctcatccggagttccgtatggcaatgaaagacggtgagctggtgatatgggatagtgttcacccttgttacaccgttttccatgagcaaactgaaacgttttcatcgctctggagtgaataccacgacgatttccggcagtttctacacatatattcgcaagatgtggcgtgttacggtgaaaacctggcctatttccctaaagggtttattgagaatatgtttttcgtctcagccaatccctgggtgagtttcaccagttttgatttaaacgtggccaatatggacaacttcttcgcccccgttttcactatgggcaaatattatacgcaaggcgacaaggtgctgatgccgctggcgattcaggttcatcatgccgtttgtgatggcttccatgtcggcagaatgcttaatgaattacaacagtactgcgatgagtggcagggcggggcgtaatttttttaaggcagttattggtgcccttctagagtccttactgcagtagttttgctgaaatactcgattcacaaaaatatcaacttatggttgttttgtgagatatcaatatatggttgttttgtggttaagttgctgattataaataattattaaatatcactttatggttgcatcaacaggtaccgagctcgaattcactggccgtcgttttacaacgtcgtgactgggaaaaccctggcgttacccaacttaatcgccttgcagcacatccccctttcgccagctggcgtaatagcgaagaggcccgcaccgatcgcccttcccaacagttgcgcagcctgaatggcgaatggcgcctgatgcggtattttctccttacgcatctgtgcggtatttcacaccgcatatggtgcactctcagtacaatctgctctgatgccgcatagttaagccagccccgacacccgccaacacccgctgacgcgccctgacgggcttgtctgctcccggcatccgcttacagacaagctgtgaccgtctccgggagctgcatgtgtcagaggttttcaccgtcatcaccgaaacgcgcgagacgaaagggcctcgtgatacgcctatttttataggttaatgtcatgataataatggtttcttagacgtcaggtggcact

SEQ ID NO: 867 - DNA, 11927 bp, Synthetic construct
  source 1..11927: mol_type = other DNA
tttcggggaaatgtgcgcggaacccctatttgtttatttttctaaatacattcaaatatgtatccgctcatgagacaataaccctgataaatgcttcaataatattgaaaaaggaagagtatgagtattcaacatttccgtgtcgcccttattcccttttttgcggcattttgccttcctgtttttgctcacccagaaacgctggtgaaagtaaaagatgctgaagatcagttgggtgcacgagtgggttacatcgaactggatctcaacagcggtaagatccttgagagttttcgccccgaagaacgttttccaatgatgagcacttttaaagttctgctatgtggcgcggtattatcccgtattgacgccgggcaagagcaactcggtcgccgcatacactattctcagaatgacttggttgagtactcaccagtcacagaaaagcatcttacggatggcatgacagtaagagaattatgcagtgctgccataaccatgagtgataacactgcggccaacttacttctgacaacgatcggaggaccgaaggagctaaccgcttttttgcacaacatgggggatcatgtaactcgccttgatcgttgggaaccggagctgaatgaagccataccaaacgacgagcgtgacaccacgatgcctgtagcaatggcaacaacgttgcgcaaactattaactggcgaactacttactctagcttcccggcaacaattaatagactggatggaggcggataaagttgcaggaccacttctgcgctcggcccttccggctggctggtttattgctgataaatctggagccggtgagcgtggctctcgcggtatcattgcagcactggggccagatggtaagccctcccgtatcgtagttatctacacgacggggagtcaggcaactatggatgaacgaaatagacagatcgctgagataggtgcctcactgattaagcattggtaactgtcagaccaagtttactcatatatactttagattgatttaaaacttcatttttaatttaaaaggatctaggtgaagatcctttttgataatctcatgaccaaaatcccttaacgtgagttttcgttccactgagcgtcagaccccgtagaaaagatcaaaggatcttcttgagatcctttttttctgcgcgtaatctgctgcttgcaaacaaaaaaaccaccgctaccagcggtggtttgtttgccggatcaagagctaccaactctttttccgaaggtaactggcttcagcagagcgcagataccaaatactgttcttctagtgtagccgtagttaggccaccacttcaagaactctgtagcaccgcctacatacctcgctctgctaatcctgttaccagtggctgctgccagtggcgataagtcgtgtcttaccgggttggactcaagacgatagttaccggataaggcgcagcggtcgggctgaacggggggttcgtgcacacagcccagcttggagcgaacgacctacaccgaactgagatacctacagcgtgagctatgagaaagcgccacgcttcccgaagggagaaaggcggacaggtatccggtaagcggcagggtcggaacaggagagcgcacgagggagcttccagggggaaacgcctggtatctttatagtcctgtcgggtttcgccacctctgacttgagcgtcgatttttgtgatgctcgtcaggggggcggagcctatggaaaaacgccagcaacgcggcctttttacggttcctggccttttgctggccttttgctcacatgttctttcctgcgttatcccctgattctgtggataaccgtattaccgcctttgagtgagctgataccgctcgccgcagccgaacgaccgagcgcagcgagtcagtgagcgaggatttatggctagctcagtcctaggtacaatgctagccacgtggagatataccatgggtgaactgccgagtaggtagctgataacagtacagcgcggctgaaatcatcattaaagcggtgaactgccgagtaggtagctgataacggatccgaattcgagcgaaggagatatacatatgtttttgcaaagacctaaaccttacagcgatgaaagtttagaaagtttctttatccgagtggctaacaaaaatggctacggtgatgtccatcgcttcctagaagccactaaacgattccttcaagacattgaccataatggctatcaaacctttccgactgatataactcggataaacccatactcagctaaaaacagttccagcgcacgaactgcgtcattcctgaaacttgcacaattgacatttaatgaaccgccagagctacttgggttggcaattaacagaacaaacatgaaatactcgccgtcaactagcgcggttgttagaggtgcagaagtctttcctcgcagtttactacggacgcactccatcccctgctgtcctttgtgtctgcgagaaaatggctacgcctcctacctttggcactttcaggggtacgaatactgccacagccataacgtacctttaattaccacttgtagctgtggtaaggagtttgactaccgagtatctgggttaaagggcatttgctgcaaatgcaaggagcctatcaccttaaccagcagggagaacggtcatgaggcagcgtgtactgtttcaaactggcttgctggccatgaatctaaacctctgccaaatcttcctaaaagctaccgatggggtttagttcattggtggatgggtattaaagatagcgagttcgatcacttttcgttcgttcaatttttctcaaactggccaaggtcattccactcgataatcgaagatgaagtagagttcaaccttgagcatgctgttgtcagcacgtctgaattacgactaaaagatcttcttggtcgattgtttttcggttcaattcggttacctgagcggaatcttcaacacaatatcatccttggtgagcttctctgctatttagaaaatcgtttatggcaagacaagggattaatcgccaacctcaaaatgaacgcgttagaggcgactgtaatgttaaattgtagcctcgatcagattgcatcaatggttgaacaacgcatcttgaagccaaatcgaaaaagcaagcccaacagccctcttgatgttaccgattatctatttcatttcggcgatattttctgtctttggttagctgagttccaaagcgatgagtttaaccgttcgttttatgtgtcgaggtggtaaatgcaaactctgaaagaactaatcgcatccaatcctgacgacttaacaactgaacttaagagagcatttcgtccactcacaccgcatattgcaattgatggtaatgaacttgacgcactgacgatattagtcaatttaaccgataagactgatgatcagaaagacctgctcgatcgagccaaatgcaagcaaaaacttcgagatgaaaaatggtgggctagctgcataaattgcgttaattacagacaaagccataacccaaaattcccggatatacgttctgaaggcgtgattcgaacccaagccctgggtgaattaccgagtttcctactctcgtcctcaaaaatcccaccataccattggtcatatagccatgattcaaaatacgtcaacaaaagcgcattcctcaccaatgagttttgttgggatggtgagatctcatgtttgggtgagcttcttaaagatgcagatcacccactttggaatactttgaaaaagttaggttgttctcaaaaaacttgcaaagcaatggcaaaacaactagctgatattactctcacgactatcaatgtcacactcgcaccaaattacctgactcaaatatctctccccgatagtgatacatcctacatttcactctctcctgttgcatcgctatcgatgcaaagccactttcatcagaggctccaagatgaaaatcggcatagcgcgataacgcggtttagccgaactaccaacatgggggtcactgcgatgacatgtggcggcgcatttagaatgttaaagtctggcgctaagttttccagcccccctcatcaccgattaaacagtaaacgaagttggttgacgtcagagcatgttcagtcattaaaacagtaccagcgcctcaacaaaagcctcatacctgaaaactctcggattgcactccgtagaaaatacaaaatcgagcttcaaaatatggtcagatcttggtttgcaatgcaagaccatacccttgattcgaacatacttatccaacatttgaatcatgacctatcttacttaggagccacaaaacgttttgcatacgatccagcgatgaccaagctctttactgagcttttgaaacgagagttatcaaattcaatcaataatggtgagcaacacactaatggatcgtttttagtcctaccgaatatcagggtttgtggcgcaacagctttaagctccccggtaacggtggggattccatcacttacagctttctttggcttcgttcacgcatttgaacggaatataaatcgcaccacctcatcgtttcgtgttgaatcctttgcgatatgcgtccatcaactacatgtcgagaagcgaggtttgacagcagagtttgtggaaaaaggcgacgggactatatccgctcccgcgacccgggatgactggcagtgtgatgtcgtatttagccttattttgaacaccaactttgctcaacatattgaccaagatacgttagttacatcactaccaaagcgattggctcggggttcagcaaaaattgcgattgatgactttaaacatatcaactcattctcgacattagaaacagcgatcgaatctctgccaatagaagctggtaggtggttatcactttacgcacagtcaaacaataatctaagtgatctattagcagccatgacagaggaccatcagctcatggcaagctgcgtcggttaccacttgttagaagagcccaaagataaaccaaactccctcagaggttacaaacacgctatcgccgagtgcatcattggactcattaactcaatcacctttagctcagagactgatcccaacacaatcttttggtcgctaaagaactatcaaaactacctagtggtacagccaaggagtatcaacgatgaaactaccgacaaatctagcctatgagcgctctatcgacccatcagatgtctgtttttttgtcgtctggcccgatgatagaaaaacacctttaacctacaattctcgtactctgctcgggcaaatggaagcggcatcattagcctatgatgtctcaggtcaaccaataaaaagtgccaccgctgaggcgttagctcaagggaaccctcatcaagttgatttctgccacgttccatacggtgcgagtcatattgaatgcagtttctccgtctcgttttcttctgaactacgtcaaccatataagtgtaactcaagcaaagttaaacaaacgctagtgcaattagtcgagctctacgaaacgaaaatcggctggactgagctagcaacccgatatttgatgaacatttgcaacggtaaatggctgtggaaaaatacccgtaaagcctattgctggaacattgtacttacaccttggccttggaacggggaaaaggttggatttgaagatattcgtactaactacacctcacggcaagactttaaaaataataaaaattggtctgctatagttgaaatgatcaaaaccgcattttctagtactgatgggctggcgatatttgaagtcagggccaccttgcacttgccaacgaatgctatggtgcggccaagccaagttttcacagaaaaagaaagtggcagtaaaagtaaatctaaaactcaaaacagtcgagtttttcagagtacaactattgatggtgaacgatcgccaatactaggggcctttaaaacgggagcagctattgcaaccattgacgactggtatcctgaagccactgagccactaagggtcggacggtttggggttcatcgcgaagatgtcacttgctaccgtcatccgtctaccggaaaagattttttctcgatattacaacaagcagagcactatattgaagtgttgagcgccaacaaaactcccgctcaagaaactatcaacgacatgcactttttaatggctaacctgattaagggtgggatgttccagcataaaggagactgactgtgaaatggtattataagacaatcacctttctgccagagttgtgcaacaacgagtcactggctgcaaagtgtctccgcgttctgcatggatttaactatcagtatgagacacgaaatatcggcgtttcatttccgctttggtgtgatgcaacggttggaaaaaagatttcatttgtcagcaagaacaagatagaactcgacttactacttaaacaacactatttcgtccaaatggaacaacttcaatactttcatatatccaacactgttctcgtcccagaagattgtacatacgtttcctttagacgctgtcaatctatagataagctcacagcagcagggctggcaaggaaaatcagacgcctggagaaacgtgctctatctagaggcgagcaatttgacccatcatcttttgctcaaaaagagcatactgcaatagcgcactaccactcacttggggagtccagcaaacagacgaaccgcaactttcgactcaatatcaggatgctctcggagcaaccccgtgaggggaactcgatttttagtagctatggcttatcaaattcagaaaactcgtttcagcctgtacccttaatctgacctttaataaggagatataccatggcgacaagtttacctacgccctcagcaattacgacttcggcgttagagtatgcattccatactcccgctcgcaatctaacgaaatctcgcggaaaaaacattcatcgttatgtcagtgtaaagatgagtaagaggattacggtagaatctactctagagtgtgatgcctgctatcactttgattttgagccaagtattgttcgcttttgcgctcaaccgattcgatttttatattatctcaatggtcagtctcactcctatgttcctgactttctagttcaatttgataccaacgagtttgttctatatgaagtaaagtcagcttatgctaagaacaaacctgattttgatgttgaatgggaggcgaaagtaaaagcagcaactgaactagggctagaattggagcttgttgaagagagtgatattagggatacggttgtattaaataatcttaagcgcatgcatcgttatgcttcgaaagatgagctgaataacgtacataactctctcttaaaaataataaagtacaatggcgcccaatctgcaagatgcttgggagaacagttgggtttaaaaggccgaactgttttaccaattttgtgcgatttgctgtcaaggtgtttactcgatacacgtttggataagcctctatctcttgaatctcgatttgagttggccagttatggctaagaaagggttctcaagtttccatagaaaagcagtctcttcccaagatacgcttgaatcgatagagcttgtctctagcgctaattgtctagaaagtgttacgtatcaagatatatcagcatttcccgaaacaattgcggtagagattaatttccgattaagcattcttcgctttttagcgcgaaagtgcgaaaccattgtggccaaatcaattgaaccacatcgtgtagagctacagcaaaactatagtagaaaaatacccagtgcaataacgatatatcgatggtggcttgcttttcgaaaatcagactacaaccccattagcttagcacctaatatcaaggatagaggtaatagagagacaaaagtgtcaacagttgttgattctattatggaacaggcagttgaaagagttatatctggacgaaaagtcaatgttagctctgcatataaacgtgttcgacgaaaagttcgtcaatacaatctaactcatggaacgaaatacacgtatcctaagtacgaatctgtaagaaagcgagtaaaaaagaaaaccccatttgagttattagccgcagggaaaggggagagagtagctaagagagagtttcgccgaatgggaaaaaagatcctcacgtctagcgtgctagagagggttgaaatagatcacactgtcgttgacctttttgcagtacacgaagagtatcgaatcccattgggccgaccttggcttactcaattggttgattgttacagtaaagctgtaatcggtttttatttaggtttcgagcctcctagctatgtgtcggtttcccttgcacttaagaatgcaatacaacgcaaagatgacttaatctcctcgtatgaatcgatcgagaatgaatggctatgttatggcatcccagacctactcgtaactgataatggtaaagagtttttgtcgaaagcatttgatcaagcatgtgaatcactattgatcaatgtgcatcaaaataaagttgagacgcccgacaacaaacctcatgttgaacgtaactacgggactattaatacttctctgttagacgatttacctgggaaatccttcagccagtaccttcaaagagaagggtacgactctgtgggagaagctacccttacactcaatgagattagagaaatttacttaatttggttggtggatatttatcataaaaaacccaatcagagaggcactaattgtcctaatgttgcgtggaaaaagggttgtcaagaatgggaaccagaggagttctctggttctaaagacgaattagactttaaatttgctattgttgattacaaacaacttactaaagtagggataactgtctacaaagaactgagttatagcaatgaccgtttagctgaatatagagggaagaaaggaaaccataaagttcagttcaagtataaccctgagtgtatggcagttatttgggtgttggatgaggatatgaatgagtactttacagttaatgcgattgactacgaatatgcaagtagagtatcactttggcaacataaatataacatgaaatatcaagcagaactaaattcagcagaatatgatgaggacaaggaaattgatgcagaaataaaaattgaagaaatcgcagatcgttcaattgttaagactaacaaaatcagagctcggaggcgtggcgctaggcatcaagagaatagcgcaagggctaagtcaatcagtaatgcgaacccggcctcgatacaaaaacatgaagatgaaatcgttagtgcagataatgacgattgggatattgattatgtctgagaaatcgtcaaatgagtgaaacgcgtgaggctcgtatatcaagagctaaaagggcatttgtatccacaccgagcgttaggaaaatcttgagttacatggatagatgtagagatctatcagacctagagtctgagcctacatgcatgatggtctatggtgcttcgggtgtaggtaaaacgaccgtcatcaagaaatacttaaatcaaaacagaagagagtccgaagccgggggcgatataataccggttttgcatattgagttgccagacaatgcgaagccagtagatgcagcaagggaattgctggttgaaatgggtgacccgctagcactttatgaaactgacttagctagattgacgaaaagactgactgaattaatccctgcggtcggcgtgaagctgattattatcgatgagttccaacatttggtggaagaaaggtcaaatcgggttcttacccaagtaggtaattggctaaaaatgatacttaacaaaacgaaatgtccaattgttatatttggtatgccatactcaaaagttgtactgcaagcaaactcgcaacttcacgggcgattttccattcaggttgaactgcgcccctttagctaccagggaggtagaggtgtatttaaaacttttttggaataccttgataaagccctaccttttgaaaaacaggctggcttagccaacgaaagtttgcagaaaaaattgtatgcattctctcagggaaacatgcgttcgttgagaaaccttatttatcaagcatctatcgaagcaattgataatcagcatgagacgataaccgaagaagatttcgtttttgcatcgaagttgacatcgggcgataaacccaactcatggaaaaatccttttgaggagggtgttgaggtaacagaagatatgttacgaccgccaccaaaagatattggttgggaggactatttgagacattcaaccccgagagtgagtaaaccaggtagaaataaaaactttttcgaataacctaggctgctgcgctgctgccaccgctgagcaataactagcataaccccttggggcctctaaacgggtcttgaggggttttttgctgaaacctcaggcatttgttgttgatacaaccataaaatgataattacacccataaattgataattatcacacccataaattgatattgcctcttcatggtctaaacttcagtaagtttacgacattttcatgaactcgaggtcatttccggggatccatggagaaaaaaatcactggatataccaccgttgatatatcccaatggcatcgtaaagaacattttgaggcatttcagtcagttgctcaatgtacctataaccagaccgttcagctggatattacggcctttttaaagaccgtaaagaaaaataagcacaagttttatccggcctttattcacattcttgcccgcctgatgaatgctcatccggagttccgtatggcaatgaaagacggtgagctggtgatatgggatagtgttcacccttgttacaccgttttccatgagcaaactgaaacgttttcatcgctctggagtgaataccacgacgatttccggcagtttctacacatatattcgcaagatgtggcgtgttacggtgaaaacctggcctatttccctaaagggtttattgagaatatgtttttcgtctcagccaatccctgggtgagtttcaccagttttgatttaaacgtggccaatatggacaacttcttcgcccccgttttcactatgggcaaatattatacgcaaggcgacaaggtgctgatgccgctggcgattcaggttcatcatgccgtttgtgatggcttccatgtcggcagaatgcttaatgaattacaacagtactgcgatgagtggcagggcggggcgtaatttttttaaggcagttattggtgcccttctagagtccttactgcagtagttttgctgaaatactcgattcacaaaaatatcaacttatggttgttttgtgagatatcaatatatggttgttttgtggttaagttgctgattataaataattattaaatatcactttatggttgcatcaacaggtaccgagctcgaattcactggccgtcgttttacaacgtcgtgactgggaaaaccctggcgttacccaacttaatcgccttgcagcacatccccctttcgccagctggcgtaatagcgaagaggcccgcaccgatcgcccttcccaacagttgcgcagcctgaatggcgaatggcgcctgatgcggtattttctccttacgcatctgtgcggtatttcacaccgcatatggtgcactctcagtacaatctgctctgatgccgcatagttaagccagccccgacacccgccaacacccgctgacgcgccctgacgggcttgtctgctcccggcatccgcttacagacaagctgtgaccgtctccgggagctgcatgtgtcagaggttttcaccgtcatcaccgaaacgcgcgagacgaaagggcctcgtgatacgcctatttttataggttaatgtcatgataataatggtttcttagacgtcaggtggcact

SEQ ID NO: 868 - DNA, 14288 bp, Synthetic construct
  source 1..14288: mol_type = other DNA
accttcgggagcgcctgaagcccgttctggacgccctggggccgttgaatcgggatatgcaggccaaggccgccgcgatcatcaaggccgtgggcgaaaagctgctgacggaacagcgggaagtccagcgccagaaacaggcccagcgccagcaggaacgcgggcgcgcacatttccccgaaaagtgccacctgggatgaatgtcagctactgggctatctggacaagggaaaacgcaagcgcaaagagaaagcaggtagcttgcagtgggcttacatggcgatagctagactgggcggttttatggacagcaagcgaaccggaattgccagctggggcgccctctggtaaggttgggaagccctgcaaagtaaactggatggctttcttgccgccaaggatctgatggcgcaggggatcaagatctgatcaagagacaggatgaggatcgtttcgcatgattgaacaagatggattgcacgcaggttctccggccgcttgggtggagaggctattcggctatgactgggcacaacagacaatcggctgctctgatgccgccgtgttccggctgtcagcgcaggggcgcccggttctttttgtcaagaccgacctgtccggtgccctgaatgaactgcaagacgaggcagcgcggctatcgtggctggccacgacgggcgttccttgcgcagctgtgctcgacgttgtcactgaagcgggaagggactggctgctattgggcgaagtgccggggcaggatctcctgtcatctcaccttgctcctgccgagaaagtatccatcatggctgatgcaatgcggcggctgcatacgcttgatccggctacctgcccattcgaccaccaagcgaaacatcgcatcgagcgagcacgtactcggatggaagccggtcttgtcgatcaggatgatctggacgaagagcatcaggggctcgcgccagccgaactgttcgccaggctcaaggcgcgcatgcccgacggcgaggatctcgtcgtgacccatggcgatgcctgcttgccgaatatcatggtggaaaatggccgcttttctggattcatcgactgtggccggctgggtgtggcggaccgctatcaggacatagcgttggctacccgtgatattgctgaagagcttggcggcgaatgggctgaccgcttcctcgtgctttacggtatcgccgctcccgattcgcagcgcatcgccttctatcgccttcttgacgagttcttctgagcgggactctggggttcgaaatgaccgaccaagcgacgcccaacctgccatcacgagatttcgattccaccgccgccttctatgaaaggttgggcttcggaatcgttttccgggacgccggctggatgatcctccagcgcggggatctcatgctggagttcttcgcccacccccatgggcaaatattatacgcaaggcgacaaggtgctgatgccgctggcgattcaggttcatcatgccgtttgtgatggcttccatgtcggcagaatgcttaatgaattacaacagtttttatgcatgcgcccaatacgcaaaccgcctctccccgcgcgttggccgattcattaatgcagctggcacgacaggtttcccgactggtggataaccgtattaccgcctttgagtgagctgataccgctcgccgcagccgaacgaccgagcgcagcgagtcagtgagcgaggattgacagctagctcagtcctaggtataatactagccacgtggagatataccatgggtgaactgccgagtaggtagctgataacagtacagcgcggctgaaatcatcattaaagcggtgaactgccgagtaggtagctgataacggatccgaattcgagcgaaggagatatacatatgtttttgcaaagacctaaaccttacagcgatgaaagtttagaaagtttctttatccgagtggctaacaaaaatggctacggtgatgtccatcgcttcctagaagccactaaacgattccttcaagacattgaccataatggctatcaaacctttccgactgatataactcggataaacccatactcagctaaaaacagttccagcgcacgaactgcgtcattcctgaaacttgcacaattgacatttaatgaaccgccagagctacttgggttggcaattaacagaacaaacatgaaatactcgccgtcaactagcgcggttgttagaggtgcagaagtctttcctcgcagtttactacggacgcactccatcccctgctgtcctttgtgtctgcgagaaaatggctacgcctcctacctttggcactttcaggggtacgaatactgccacagccataacgtacctttaattaccacttgtagctgtggtaaggagtttgactaccgagtatctgggttaaagggcatttgctgcaaatgcaaggagcctatcaccttaaccagcagggagaacggtcatgaggcagcgtgtactgtttcaaactggcttgctggccatgaatctaaacctctgccaaatcttcctaaaagctaccgatggggtttagttcattggtggatgggtattaaagatagcgagttcgatcacttttcgttcgttcaatttttctcaaactggccaaggtcattccactcgataatcgaagatgaagtagagttcaaccttgagcatgctgttgtcagcacgtctgaattacgactaaaagatcttcttggtcgattgtttttcggttcaattcggttacctgagcggaatcttcaacacaatatcatccttggtgagcttctctgctatttagaaaatcgtttatggcaagacaagggattaatcgccaacctcaaaatgaacgcgttagaggcgactgtaatgttaaattgtagcctcgatcagattgcatcaatggttgaacaacgcatcttgaagccaaatcgaaaaagcaagcccaacagccctcttgatgttaccgattatctatttcatttcggcgatattttctgtctttggttagctgagttccaaagcgatgagtttaaccgttcgttttatgtgtcgaggtggtaaatgcaaactctgaaagaactaatcgcatccaatcctgacgacttaacaactgaacttaagagagcatttcgtccactcacaccgcatattgcaattgatggtaatgaacttgacgcactgacgatattagtcaatttaaccgataagactgatgatcagaaagacctgctcgatcgagccaaatgcaagcaaaaacttcgagatgaaaaatggtgggctagctgcataaattgcgttaattacagacaaagccataacccaaaattcccggatatacgttctgaaggcgtgattcgaacccaagccctgggtgaattaccgagtttcctactctcgtcctcaaaaatcccaccataccattggtcatatagccatgattcaaaatacgtcaacaaaagcgcattcctcaccaatgagttttgttgggatggtgagatctcatgtttgggtgagcttcttaaagatgcagatcacccactttggaatactttgaaaaagttaggttgttctcaaaaaacttgcaaagcaatggcaaaacaactagctgatattactctcacgactatcaatgtcacactcgcaccaaattacctgactcaaatatctctccccgatagtgatacatcctacatttcactctctcctgttgcatcgctatcgatgcaaagccactttcatcagaggctccaagatgaaaatcggcatagcgcgataacgcggtttagccgaactaccaacatgggggtcactgcgatgacatgtggcggcgcatttagaatgttaaagtctggcgctaagttttccagcccccctcatcaccgattaaacagtaaacgaagttggttgacgtcagagcatgttcagtcattaaaacagtaccagcgcctcaacaaaagcctcatacctgaaaactctcggattgcactccgtagaaaatacaaaatcgagcttcaaaatatggtcagatcttggtttgcaatgcaagaccatacccttgattcgaacatacttatccaacatttgaatcatgacctatcttacttaggagccacaaaacgttttgcatacgatccagcgatgaccaagctctttactgagcttttgaaacgagagttatcaaattcaatcaataatggtgagcaacacactaatggatcgtttttagtcctaccgaatatcagggtttgtggcgcaacagctttaagctccccggtaacggtggggattccatcacttacagctttctttggcttcgttcacgcatttgaacggaatataaatcgcaccacctcatcgtttcgtgttgaatcctttgcgatatgcgtccatcaactacatgtcgagaagcgaggtttgacagcagagtttgtggaaaaaggcgacgggactatatccgctcccgcgacccgggatgactggcagtgtgatgtcgtatttagccttattttgaacaccaactttgctcaacatattgaccaagatacgttagttacatcactaccaaagcgattggctcggggttcagcaaaaattgcgattgatgactttaaacatatcaactcattctcgacattagaaacagcgatcgaatctctgccaatagaagctggtaggtggttatcactttacgcacagtcaaacaataatctaagtgatctattagcagccatgacagaggaccatcagctcatggcaagctgcgtcggttaccacttgttagaagagcccaaagataaaccaaactccctcagaggttacaaacacgctatcgccgagtgcatcattggactcattaactcaatcacctttagctcagagactgatcccaacacaatcttttggtcgctaaagaactatcaaaactacctagtggtacagccaaggagtatcaacgatgaaactaccgacaaatctagcctatgagcgctctatcgacccatcagatgtctgtttttttgtcgtctggcccgatgatagaaaaacacctttaacctacaattctcgtactctgctcgggcaaatggaagcggcatcattagcctatgatgtctcaggtcaaccaataaaaagtgccaccgctgaggcgttagctcaagggaaccctcatcaagttgatttctgccacgttccatacggtgcgagtcatattgaatgcagtttctccgtctcgttttcttctgaactacgtcaaccatataagtgtaactcaagcaaagttaaacaaacgctagtgcaattagtcgagctctacgaaacgaaaatcggctggactgagctagcaacccgatatttgatgaacatttgcaacggtaaatggctgtggaaaaatacccgtaaagcctattgctggaacattgtacttacaccttggccttggaacggggaaaaggttggatttgaagatattcgtactaactacacctcacggcaagactttaaaaataataaaaattggtctgctatagttgaaatgatcaaaaccgcattttctagtactgatgggctggcgatatttgaagtcagggccaccttgcacttgccaacgaatgctatggtgcggccaagccaagttttcacagaaaaagaaagtggcagtaaaagtaaatctaaaactcaaaacagtcgagtttttcagagtacaactattgatggtgaacgatcgccaatactaggggcctttaaaacgggagcagctattgcaaccattgacgactggtatcctgaagccactgagccactaagggtcggacggtttggggttcatcgcgaagatgtcacttgctaccgtcatccgtctaccggaaaagattttttctcgatattacaacaagcagagcactatattgaagtgttgagcgccaacaaaactcccgctcaagaaactatcaacgacatgcactttttaatggctaacctgattaagggtgggatgttccagcataaaggagactgactgtgaaatggtattataagacaatcacctttctgccagagttgtgcaacaacgagtcactggctgcaaagtgtctccgcgttctgcatggatttaactatcagtatgagacacgaaatatcggcgtttcatttccgctttggtgtgatgcaacggttggaaaaaagatttcatttgtcagcaagaacaagatagaactcgacttactacttaaacaacactatttcgtccaaatggaacaacttcaatactttcatatatccaacactgttctcgtcccagaagattgtacatacgtttcctttagacgctgtcaatctatagataagctcacagcagcagggctggcaaggaaaatcagacgcctggagaaacgtgctctatctagaggcgagcaatttgacccatcatcttttgctcaaaaagagcatactgcaatagcgcactaccactcacttggggagtccagcaaacagacgaaccgcaactttcgactcaatatcaggatgctctcggagcaaccccgtgaggggaactcgatttttagtagctatggcttatcaaattcagaaaactcgtttcagcctgtacccttaatctgacctttaataaggagatataccatggcgacaagtttacctacgccctcagcaattacgacttcggcgttagagtatgcattccatactcccgctcgcaatctaacgaaatctcgcggaaaaaacattcatcgttatgtcagtgtaaagatgagtaagaggattacggtagaatctactctagagtgtgatgcctgctatcactttgattttgagccaagtattgttcgcttttgcgctcaaccgattcgatttttatattatctcaatggtcagtctcactcctatgttcctgactttctagttcaatttgataccaacgagtttgttctatatgaagtaaagtcagcttatgctaagaacaaacctgattttgatgttgaatgggaggcgaaagtaaaagcagcaactgaactagggctagaattggagcttgttgaagagagtgatattagggatacggttgtattaaataatcttaagcgcatgcatcgttatgcttcgaaagatgagctgaataacgtacataactctctcttaaaaataataaagtacaatggcgcccaatctgcaagatgcttgggagaacagttgggtttaaaaggccgaactgttttaccaattttgtgcgatttgctgtcaaggtgtttactcgatacacgtttggataagcctctatctcttgaatctcgatttgagttggccagttatggctaagaaagggttctcaagtttccatagaaaagcagtctcttcccaagatacgcttgaatcgatagagcttgtctctagcgctaattgtctagaaagtgttacgtatcaagatatatcagcatttcccgaaacaattgcggtagagattaatttccgattaagcattcttcgctttttagcgcgaaagtgcgaaaccattgtggccaaatcaattgaaccacatcgtgtagagctacagcaaaactatagtagaaaaatacccagtgcaataacgatatatcgatggtggcttgcttttcgaaaatcagactacaaccccattagcttagcacctaatatcaaggatagaggtaatagagagacaaaagtgtcaacagttgttgattctattatggaacaggcagttgaaagagttatatctggacgaaaagtcaatgttagctctgcatataaacgtgttcgacgaaaagttcgtcaatacaatctaactcatggaacgaaatacacgtatcctaagtacgaatctgtaagaaagcgagtaaaaaagaaaaccccatttgagttattagccgcagggaaaggggagagagtagctaagagagagtttcgccgaatgggaaaaaagatcctcacgtctagcgtgctagagagggttgaaatagatcacactgtcgttgacctttttgcagtacacgaagagtatcgaatcccattgggccgaccttggcttactcaattggttgattgttacagtaaagctgtaatcggtttttatttaggtttcgagcctcctagctatgtgtcggtttcccttgcacttaagaatgcaatacaacgcaaagatgacttaatctcctcgtatgaatcgatcgagaatgaatggctatgttatggcatcccagacctactcgtaactgataatggtaaagagtttttgtcgaaagcatttgatcaagcatgtgaatcactattgatcaatgtgcatcaaaataaagttgagacgcccgacaacaaacctcatgttgaacgtaactacgggactattaatacttctctgttagacgatttacctgggaaatccttcagccagtaccttcaaagagaagggtacgactctgtgggagaagctacccttacactcaatgagattagagaaatttacttaatttggttggtggatatttatcataaaaaacccaatcagagaggcactaattgtcctaatgttgcgtggaaaaagggttgtcaagaatgggaaccagaggagttctctggttctaaagacgaattagactttaaatttgctattgttgattacaaacaacttactaaagtagggataactgtctacaaagaactgagttatagcaatgaccgtttagctgaatatagagggaagaaaggaaaccataaagttcagttcaagtataaccctgagtgtatggcagttatttgggtgttggatgaggatatgaatgagtactttacagttaatgcgattgactacgaatatgcaagtagagtatcactttggcaacataaatataacatgaaatatcaagcagaactaaattcagcagaatatgatgaggacaaggaaattgatgcagaaataaaaattgaagaaatcgcagatcgttcaattgttaagactaacaaaatcagagctcggaggcgtggcgctaggcatcaagagaatagcgcaagggctaagtcaatcagtaatgcgaacccggcctcgatacaaaaacatgaagatgaaatcgttagtgcagataatgacgattgggatattgattatgtctgagaaatcgtcaaatgagtgaaacgcgtgaggctcgtatatcaagagctaaaagggcatttgtatccacaccgagcgttaggaaaatcttgagttacatggatagatgtagagatctatcagacctagagtctgagcctacatgcatgatggtctatggtgcttcgggtgtaggtaaaacgaccgtcatcaagaaatacttaaatcaaaacagaagagagtccgaagccgggggcgatataataccggttttgcatattgagttgccagacaatgcgaagccagtagatgcagcaagggaattgctggttgaaatgggtgacccgctagcactttatgaaactgacttagctagattgacgaaaagactgactgaattaatccctgcggtcggcgtgaagctgattattatcgatgagttccaacatttggtggaagaaaggtcaaatcgggttcttacccaagtaggtaattggctaaaaatgatacttaacaaaacgaaatgtccaattgttatatttggtatgccatactcaaaagttgtactgcaagcaaactcgcaacttcacgggcgattttccattcaggttgaactgcgcccctttagctaccagggaggtagaggtgtatttaaaacttttttggaataccttgataaagccctaccttttgaaaaacaggctggcttagccaacgaaagtttgcagaaaaaattgtatgcattctctcagggaaacatgcgttcgttgagaaaccttatttatcaagcatctatcgaagcaattgataatcagcatgagacgataaccgaagaagatttcgtttttgcatcgaagttgacatcgggcgataaacccaactcatggaaaaatccttttgaggagggtgttgaggtaacagaagatatgttacgaccgccaccaaaagatattggttgggaggactatttgagacattcaaccccgagagtgagtaaaccaggtagaaataaaaactttttcgaataacctaggctgctgcgctgctgccaccgctgagcaataactagcataaccccttggggcctctaaacgggtcttgaggggttttttgctgaaacctcaggcatttgttgttgatacaaccataaaatgataattacacccataaattgataattatcacacccataaattgatattgcctcttcatggtctaaacttcagtaagtttacgacattttcatgaactcgaggtcatttccggggatccatggagaaaaaaatcactggatataccaccgttgatatatcccaatggcatcgtaaagaacattttgaggcatttcagtcagttgctcaatgtacctataaccagaccgttcagctggatattacggcctttttaaagaccgtaaagaaaaataagcacaagttttatccggcctttattcacattcttgcccgcctgatgaatgctcatccggagttccgtatggcaatgaaagacggtgagctggtgatatgggatagtgttcacccttgttacaccgttttccatgagcaaactgaaacgttttcatcgctctggagtgaataccacgacgatttccggcagtttctacacatatattcgcaagatgtggcgtgttacggtgaaaacctggcctatttccctaaagggtttattgagaatatgtttttcgtctcagccaatccctgggtgagtttcaccagttttgatttaaacgtggccaatatggacaacttcttcgcccccgttttcactatgggcaaatattatacgcaaggcgacaaggtgctgatgccgctggcgattcaggttcatcatgccgtttgtgatggcttccatgtcggcagaatgcttaatgaattacaacagtactgcgatgagtggcagggcggggcgtaatttttttaaggcagttattggtgcccttctagagtccttactgcagtagttttgctgaaatactcgattcacaaaaatatcaacttatggttgttttgtgagatatcaatatatggttgttttgtggttaagttgctgattataaataattattaaatatcactttatggttgcatcaacaggtaccgagctcgaattcactggccgtcgttttacaacgtcgtgactgggaaaaccctggcgttacccaacttaatcgccttgccattttttaaccaataggccgtactgcgatgagtggcagggcggggcgtaatttttttaaggcagttattggtgcccttaaacgcctggttgctacgcctgaataagtgataataagcggatgaatggcagaaattcgaaagcaaattcgacccggtcgtcggttcagggcagggtcgttaaatagccgcttatgtctattgctggtttaccggtttattgactaccggaagcagtgtgaccgtgtgcttctcaaatgcctgaggccagtttgctcaggctctccccgtggaggtaataattgacgatatgatcatttattctgcctcccagagcctgataaaaacggtgaatccgttagcgaggtgccgccggcttccattcaggtcgaggtggcccggctccatgcaccgcgacgcaacgcggggaggcagacaaggtatagggcggcgaggcggctacagccgatagtctggaacagcgcacttacgggttgctgcgcaacccaagtgctaccggcgcggcagcgtgacccgtgtcggcggctccaacggctcgccatcgtccagaaaacacggctcatcgggcatcggcaggcgctgctgcccgcgccgttcccattcctccgtttcggtcaaggctggcaggtctggttccatgcccggaatgccgggctggctgggcggctcctcgccggggccggtcggtagttgctgctcgcccggatacagggtcgggatgcggcgcaggtcgccatgccccaacagcgattcgtcctggtcgtcgtgatcaaccaccacggcggcactgaacaccgacaggcgcaactggtcgcggggctggccccacgccacgcggtcattgaccacgtaggccgacacggtgccggggccgttgagcttcacgacggagatccagcgctcggccaccaagtccttgactgcgtattggaccgtccgcaaagaacgtccgatgagcttggaaagtgtcttctggctgaccaccacggcgttctggtggcccatctgcgccacgaggtgatgcagcagcattgccgccgtgggtttcctcgcaataagcccggcccacgcctcatgcgctttgcgttccgtttgcacccagtgaccgggcttgttcttggcttgaatgccgatttctctggactgcgtggccatgcttatctccatgcggtaggggtgccgcacggttgcggcaccatgcgcaatcagctgcaacttttcggcagcgcgacaacaattatgcgttgcgtaaaagtggcagtcaattacagattttctttaacctacgcaatgagctattgcggggggtgccgcaatgagctgttgcgtaccccccttttttaagttgttgatttttaagtctttcgcatttcgccctatatctagttctttggtgcccaaagaagggcacccctgcggggttcccccacgccttcggcgcggctccccctccggcaaaaagtggcccctccggggcttgttgatcgactgcgcggccttcggccttgcccaaggtggcgctgcccccttggaacccccgcactcgccgccgtgaggctcggggggcaggcgggcgggcttcgcccttcgactgcccccactcgcataggcttgggtcgttccaggcgcgtcaaggccaagccgctgcgcggtcgctgcgcgagccttgacccgccttccacttggtgtccaaccggcaagcgaagcgcgcaggccgcaggccggaggcttttccccagagaaaattaaaaaaattgatggggcaaggccgcaggccgcgcagttggagccggtgggtatgtggtcgaaggctgggtagccggtgggcaatccctgtggtcaagctcgtgggcaggcgcagcctgtccatcagcttgtccagcagggttgtccacgggccgagcgaagcgagccagccggtggccgctcgcggccatcgtccacatatccacgggctggcaagggagcgcagcgaccgcgcagggcgaagcccggagagcaagcccgtagggcgccgcagccgccgtaggcggtcacgactttgcgaagcaaagtctagtgagtatactcaagcattgagtggcccgccggaggcaccgccttgcgctgcccccgtcgagccggttggacaccaaaagggaggggcaggcatggcggcatacgcgatcatgcgatgcaagaagctggcgaaaatgggcaacgtggcggccagtctcaagcacgcctaccgcgagcgcgagacgcccaacgctgacgccagcaggacgccagagaacgagcactgggcggccagcagcaccgatgaagcgatgggccgactgcgcgagttgctgccagagaagcggcgcaaggacgctgtgttggcggtcgagtacgtcatgacggccagcccggaatggtggaagtcggccagccaagaacagcaggcggcgttcttcgagaaggcgcacaagtggctggcggacaagtacggggcggatcgcatcgtgacggccagcatccaccgtgacgaaaccagcccgcacatgaccgcgttcgtggtgccgctgacgcaggacggcaggctgtcggccaaggagttcatcggcaacaaagcgcagatgacccgcgaccagaccacgtttgcggccgctgtggccgatctagggctgcaacggggcatcgagggcagcaaggcacgtcacacgcgcattcaggcgttctacgaggccctggagcggccaccagtgggccacgtcaccatcagcccgcaagcggtcgagccacgcgcctatgcaccgcagggattggccgaaaagctgggaatctcaaagcgcgttgagacgccggaagccgtggccgaccggctgacaaaagcggttcggcaggggtatgagcctgccctacaggccgccgcaggagcgcgtgagatgcgcaagaaggccgatcaagcccaagagacggcccgag

SEQ ID NO: 869 - DNA, 14288 bp, Synthetic construct
  source 1..14288: mol_type = other DNA
accttcgggagcgcctgaagcccgttctggacgccctggggccgttgaatcgggatatgcaggccaaggccgccgcgatcatcaaggccgtgggcgaaaagctgctgacggaacagcgggaagtccagcgccagaaacaggcccagcgccagcaggaacgcgggcgcgcacatttccccgaaaagtgccacctgggatgaatgtcagctactgggctatctggacaagggaaaacgcaagcgcaaagagaaagcaggtagcttgcagtgggcttacatggcgatagctagactgggcggttttatggacagcaagcgaaccggaattgccagctggggcgccctctggtaaggttgggaagccctgcaaagtaaactggatggctttcttgccgccaaggatctgatggcgcaggggatcaagatctgatcaagagacaggatgaggatcgtttcgcatgattgaacaagatggattgcacgcaggttctccggccgcttgggtggagaggctattcggctatgactgggcacaacagacaatcggctgctctgatgccgccgtgttccggctgtcagcgcaggggcgcccggttctttttgtcaagaccgacctgtccggtgccctgaatgaactgcaagacgaggcagcgcggctatcgtggctggccacgacgggcgttccttgcgcagctgtgctcgacgttgtcactgaagcgggaagggactggctgctattgggcgaagtgccggggcaggatctcctgtcatctcaccttgctcctgccgagaaagtatccatcatggctgatgcaatgcggcggctgcatacgcttgatccggctacctgcccattcgaccaccaagcgaaacatcgcatcgagcgagcacgtactcggatggaagccggtcttgtcgatcaggatgatctggacgaagagcatcaggggctcgcgccagccgaactgttcgccaggctcaaggcgcgcatgcccgacggcgaggatctcgtcgtgacccatggcgatgcctgcttgccgaatatcatggtggaaaatggccgcttttctggattcatcgactgtggccggctgggtgtggcggaccgctatcaggacatagcgttggctacccgtgatattgctgaagagcttggcggcgaatgggctgaccgcttcctcgtgctttacggtatcgccgctcccgattcgcagcgcatcgccttctatcgccttcttgacgagttcttctgagcgggactctggggttcgaaatgaccgaccaagcgacgcccaacctgccatcacgagatttcgattccaccgccgccttctatgaaaggttgggcttcggaatcgttttccgggacgccggctggatgatcctccagcgcggggatctcatgctggagttcttcgcccacccccatgggcaaatattatacgcaaggcgacaaggtgctgatgccgctggcgattcaggttcatcatgccgtttgtgatggcttccatgtcggcagaatgcttaatgaattacaacagtttttatgcatgcgcccaatacgcaaaccgcctctccccgcgcgttggccgattcattaatgcagctggcacgacaggtttcccgactggtggataaccgtattaccgcctttgagtgagctgataccgctcgccgcagccgaacgaccgagcgcagcgagtcagtgagcgaggatttacagctagctcagtcctaggtattatgctagccacgtggagatataccatgggtgaactgccgagtaggtagctgataacagtacagcgcggctgaaatcatcattaaagcggtgaactgccgagtaggtagctgataacggatccgaattcgagcgaaggagatatacatatgtttttgcaaagacctaaaccttacagcgatgaaagtttagaaagtttctttatccgagtggctaacaaaaatggctacggtgatgtccatcgcttcctagaagccactaaacgattccttcaagacattgaccataatggctatcaaacctttccgactgatataactcggataaacccatactcagctaaaaacagttccagcgcacgaactgcgtcattcctgaaacttgcacaattgacatttaatgaaccgccagagctacttgggttggcaattaacagaacaaacatgaaatactcgccgtcaactagcgcggttgttagaggtgcagaagtctttcctcgcagtttactacggacgcactccatcccctgctgtcctttgtgtctgcgagaaaatggctacgcctcctacctttggcactttcaggggtacgaatactgccacagccataacgtacctttaattaccacttgtagctgtggtaaggagtttgactaccgagtatctgggttaaagggcatttgctgcaaatgcaaggagcctatcaccttaaccagcagggagaacggtcatgaggcagcgtgtactgtttcaaactggcttgctggccatgaatctaaacctctgccaaatcttcctaaaagctaccgatggggtttagttcattggtggatgggtattaaagatagcgagttcgatcacttttcgttcgttcaatttttctcaaactggccaaggtcattccactcgataatcgaagatgaagtagagttcaaccttgagcatgctgttgtcagcacgtctgaattacgactaaaagatcttcttggtcgattgtttttcggttcaattcggttacctgagcggaatcttcaacacaatatcatccttggtgagcttctctgctatttagaaaatcgtttatggcaagacaagggattaatcgccaacctcaaaatgaacgcgttagaggcgactgtaatgttaaattgtagcctcgatcagattgcatcaatggttgaacaacgcatcttgaagccaaatcgaaaaagcaagcccaacagccctcttgatgttaccgattatctatttcatttcggcgatattttctgtctttggttagctgagttccaaagcgatgagtttaaccgttcgttttatgtgtcgaggtggtaaatgcaaactctgaaagaactaatcgcatccaatcctgacgacttaacaactgaacttaagagagcatttcgtccactcacaccgcatattgcaattgatggtaatgaacttgacgcactgacgatattagtcaatttaaccgataagactgatgatcagaaagacctgctcgatcgagccaaatgcaagcaaaaacttcgagatgaaaaatggtgggctagctgcataaattgcgttaattacagacaaagccataacccaaaattcccggatatacgttctgaaggcgtgattcgaacccaagccctgggtgaattaccgagtttcctactctcgtcctcaaaaatcccaccataccattggtcatatagccatgattcaaaatacgtcaacaaaagcgcattcctcaccaatgagttttgttgggatggtgagatctcatgtttgggtgagcttcttaaagatgcagatcacccactttggaatactttgaaaaagttaggttgttctcaaaaaacttgcaaagcaatggcaaaacaactagctgatattactctcacgactatcaatgtcacactcgcaccaaattacctgactcaaatatctctccccgatagtgatacatcctacatttcactctctcctgttgcatcgctatcgatgcaaagccactttcatcagaggctccaagatgaaaatcggcatagcgcgataacgcggtttagccgaactaccaacatgggggtcactgcgatgacatgtggcggcgcatttagaatgttaaagtctggcgctaagttttccagcccccctcatcaccgattaaacagtaaacgaagttggttgacgtcagagcatgttcagtcattaaaacagtaccagcgcctcaacaaaagcctcatacctgaaaactctcggattgcactccgtagaaaatacaaaatcgagcttcaaaatatggtcagatcttggtttgcaatgcaagaccatacccttgattcgaacatacttatccaacatttgaatcatgacctatcttacttaggagccacaaaacgttttgcatacgatccagcgatgaccaagctctttactgagcttttgaaacgagagttatcaaattcaatcaataatggtgagcaacacactaatggatcgtttttagtcctaccgaatatcagggtttgtggcgcaacagctttaagctccccggtaacggtggggattccatcacttacagctttctttggcttcgttcacgcatttgaacggaatataaatcgcaccacctcatcgtttcgtgttgaatcctttgcgatatgcgtccatcaactacatgtcgagaagcgaggtttgacagcagagtttgtggaaaaaggcgacgggactatatccgctcccgcgacccgggatgactggcagtgtgatgtcgtatttagccttattttgaacaccaactttgctcaacatattgaccaagatacgttagttacatcactaccaaagcgattggctcggggttcagcaaaaattgcgattgatgactttaaacatatcaactcattctcgacattagaaacagcgatcgaatctctgccaatagaagctggtaggtggttatcactttacgcacagtcaaacaataatctaagtgatctattagcagccatgacagaggaccatcagctcatggcaagctgcgtcggttaccacttgttagaagagcccaaagataaaccaaactccctcagaggttacaaacacgctatcgccgagtgcatcattggactcattaactcaatcacctttagctcagagactgatcccaacacaatcttttggtcgctaaagaactatcaaaactacctagtggtacagccaaggagtatcaacgatgaaactaccgacaaatctagcctatgagcgctctatcgacccatcagatgtctgtttttttgtcgtctggcccgatgatagaaaaacacctttaacctacaattctcgtactctgctcgggcaaatggaagcggcatcattagcctatgatgtctcaggtcaaccaataaaaagtgccaccgctgaggcgttagctcaagggaaccctcatcaagttgatttctgccacgttccatacggtgcgagtcatattgaatgcagtttctccgtctcgttttcttctgaactacgtcaaccatataagtgtaactcaagcaaagttaaacaaacgctagtgcaattagtcgagctctacgaaacgaaaatcggctggactgagctagcaacccgatatttgatgaacatttgcaacggtaaatggctgtggaaaaatacccgtaaagcctattgctggaacattgtacttacaccttggccttggaacggggaaaaggttggatttgaagatattcgtactaactacacctcacggcaagactttaaaaataataaaaattggtctgctatagttgaaatgatcaaaaccgcattttctagtactgatgggctggcgatatttgaagtcagggccaccttgcacttgccaacgaatgctatggtgcggccaagccaagttttcacagaaaaagaaagtggcagtaaaagtaaatctaaaactcaaaacagtcgagtttttcagagtacaactattgatggtgaacgatcgccaatactaggggcctttaaaacgggagcagctattgcaaccattgacgactggtatcctgaagccactgagccactaagggtcggacggtttggggttcatcgcgaagatgtcacttgctaccgtcatccgtctaccggaaaagattttttctcgatattacaacaagcagagcactatattgaagtgttgagcgccaacaaaactcccgctcaagaaactatcaacgacatgcactttttaatggctaacctgattaagggtgggatgttccagcataaaggagactgactgtgaaatggtattataagacaatcacctttctgccagagttgtgcaacaacgagtcactggctgcaaagtgtctccgcgttctgcatggatttaactatcagtatgagacacgaaatatcggcgtttcatttccgctttggtgtgatgcaacggttggaaaaaagatttcatttgtcagcaagaacaagatagaactcgacttactacttaaacaacactatttcgtccaaatggaacaacttcaatactttcatatatccaacactgttctcgtcccagaagattgtacatacgtttcctttagacgctgtcaatctatagataagctcacagcagcagggctggcaaggaaaatcagacgcctggagaaacgtgctctatctagaggcgagcaatttgacccatcatcttttgctcaaaaagagcatactgcaatagcgcactaccactcacttggggagtccagcaaacagacgaaccgcaactttcgactcaatatcaggatgctctcggagcaaccccgtgaggggaactcgatttttagtagctatggcttatcaaattcagaaaactcgtttcagcctgtacccttaatctgacctttaataaggagatataccatggcgacaagtttacctacgccctcagcaattacgacttcggcgttagagtatgcattccatactcccgctcgcaatctaacgaaatctcgcggaaaaaacattcatcgttatgtcagtgtaaagatgagtaagaggattacggtagaatctactctagagtgtgatgcctgctatcactttgattttgagccaagtattgttcgcttttgcgctcaaccgattcgatttttatattatctcaatggtcagtctcactcctatgttcctgactttctagttcaatttgataccaacgagtttgttctatatgaagtaaagtcagcttatgctaagaacaaacctgattttgatgttgaatgggaggcgaaagtaaaagcagcaactgaactagggctagaattggagcttgttgaagagagtgatattagggatacggttgtattaaataatcttaagcgcatgcatcgttatgcttcgaaagatgagctgaataacgtacataactctctcttaaaaataataaagtacaatggcgcccaatctgcaagatgcttgggagaacagttgggtttaaaaggccgaactgttttaccaattttgtgcgatttgctgtcaaggtgtttactcgatacacgtttggataagcctctatctcttgaatctcgatttgagttggccagttatggctaagaaagggttctcaagtttccatagaaaagcagtctcttcccaagatacgcttgaatcgatagagcttgtctctagcgctaattgtctagaaagtgttacgtatcaagatatatcagcatttcccgaaacaattgcggtagagattaatttccgattaagcattcttcgctttttagcgcgaaagtgcgaaaccattgtggccaaatcaattgaaccacatcgtgtagagctacagcaaaactatagtagaaaaatacccagtgcaataacgatatatcgatggtggcttgcttttcgaaaatcagactacaaccccattagcttagcacctaatatcaaggatagaggtaatagagagacaaaagtgtcaacagttgttgattctattatggaacaggcagttgaaagagttatatctggacgaaaagtcaatgttagctctgcatataaacgtgttcgacgaaaagttcgtcaatacaatctaactcatggaacgaaatacacgtatcctaagtacgaatctgtaagaaagcgagtaaaaaagaaaaccccatttgagttattagccgcagggaaaggggagagagtagctaagagagagtttcgccgaatgggaaaaaagatcctcacgtctagcgtgctagagagggttgaaatagatcacactgtcgttgacctttttgcagtacacgaagagtatcgaatcccattgggccgaccttggcttactcaattggttgattgttacagtaaagctgtaatcggtttttatttaggtttcgagcctcctagctatgtgtcggtttcccttgcacttaagaatgcaatacaacgcaaagatgacttaatctcctcgtatgaatcgatcgagaatgaatggctatgttatggcatcccagacctactcgtaactgataatggtaaagagtttttgtcgaaagcatttgatcaagcatgtgaatcactattgatcaatgtgcatcaaaataaagttgagacgcccgacaacaaacctcatgttgaacgtaactacgggactattaatacttctctgttagacgatttacctgggaaatccttcagccagtaccttcaaagagaagggtacgactctgtgggagaagctacccttacactcaatgagattagagaaatttacttaatttggttggtggatatttatcataaaaaacccaatcagagaggcactaattgtcctaatgttgcgtggaaaaagggttgtcaagaatgggaaccagaggagttctctggttctaaagacgaattagactttaaatttgctattgttgattacaaacaacttactaaagtagggataactgtctacaaagaactgagttatagcaatgaccgtttagctgaatatagagggaagaaaggaaaccataaagttcagttcaagtataaccctgagtgtatggcagttatttgggtgttggatgaggatatgaatgagtactttacagttaatgcgattgactacgaatatgcaagtagagtatcactttggcaacataaatataacatgaaatatcaagcagaactaaattcagcagaatatgatgaggacaaggaaattgatgcagaaataaaaattgaagaaatcgcagatcgttcaattgttaagactaacaaaatcagagctcggaggcgtggcgctaggcatcaagagaatagcgcaagggctaagtcaatcagtaatgcgaacccggcctcgatacaaaaacatgaagatgaaatcgttagtgcagataatgacgattgggatattgattatgtctgagaaatcgtcaaatgagtgaaacgcgtgaggctcgtatatcaagagctaaaagggcatttgtatccacaccgagcgttaggaaaatcttgagttacatggatagatgtagagatctatcagacctagagtctgagcctacatgcatgatggtctatggtgcttcgggtgtaggtaaaacgaccgtcatcaagaaatacttaaatcaaaacagaagagagtccgaagccgggggcgatataataccggttttgcatattgagttgccagacaatgcgaagccagtagatgcagcaagggaattgctggttgaaatgggtgacccgctagcactttatgaaactgacttagctagattgacgaaaagactgactgaattaatccctgcggtcggcgtgaagctgattattatcgatgagttccaacatttggtggaagaaaggtcaaatcgggttcttacccaagtaggtaattggctaaaaatgatacttaacaaaacgaaatgtccaattgttatatttggtatgccatactcaaaagttgtactgcaagcaaactcgcaacttcacgggcgattttccattcaggttgaactgcgcccctttagctaccagggaggtagaggtgtatttaaaacttttttggaataccttgataaagccctaccttttgaaaaacaggctggcttagccaacgaaagtttgcagaaaaaattgtatgcattctctcagggaaacatgcgttcgttgagaaaccttatttatcaagcatctatcgaagcaattgataatcagcatgagacgataaccgaagaagatttcgtttttgcatcgaagttgacatcgggcgataaacccaactcatggaaaaatccttttgaggagggtgttgaggtaacagaagatatgttacgaccgccaccaaaagatattggttgggaggactatttgagacattcaaccccgagagtgagtaaaccaggtagaaataaaaactttttcgaataacctaggctgctgcgctgctgccaccgctgagcaataactagcataaccccttggggcctctaaacgggtcttgaggggttttttgctgaaacctcaggcatttgttgttgatacaaccataaaatgataattacacccataaattgataattatcacacccataaattgatattgcctcttcatggtctaaacttcagtaagtttacgacattttcatgaactcgaggtcatttccggggatccatggagaaaaaaatcactggatataccaccgttgatatatcccaatggcatcgtaaagaacattttgaggcatttcagtcagttgctcaatgtacctataaccagaccgttcagctggatattacggcctttttaaagaccgtaaagaaaaataagcacaagttttatccggcctttattcacattcttgcccgcctgatgaatgctcatccggagttccgtatggcaatgaaagacggtgagctggtgatatgggatagtgttcacccttgttacaccgttttccatgagcaaactgaaacgttttcatcgctctggagtgaataccacgacgatttccggcagtttctacacatatattcgcaagatgtggcgtgttacggtgaaaacctggcctatttccctaaagggtttattgagaatatgtttttcgtctcagccaatccctgggtgagtttcaccagttttgatttaaacgtggccaatatggacaacttcttcgcccccgttttcactatgggcaaatattatacgcaaggcgacaaggtgctgatgccgctggcgattcaggttcatcatgccgtttgtgatggcttccatgtcggcagaatgcttaatgaattacaacagtactgcgatgagtggcagggcggggcgtaatttttttaaggcagttattggtgcccttctagagtccttactgcagtagttttgctgaaatactcgattcacaaaaatatcaacttatggttgttttgtgagatatcaatatatggttgttttgtggttaagttgctgattataaataattattaaatatcactttatggttgcatcaacaggtaccgagctcgaattcactggccgtcgttttacaacgtcgtgactgggaaaaccctggcgttacccaacttaatcgccttgccattttttaaccaataggccgtactgcgatgagtggcagggcggggcgtaatttttttaaggcagttattggtgcccttaaacgcctggttgctacgcctgaataagtgataataagcggatgaatggcagaaattcgaaagcaaattcgacccggtcgtcggttcagggcagggtcgttaaatagccgcttatgtctattgctggtttaccggtttattgactaccggaagcagtgtgaccgtgtgcttctcaaatgcctgaggccagtttgctcaggctctccccgtggaggtaataattgacgatatgatcatttattctgcctcccagagcctgataaaaacggtgaatccgttagcgaggtgccgccggcttccattcaggtcgaggtggcccggctccatgcaccgcgacgcaacgcggggaggcagacaaggtatagggcggcgaggcggctacagccgatagtctggaacagcgcacttacgggttgctgcgcaacccaagtgctaccggcgcggcagcgtgacccgtgtcggcggctccaacggctcgccatcgtccagaaaacacggctcatcgggcatcggcaggcgctgctgcccgcgccgttcccattcctccgtttcggtcaaggctggcaggtctggttccatgcccggaatgccgggctggctgggcggctcctcgccggggccggtcggtagttgctgctcgcccggatacagggtcgggatgcggcgcaggtcgccatgccccaacagcgattcgtcctggtcgtcgtgatcaaccaccacggcggcactgaacaccgacaggcgcaactggtcgcggggctggccccacgccacgcggtcattgaccacgtaggccgacacggtgccggggccgttgagcttcacgacggagatccagcgctcggccaccaagtccttgactgcgtattggaccgtccgcaaagaacgtccgatgagcttggaaagtgtcttctggctgaccaccacggcgttctggtggcccatctgcgccacgaggtgatgcagcagcattgccgccgtgggtttcctcgcaataagcccggcccacgcctcatgcgctttgcgttccgtttgcacccagtgaccgggcttgttcttggcttgaatgccgatttctctggactgcgtggccatgcttatctccatgcggtaggggtgccgcacggttgcggcaccatgcgcaatcagctgcaacttttcggcagcgcgacaacaattatgcgttgcgtaaaagtggcagtcaattacagattttctttaacctacgcaatgagctattgcggggggtgccgcaatgagctgttgcgtaccccccttttttaagttgttgatttttaagtctttcgcatttcgccctatatctagttctttggtgcccaaagaagggcacccctgcggggttcccccacgccttcggcgcggctccccctccggcaaaaagtggcccctccggggcttgttgatcgactgcgcggccttcggccttgcccaaggtggcgctgcccccttggaacccccgcactcgccgccgtgaggctcggggggcaggcgggcgggcttcgcccttcgactgcccccactcgcataggcttgggtcgttccaggcgcgtcaaggccaagccgctgcgcggtcgctgcgcgagccttgacccgccttccacttggtgtccaaccggcaagcgaagcgcgcaggccgcaggccggaggcttttccccagagaaaattaaaaaaattgatggggcaaggccgcaggccgcgcagttggagccggtgggtatgtggtcgaaggctgggtagccggtgggcaatccctgtggtcaagctcgtgggcaggcgcagcctgtccatcagcttgtccagcagggttgtccacgggccgagcgaagcgagccagccggtggccgctcgcggccatcgtccacatatccacgggctggcaagggagcgcagcgaccgcgcagggcgaagcccggagagcaagcccgtagggcgccgcagccgccgtaggcggtcacgactttgcgaagcaaagtctagtgagtatactcaagcattgagtggcccgccggaggcaccgccttgcgctgcccccgtcgagccggttggacaccaaaagggaggggcaggcatggcggcatacgcgatcatgcgatgcaagaagctggcgaaaatgggcaacgtggcggccagtctcaagcacgcctaccgcgagcgcgagacgcccaacgctgacgccagcaggacgccagagaacgagcactgggcggccagcagcaccgatgaagcgatgggccgactgcgcgagttgctgccagagaagcggcgcaaggacgctgtgttggcggtcgagtacgtcatgacggccagcccggaatggtggaagtcggccagccaagaacagcaggcggcgttcttcgagaaggcgcacaagtggctggcggacaagtacggggcggatcgcatcgtgacggccagcatccaccgtgacgaaaccagcccgcacatgaccgcgttcgtggtgccgctgacgcaggacggcaggctgtcggccaaggagttcatcggcaacaaagcgcagatgacccgcgaccagaccacgtttgcggccgctgtggccgatctagggctgcaacggggcatcgagggcagcaaggcacgtcacacgcgcattcaggcgttctacgaggccctggagcggccaccagtgggccacgtcaccatcagcccgcaagcggtcgagccacgcgcctatgcaccgcagggattggccgaaaagctgggaatctcaaagcgcgttgagacgccggaagccgtggccgaccggctgacaaaagcggttcggcaggggtatgagcctgccctacaggccgccgcaggagcgcgtgagatgcgcaagaaggccgatcaagcccaagagacggcccgag

SEQ ID NO: 870 - DNA, 14288 bp, Synthetic construct
  source 1..14288: mol_type = other DNA
accttcgggagcgcctgaagcccgttctggacgccctggggccgttgaatcgggatatgcaggccaaggccgccgcgatcatcaaggccgtgggcgaaaagctgctgacggaacagcgggaagtccagcgccagaaacaggcccagcgccagcaggaacgcgggcgcgcacatttccccgaaaagtgccacctgggatgaatgtcagctactgggctatctggacaagggaaaacgcaagcgcaaagagaaagcaggtagcttgcagtgggcttacatggcgatagctagactgggcggttttatggacagcaagcgaaccggaattgccagctggggcgccctctggtaaggttgggaagccctgcaaagtaaactggatggctttcttgccgccaaggatctgatggcgcaggggatcaagatctgatcaagagacaggatgaggatcgtttcgcatgattgaacaagatggattgcacgcaggttctccggccgcttgggtggagaggctattcggctatgactgggcacaacagacaatcggctgctctgatgccgccgtgttccggctgtcagcgcaggggcgcccggttctttttgtcaagaccgacctgtccggtgccctgaatgaactgcaagacgaggcagcgcggctatcgtggctggccacgacgggcgttccttgcgcagctgtgctcgacgttgtcactgaagcgggaagggactggctgctattgggcgaagtgccggggcaggatctcctgtcatctcaccttgctcctgccgagaaagtatccatcatggctgatgcaatgcggcggctgcatacgcttgatccggctacctgcccattcgaccaccaagcgaaacatcgcatcgagcgagcacgtactcggatggaagccggtcttgtcgatcaggatgatctggacgaagagcatcaggggctcgcgccagccgaactgttcgccaggctcaaggcgcgcatgcccgacggcgaggatctcgtcgtgacccatggcgatgcctgcttgccgaatatcatggtggaaaatggccgcttttctggattcatcgactgtggccggctgggtgtggcggaccgctatcaggacatagcgttggctacccgtgatattgctgaagagcttggcggcgaatgggctgaccgcttcctcgtgctttacggtatcgccgctcccgattcgcagcgcatcgccttctatcgccttcttgacgagttcttctgagcgggactctggggttcgaaatgaccgaccaagcgacgcccaacctgccatcacgagatttcgattccaccgccgccttctatgaaaggttgggcttcggaatcgttttccgggacgccggctggatgatcctccagcgcggggatctcatgctggagttcttcgcccacccccatgggcaaatattatacgcaaggcgacaaggtgctgatgccgctggcgattcaggttcatcatgccgtttgtgatggcttccatgtcggcagaatgcttaatgaattacaacagtttttatgcatgcgcccaatacgcaaaccgcctctccccgcgcgttggccgattcattaatgcagctggcacgacaggtttcccgactggtggataaccgtattaccgcctttgagtgagctgataccgctcgccgcagccgaacgaccgagcgcagcgagtcagtgagcgaggatttacggctagctcagtcctaggtactatgctagccacgtggagatataccatgggtgaactgccgagtaggtagctgataacagtacagcgcggctgaaatcatcattaaagcggtgaactgccgagtaggtagctgataacggatccgaattcgagcgaaggagatatacatatgtttttgcaaagacctaaaccttacagcgatgaaagtttagaaagtttctttatccgagtggctaacaaaaatggctacggtgatgtccatcgcttcctagaagccactaaacgattccttcaagacattgaccataatggctatcaaacctttccgactgatataactcggataaacccatactcagctaaaaacagttccagcgcacgaactgcgtcattcctgaaacttgcacaattgacatttaatgaaccgccagagctacttgggttggcaattaacagaacaaacatgaaatactcgccgtcaactagcgcggttgttagaggtgcagaagtctttcctcgcagtttactacggacgcactccatcccctgctgtcctttgtgtctgcgagaaaatggctacgcctcctacctttggcactttcaggggtacgaatactgccacagccataacgtacctttaattaccacttgtagctgtggtaaggagtttgactaccgagtatctgggttaaagggcatttgctgcaaatgcaaggagcctatcaccttaaccagcagggagaacggtcatgaggcagcgtgtactgtttcaaactggcttgctggccatgaatctaaacctctgccaaatcttcctaaaagctaccgatggggtttagttcattggtggatgggtattaaagatagcgagttcgatcacttttcgttcgttcaatttttctcaaactggccaaggtcattccactcgataatcgaagatgaagtagagttcaaccttgagcatgctgttgtcagcacgtctgaattacgactaaaagatcttcttggtcgattgtttttcggttcaattcggttacctgagcggaatcttcaacacaatatcatccttggtgagcttctctgctatttagaaaatcgtttatggcaagacaagggattaatcgccaacctcaaaatgaacgcgttagaggcgactgtaatgttaaattgtagcctcgatcagattgcatcaatggttgaacaacgcatcttgaagccaaatcgaaaaagcaagcccaacagccctcttgatgttaccgattatctatttcatttcggcgatattttctgtctttggttagctgagttccaaagcgatgagtttaaccgttcgttttatgtgtcgaggtggtaaatgcaaactctgaaagaactaatcgcatccaatcctgacgacttaacaactgaacttaagagagcatttcgtccactcacaccgcatattgcaattgatggtaatgaacttgacgcactgacgatattagtcaatttaaccgataagactgatgatcagaaagacctgctcgatcgagccaaatgcaagcaaaaacttcgagatgaaaaatggtgggctagctgcataaattgcgttaattacagacaaagccataacccaaaattcccggatatacgttctgaaggcgtgattcgaacccaagccctgggtgaattaccgagtttcctactctcgtcctcaaaaatcccaccataccattggtcatatagccatgattcaaaatacgtcaacaaaagcgcattcctcaccaatgagttttgttgggatggtgagatctcatgtttgggtgagcttcttaaagatgcagatcacccactttggaatactttgaaaaagttaggttgttctcaaaaaacttgcaaagcaatggcaaaacaactagctgatattactctcacgactatcaatgtcacactcgcaccaaattacctgactcaaatatctctccccgatagtgatacatcctacatttcactctctcctgttgcatcgctatcgatgcaaagccactttcatcagaggctccaagatgaaaatcggcatagcgcgataacgcggtttagccgaactaccaacatgggggtcactgcgatgacatgtggcggcgcatttagaatgttaaagtctggcgctaagttttccagcccccctcatcaccgattaaacagtaaacgaagttggttgacgtcagagcatgttcagtcattaaaacagtaccagcgcctcaacaaaagcctcatacctgaaaactctcggattgcactccgtagaaaatacaaaatcgagcttcaaaatatggtcagatcttggtttgcaatgcaagaccatacccttgattcgaacatacttatccaacatttgaatcatgacctatcttacttaggagccacaaaacgttttgcatacgatccagcgatgaccaagctctttactgagcttttgaaacgagagttatcaaattcaatcaataatggtgagcaacacactaatggatcgtttttagtcctaccgaatatcagggtttgtggcgcaacagctttaagctccccggtaacggtggggattccatcacttacagctttctttggcttcgttcacgcatttgaacggaatataaatcgcaccacctcatcgtttcgtgttgaatcctttgcgatatgcgtccatcaactacatgtcgagaagcgaggtttgacagcagagtttgtggaaaaaggcgacgggactatatccgctcccgcgacccgggatgactggcagtgtgatgtcgtatttagccttattttgaacaccaactttgctcaacatattgaccaagatacgttagttacatcactaccaaagcgattggctcggggttcagcaaaaattgcgattgatgactttaaacatatcaactcattctcgacattagaaacagcgatcgaatctctgccaatagaagctggtaggtggttatcactttacgcacagtcaaacaataatctaagtgatctattagcagccatgacagaggaccatcagctcatggcaagctgcgtcggttaccacttgttagaagagcccaaagataaaccaaactccctcagaggttacaaacacgctatcgccgagtgcatcattggactcattaactcaatcacctttagctcagagactgatcccaacacaatcttttggtcgctaaagaactatcaaaactacctagtggtacagccaaggagtatcaacgatgaaactaccgacaaatctagcctatgagcgctctatcgacccatcagatgtctgtttttttgtcgtctggcccgatgatagaaaaacacctttaacctacaattctcgtactctgctcgggcaaatggaagcggcatcattagcctatgatgtctcaggtcaaccaataaaaagtgccaccgctgaggcgttagctcaagggaaccctcatcaagttgatttctgccacgttccatacggtgcgagtcatattgaatgcagtttctccgtctcgttttcttctgaactacgtcaaccatataagtgtaactcaagcaaagttaaacaaacgctagtgcaattagtcgagctctacgaaacgaaaatcggctggactgagctagcaacccgatatttgatgaacatttgcaacggtaaatggctgtggaaaaatacccgtaaagcctattgctggaacattgtacttacaccttggccttggaacggggaaaaggttggatttgaagatattcgtactaactacacctcacggcaagactttaaaaataataaaaattggtctgctatagttgaaatgatcaaaaccgcattttctagtactgatgggctggcgatatttgaagtcagggccaccttgcacttgccaacgaatgctatggtgcggccaagccaagttttcacagaaaaagaaagtggcagtaaaagtaaatctaaaactcaaaacagtcgagtttttcagagtacaactattgatggtgaacgatcgccaatactaggggcctttaaaacgggagcagctattgcaaccattgacgactggtatcctgaagccactgagccactaagggtcggacggtttggggttcatcgcgaagatgtcacttgctaccgtcatccgtctaccggaaaagattttttctcgatattacaacaagcagagcactatattgaagtgttgagcgccaacaaaactcccgctcaagaaactatcaacgacatgcactttttaatggctaacctgattaagggtgggatgttccagcataaaggagactgactgtgaaatggtattataagacaatcacctttctgccagagttgtgcaacaacgagtcactggctgcaaagtgtctccgcgttctgcatggatttaactatcagtatgagacacgaaatatcggcgtttcatttccgctttggtgtgatgcaacggttggaaaaaagatttcatttgtcagcaagaacaagatagaactcgacttactacttaaacaacactatttcgtccaaatggaacaacttcaatactttcatatatccaacactgttctcgtcccagaagattgtacatacgtttcctttagacgctgtcaatctatagataagctcacagcagcagggctggcaaggaaaatcagacgcctggagaaacgtgctctatctagaggcgagcaatttgacccatcatcttttgctcaaaaagagcatactgcaatagcgcactaccactcacttggggagtccagcaaacagacgaaccgcaactttcgactcaatatcaggatgctctcggagcaaccccgtgaggggaactcgatttttagtagctatggcttatcaaattcagaaaactcgtttcagcctgtacccttaatctgacctttaataaggagatataccatggcgacaagtttacctacgccctcagcaattacgacttcggcgttagagtatgcattccatactcccgctcgcaatctaacgaaatctcgcggaaaaaacattcatcgttatgtcagtgtaaagatgagtaagaggattacggtagaatctactctagagtgtgatgcctgctatcactttgattttgagccaagtattgttcgcttttgcgctcaaccgattcgatttttatattatctcaatggtcagtctcactcctatgttcctgactttctagttcaatttgataccaacgagtttgttctatatgaagtaaagtcagcttatgctaagaacaaacctgattttgatgttgaatgggaggcgaaagtaaaagcagcaactgaactagggctagaattggagcttgttgaagagagtgatattagggatacggttgtattaaataatcttaagcgcatgcatcgttatgcttcgaaagatgagctgaataacgtacataactctctcttaaaaataataaagtacaatggcgcccaatctgcaagatgcttgggagaacagttgggtttaaaaggccgaactgttttaccaattttgtgcgatttgctgtcaaggtgtttactcgatacacgtttggataagcctctatctcttgaatctcgatttgagttggccagttatggctaagaaagggttctcaagtttccatagaaaagcagtctcttcccaagatacgcttgaatcgatagagcttgtctctagcgctaattgtctagaaagtgttacgtatcaagatatatcagcatttcccgaaacaattgcggtagagattaatttccgattaagcattcttcgctttttagcgcgaaagtgcgaaaccattgtggccaaatcaattgaaccacatcgtgtagagctacagcaaaactatagtagaaaaatacccagtgcaataacgatatatcgatggtggcttgcttttcgaaaatcagactacaaccccattagcttagcacctaatatcaaggatagaggtaatagagagacaaaagtgtcaacagttgttgattctattatggaacaggcagttgaaagagttatatctggacgaaaagtcaatgttagctctgcatataaacgtgttcgacgaaaagttcgtcaatacaatctaactcatggaacgaaatacacgtatcctaagtacgaatctgtaagaaagcgagtaaaaaagaaaaccccatttgagttattagccgcagggaaaggggagagagtagctaagagagagtttcgccgaatgggaaaaaagatcctcacgtctagcgtgctagagagggttgaaatagatcacactgtcgttgacctttttgcagtacacgaagagtatcgaatcccattgggccgaccttggcttactcaattggttgattgttacagtaaagctgtaatcggtttttatttaggtttcgagcctcctagctatgtgtcggtttcccttgcacttaagaatgcaatacaacgcaaagatgacttaatctcctcgtatgaatcgatcgagaatgaatggctatgttatggcatcccagacctactcgtaactgataatggtaaagagtttttgtcgaaagcatttgatcaagcatgtgaatcactattgatcaatgtgcatcaaaataaagttgagacgcccgacaacaaacctcatgttgaacgtaactacgggactattaatacttctctgttagacgatttacctgggaaatccttcagccagtaccttcaaagagaagggtacgactctgtgggagaagctacccttacactcaatgagattagagaaatttacttaatttggttggtggatatttatcataaaaaacccaatcagagaggcactaattgtcctaatgttgcgtggaaaaagggttgtcaagaatgggaaccagaggagttctctggttctaaagacgaattagactttaaatttgctattgttgattacaaacaacttactaaagtagggataactgtctacaaagaactgagttatagcaatgaccgtttagctgaatatagagggaagaaaggaaaccataaagttcagttcaagtataaccctgagtgtatggcagttatttgggtgttggatgaggatatgaatgagtactttacagttaatgcgattgactacgaatatgcaagtagagtatcactttggcaacataaatataacatgaaatatcaagcagaactaaattcagcagaatatgatgaggacaaggaaattgatgcagaaataaaaattgaagaaatcgcagatcgttcaattgttaagactaacaaaatcagagctcggaggcgtggcgctaggcatcaagagaatagcgcaagggctaagtcaatcagtaatgcgaacccggcctcgatacaaaaacatgaagatgaaatcgttagtgcagataatgacgattgggatattgattatgtctgagaaatcgtcaaatgagtgaaacgcgtgaggctcgtatatcaagagctaaaagggcatttgtatccacaccgagcgttaggaaaatcttgagttacatggatagatgtagagatctatcagacctagagtctgagcctacatgcatgatggtctatggtgcttcgggtgtaggtaaaacgaccgtcatcaagaaatacttaaatcaaaacagaagagagtccgaagccgggggcgatataataccggttttgcatattgagttgccagacaatgcgaagccagtagatgcagcaagggaattgctggttgaaatgggtgacccgctagcactttatgaaactgacttagctagattgacgaaaagactgactgaattaatccctgcggtcggcgtgaagctgattattatcgatgagttccaacatttggtggaagaaaggtcaaatcgggttcttacccaagtaggtaattggctaaaaatgatacttaacaaaacgaaatgtccaattgttatatttggtatgccatactcaaaagttgtactgcaagcaaactcgcaacttcacgggcgattttccattcaggttgaactgcgcccctttagctaccagggaggtagaggtgtatttaaaacttttttggaataccttgataaagccctaccttttgaaaaacaggctggcttagccaacgaaagtttgcagaaaaaattgtatgcattctctcagggaaacatgcgttcgttgagaaaccttatttatcaagcatctatcgaagcaattgataatcagcatgagacgataaccgaagaagatttcgtttttgcatcgaagttgacatcgggcgataaacccaactcatggaaaaatccttttgaggagggtgttgaggtaacagaagatatgttacgaccgccaccaaaagatattggttgggaggactatttgagacattcaaccccgagagtgagtaaaccaggtagaaataaaaactttttcgaataacctaggctgctgcgctgctgccaccgctgagcaataactagcataaccccttggggcctctaaacgggtcttgaggggttttttgctgaaacctcaggcatttgttgttgatacaaccataaaatgataattacacccataaattgataattatcacacccataaattgatattgcctcttcatggtctaaacttcagtaagtttacgacattttcatgaactcgaggtcatttccggggatccatggagaaaaaaatcactggatataccaccgttgatatatcccaatggcatcgtaaagaacattttgaggcatttcagtcagttgctcaatgtacctataaccagaccgttcagctggatattacggcctttttaaagaccgtaaagaaaaataagcacaagttttatccggcctttattcacattcttgcccgcctgatgaatgctcatccggagttccgtatggcaatgaaagacggtgagctggtgatatgggatagtgttcacccttgttacaccgttttccatgagcaaactgaaacgttttcatcgctctggagtgaataccacgacgatttccggcagtttctacacatatattcgcaagatgtggcgtgttacggtgaaaacctggcctatttccctaaagggtttattgagaatatgtttttcgtctcagccaatccctgggtgagtttcaccagttttgatttaaacgtggccaatatggacaacttcttcgcccccgttttcactatgggcaaatattatacgcaaggcgacaaggtgctgatgccgctggcgattcaggttcatcatgccgtttgtgatggcttccatgtcggcagaatgcttaatgaattacaacagtactgcgatgagtggcagggcggggcgtaatttttttaaggcagttattggtgcccttctagagtccttactgcagtagttttgctgaaatactcgattcacaaaaatatcaacttatggttgttttgtgagatatcaatatatggttgttttgtggttaagttgctgattataaataattattaaatatcactttatggttgcatcaacaggtaccgagctcgaattcactggccgtcgttttacaacgtcgtgactgggaaaaccctggcgttacccaacttaatcgccttgccattttttaaccaataggccgtactgcgatgagtggcagggcggggcgtaatttttttaaggcagttattggtgcccttaaacgcctggttgctacgcctgaataagtgataataagcggatgaatggcagaaattcgaaagcaaattcgacccggtcgtcggttcagggcagggtcgttaaatagccgcttatgtctattgctggtttaccggtttattgactaccggaagcagtgtgaccgtgtgcttctcaaatgcctgaggccagtttgctcaggctctccccgtggaggtaataattgacgatatgatcatttattctgcctcccagagcctgataaaaacggtgaatccgttagcgaggtgccgccggcttccattcaggtcgaggtggcccggctccatgcaccgcgacgcaacgcggggaggcagacaaggtatagggcggcgaggcggctacagccgatagtctggaacagcgcacttacgggttgctgcgcaacccaagtgctaccggcgcggcagcgtgacccgtgtcggcggctccaacggctcgccatcgtccagaaaacacggctcatcgggcatcggcaggcgctgctgcccgcgccgttcccattcctccgtttcggtcaaggctggcaggtctggttccatgcccggaatgccgggctggctgggcggctcctcgccggggccggtcggtagttgctgctcgcccggatacagggtcgggatgcggcgcaggtcgccatgccccaacagcgattcgtcctggtcgtcgtgatcaaccaccacggcggcactgaacaccgacaggcgcaactggtcgcggggctggccccacgccacgcggtcattgaccacgtaggccgacacggtgccggggccgttgagcttcacgacggagatccagcgctcggccaccaagtccttgactgcgtattggaccgtccgcaaagaacgtccgatgagcttggaaagtgtcttctggctgaccaccacggcgttctggtggcccatctgcgccacgaggtgatgcagcagcattgccgccgtgggtttcctcgcaataagcccggcccacgcctcatgcgctttgcgttccgtttgcacccagtgaccgggcttgttcttggcttgaatgccgatttctctggactgcgtggccatgcttatctccatgcggtaggggtgccgcacggttgcggcaccatgcgcaatcagctgcaacttttcggcagcgcgacaacaattatgcgttgcgtaaaagtggcagtcaattacagattttctttaacctacgcaatgagctattgcggggggtgccgcaatgagctgttgcgtaccccccttttttaagttgttgatttttaagtctttcgcatttcgccctatatctagttctttggtgcccaaagaagggcacccctgcggggttcccccacgccttcggcgcggctccccctccggcaaaaagtggcccctccggggcttgttgatcgactgcgcggccttcggccttgcccaaggtggcgctgcccccttggaacccccgcactcgccgccgtgaggctcggggggcaggcgggcgggcttcgcccttcgactgcccccactcgcataggcttgggtcgttccaggcgcgtcaaggccaagccgctgcgcggtcgctgcgcgagccttgacccgccttccacttggtgtccaaccggcaagcgaagcgcgcaggccgcaggccggaggcttttccccagagaaaattaaaaaaattgatggggcaaggccgcaggccgcgcagttggagccggtgggtatgtggtcgaaggctgggtagccggtgggcaatccctgtggtcaagctcgtgggcaggcgcagcctgtccatcagcttgtccagcagggttgtccacgggccgagcgaagcgagccagccggtggccgctcgcggccatcgtccacatatccacgggctggcaagggagcgcagcgaccgcgcagggcgaagcccggagagcaagcccgtagggcgccgcagccgccgtaggcggtcacgactttgcgaagcaaagtctagtgagtatactcaagcattgagtggcccgccggaggcaccgccttgcgctgcccccgtcgagccggttggacaccaaaagggaggggcaggcatggcggcatacgcgatcatgcgatgcaagaagctggcgaaaatgggcaacgtggcggccagtctcaagcacgcctaccgcgagcgcgagacgcccaacgctgacgccagcaggacgccagagaacgagcactgggcggccagcagcaccgatgaagcgatgggccgactgcgcgagttgctgccagagaagcggcgcaaggacgctgtgttggcggtcgagtacgtcatgacggccagcccggaatggtggaagtcggccagccaagaacagcaggcggcgttcttcgagaaggcgcacaagtggctggcggacaagtacggggcggatcgcatcgtgacggccagcatccaccgtgacgaaaccagcccgcacatgaccgcgttcgtggtgccgctgacgcaggacggcaggctgtcggccaaggagttcatcggcaacaaagcgcagatgacccgcgaccagaccacgtttgcggccgctgtggccgatctagggctgcaacggggcatcgagggcagcaaggcacgtcacacgcgcattcaggcgttctacgaggccctggagcggccaccagtgggccacgtcaccatcagcccgcaagcggtcgagccacgcgcctatgcaccgcagggattggccgaaaagctgggaatctcaaagcgcgttgagacgccggaagccgtggccgaccggctgacaaaagcggttcggcaggggtatgagcctgccctacaggccgccgcaggagcgcgtgagatgcgcaagaaggccgatcaagcccaagagacggcccgag

SEQ ID NO: 871 - DNA, 14288 bp, Synthetic construct
  source 1..14288: mol_type = other DNA
accttcgggagcgcctgaagcccgttctggacgccctggggccgttgaatcgggatatgcaggccaaggccgccgcgatcatcaaggccgtgggcgaaaagctgctgacggaacagcgggaagtccagcgccagaaacaggcccagcgccagcaggaacgcgggcgcgcacatttccccgaaaagtgccacctgggatgaatgtcagctactgggctatctggacaagggaaaacgcaagcgcaaagagaaagcaggtagcttgcagtgggcttacatggcgatagctagactgggcggttttatggacagcaagcgaaccggaattgccagctggggcgccctctggtaaggttgggaagccctgcaaagtaaactggatggctttcttgccgccaaggatctgatggcgcaggggatcaagatctgatcaagagacaggatgaggatcgtttcgcatgattgaacaagatggattgcacgcaggttctccggccgcttgggtggagaggctattcggctatgactgggcacaacagacaatcggctgctctgatgccgccgtgttccggctgtcagcgcaggggcgcccggttctttttgtcaagaccgacctgtccggtgccctgaatgaactgcaagacgaggcagcgcggctatcgtggctggccacgacgggcgttccttgcgcagctgtgctcgacgttgtcactgaagcgggaagggactggctgctattgggcgaagtgccggggcaggatctcctgtcatctcaccttgctcctgccgagaaagtatccatcatggctgatgcaatgcggcggctgcatacgcttgatccggctacctgcccattcgaccaccaagcgaaacatcgcatcgagcgagcacgtactcggatggaagccggtcttgtcgatcaggatgatctggacgaagagcatcaggggctcgcgccagccgaactgttcgccaggctcaaggcgcgcatgcccgacggcgaggatctcgtcgtgacccatggcgatgcctgcttgccgaatatcatggtggaaaatggccgcttttctggattcatcgactgtggccggctgggtgtggcggaccgctatcaggacatagcgttggctacccgtgatattgctgaagagcttggcggcgaatgggctgaccgcttcctcgtgctttacggtatcgccgctcccgattcgcagcgcatcgccttctatcgccttcttgacgagttcttctgagcgggactctggggttcgaaatgaccgaccaagcgacgcccaacctgccatcacgagatttcgattccaccgccgccttctatgaaaggttgggcttcggaatcgttttccgggacgccggctggatgatcctccagcgcggggatctcatgctggagttcttcgcccacccccatgggcaaatattatacgcaaggcgacaaggtgctgatgccgctggcgattcaggttcatcatgccgtttgtgatggcttccatgtcggcagaatgcttaatgaattacaacagtttttatgcatgcgcccaatacgcaaaccgcctctccccgcgcgttggccgattcattaatgcagctggcacgacaggtttcccgactggtggataaccgtattaccgcctttgagtgagctgataccgctcgccgcagccgaacgaccgagcgcagcgagtcagtgagcgaggatttatggctagctcagtcctaggtacaatgctagccacgtggagatataccatgggtgaactgccgagtaggtagctgataacagtacagcgcggctgaaatcatcattaaagcggtgaactgccgagtaggtagctgataacggatccgaattcgagcgaaggagatatacatatgtttttgcaaagacctaaaccttacagcgatgaaagtttagaaagtttctttatccgagtggctaacaaaaatggctacggtgatgtccatcgcttcctagaagccactaaacgattccttcaagacattgaccataatggctatcaaacctttccgactgatataactcggataaacccatactcagctaaaaacagttccagcgcacgaactgcgtcattcctgaaacttgcacaattgacatttaatgaaccgccagagctacttgggttggcaattaacagaacaaacatgaaatactcgccgtcaactagcgcggttgttagaggtgcagaagtctttcctcgcagtttactacggacgcactccatcccctgctgtcctttgtgtctgcgagaaaatggctacgcctcctacctttggcactttcaggggtacgaatactgccacagccataacgtacctttaattaccacttgtagctgtggtaaggagtttgactaccgagtatctgggttaaagggcatttgctgcaaatgcaaggagcctatcaccttaaccagcagggagaacggtcatgaggcagcgtgtactgtttcaaactggcttgctggccatgaatctaaacctctgccaaatcttcctaaaagctaccgatggggtttagttcattggtggatgggtattaaagatagcgagttcgatcacttttcgttcgttcaatttttctcaaactggccaaggtcattccactcgataatcgaagatgaagtagagttcaaccttgagcatgctgttgtcagcacgtctgaattacgactaaaagatcttcttggtcgattgtttttcggttcaattcggttacctgagcggaatcttcaacacaatatcatccttggtgagcttctctgctatttagaaaatcgtttatggcaagacaagggattaatcgccaacctcaaaatgaacgcgttagaggcgactgtaatgttaaattgtagcctcgatcagattgcatcaatggttgaacaacgcatcttgaagccaaatcgaaaaagcaagcccaacagccctcttgatgttaccgattatctatttcatttcggcgatattttctgtctttggttagctgagttccaaagcgatgagtttaaccgttcgttttatgtgtcgaggtggtaaatgcaaactctgaaagaactaatcgcatccaatcctgacgacttaacaactgaacttaagagagcatttcgtccactcacaccgcatattgcaattgatggtaatgaacttgacgcactgacgatattagtcaatttaaccgataagactgatgatcagaaagacctgctcgatcgagccaaatgcaagcaaaaacttcgagatgaaaaatggtgggctagctgcataaattgcgttaattacagacaaagccataacccaaaattcccggatatacgttctgaaggcgtgattcgaacccaagccctgggtgaattaccgagtttcctactctcgtcctcaaaaatcccaccataccattggtcatatagccatgattcaaaatacgtcaacaaaagcgcattcctcaccaatgagttttgttgggatggtgagatctcatgtttgggtgagcttcttaaagatgcagatcacccactttggaatactttgaaaaagttaggttgttctcaaaaaacttgcaaagcaatggcaaaacaactagctgatattactctcacgactatcaatgtcacactcgcaccaaattacctgactcaaatatctctccccgatagtgatacatcctacatttcactctctcctgttgcatcgctatcgatgcaaagccactttcatcagaggctccaagatgaaaatcggcatagcgcgataacgcggtttagccgaactaccaacatgggggtcactgcgatgacatgtggcggcgcatttagaatgttaaagtctggcgctaagttttccagcccccctcatcaccgattaaacagtaaacgaagttggttgacgtcagagcatgttcagtcattaaaacagtaccagcgcctcaacaaaagcctcatacctgaaaactctcggattgcactccgtagaaaatacaaaatcgagcttcaaaatatggtcagatcttggtttgcaatgcaagaccatacccttgattcgaacatacttatccaacatttgaatcatgacctatcttacttaggagccacaaaacgttttgcatacgatccagcgatgaccaagctctttactgagcttttgaaacgagagttatcaaattcaatcaataatggtgagcaacacactaatggatcgtttttagtcctaccgaatatcagggtttgtggcgcaacagctttaagctccccggtaacggtggggattccatcacttacagctttctttggcttcgttcacgcatttgaacggaatataaatcgcaccacctcatcgtttcgtgttgaatcctttgcgatatgcgtccatcaactacatgtcgagaagcgaggtttgacagcagagtttgtggaaaaaggcgacgggactatatccgctcccgcgacccgggatgactggcagtgtgatgtcgtatttagccttattttgaacaccaactttgctcaacatattgaccaagatacgttagttacatcactaccaaagcgattggctcggggttcagcaaaaattgcgattgatgactttaaacatatcaactcattctcgacattagaaacagcgatcgaatctctgccaatagaagctggtaggtggttatcactttacgcacagtcaaacaataatctaagtgatctattagcagccatgacagaggaccatcagctcatggcaagctgcgtcggttaccacttgttagaagagcccaaagataaaccaaactccctcagaggttacaaacacgctatcgccgagtgcatcattggactcattaactcaatcacctttagctcagagactgatcccaacacaatcttttggtcgctaaagaactatcaaaactacctagtggtacagccaaggagtatcaacgatgaaactaccgacaaatctagcctatgagcgctctatcgacccatcagatgtctgtttttttgtcgtctggcccgatgatagaaaaacacctttaacctacaattctcgtactctgctcgggcaaatggaagcggcatcattagcctatgatgtctcaggtcaaccaataaaaagtgccaccgctgaggcgttagctcaagggaaccctcatcaagttgatttctgccacgttccatacggtgcgagtcatattgaatgcagtttctccgtctcgttttcttctgaactacgtcaaccatataagtgtaactcaagcaaagttaaacaaacgctagtgcaattagtcgagctctacgaaacgaaaatcggctggactgagctagcaacccgatatttgatgaacatttgcaacggtaaatggctgtggaaaaatacccgtaaagcctattgctggaacattgtacttacaccttggccttggaacggggaaaaggttggatttgaagatattcgtactaactacacctcacggcaagactttaaaaataataaaaattggtctgctatagttgaaatgatcaaaaccgcattttctagtactgatgggctggcgatatttgaagtcagggccaccttgcacttgccaacgaatgctatggtgcggccaagccaagttttcacagaaaaagaaagtggcagtaaaagtaaatctaaaactcaaaacagtcgagtttttcagagtacaactattgatggtgaacgatcgccaatactaggggcctttaaaacgggagcagctattgcaaccattgacgactggtatcctgaagccactgagccactaagggtcggacggtttggggttcatcgcgaagatgtcacttgctaccgtcatccgtctaccggaaaagattttttctcgatattacaacaagcagagcactatattgaagtgttgagcgccaacaaaactcccgctcaagaaactatcaacgacatgcactttttaatggctaacctgattaagggtgggatgttccagcataaaggagactgactgtgaaatggtattataagacaatcacctttctgccagagttgtgcaacaacgagtcactggctgcaaagtgtctccgcgttctgcatggatttaactatcagtatgagacacgaaatatcggcgtttcatttccgctttggtgtgatgcaacggttggaaaaaagatttcatttgtcagcaagaacaagatagaactcgacttactacttaaacaacactatttcgtccaaatggaacaacttcaatactttcatatatccaacactgttctcgtcccagaagattgtacatacgtttcctttagacgctgtcaatctatagataagctcacagcagcagggctggcaaggaaaatcagacgcctggagaaacgtgctctatctagaggcgagcaatttgacccatcatcttttgctcaaaaagagcatactgcaatagcgcactaccactcacttggggagtccagcaaacagacgaaccgcaactttcgactcaatatcaggatgctctcggagcaaccccgtgaggggaactcgatttttagtagctatggcttatcaaattcagaaaactcgtttcagcctgtacccttaatctgacctttaataaggagatataccatggcgacaagtttacctacgccctcagcaattacgacttcggcgttagagtatgcattccatactcccgctcgcaatctaacgaaatctcgcggaaaaaacattcatcgttatgtcagtgtaaagatgagtaagaggattacggtagaatctactctagagtgtgatgcctgctatcactttgattttgagccaagtattgttcgcttttgcgctcaaccgattcgatttttatattatctcaatggtcagtctcactcctatgttcctgactttctagttcaatttgataccaacgagtttgttctatatgaagtaaagtcagcttatgctaagaacaaacctgattttgatgttgaatgggaggcgaaagtaaaagcagcaactgaactagggctagaattggagcttgttgaagagagtgatattagggatacggttgtattaaataatcttaagcgcatgcatcgttatgcttcgaaagatgagctgaataacgtacataactctctcttaaaaataataaagtacaatggcgcccaatctgcaagatgcttgggagaacagttgggtttaaaaggccgaactgttttaccaattttgtgcgatttgctgtcaaggtgtttactcgatacacgtttggataagcctctatctcttgaatctcgatttgagttggccagttatggctaagaaagggttctcaagtttccatagaaaagcagtctcttcccaagatacgcttgaatcgatagagcttgtctctagcgctaattgtctagaaagtgttacgtatcaagatatatcagcatttcccgaaacaattgcggtagagattaatttccgattaagcattcttcgctttttagcgcgaaagtgcgaaaccattgtggccaaatcaattgaaccacatcgtgtagagctacagcaaaactatagtagaaaaatacccagtgcaataacgatatatcgatggtggcttgcttttcgaaaatcagactacaaccccattagcttagcacctaatatcaaggatagaggtaatagagagacaaaagtgtcaacagttgttgattctattatggaacaggcagttgaaagagttatatctggacgaaaagtcaatgttagctctgcatataaacgtgttcgacgaaaagttcgtcaatacaatctaactcatggaacgaaatacacgtatcctaagtacgaatctgtaagaaagcgagtaaaaaagaaaaccccatttgagttattagccgcagggaaaggggagagagtagctaagagagagtttcgccgaatgggaaaaaagatcctcacgtctagcgtgctagagagggttgaaatagatcacactgtcgttgacctttttgcagtacacgaagagtatcgaatcccattgggccgaccttggcttactcaattggttgattgttacagtaaagctgtaatcggtttttatttaggtttcgagcctcctagctatgtgtcggtttcccttgcacttaagaatgcaatacaacgcaaagatgacttaatctcctcgtatgaatcgatcgagaatgaatggctatgttatggcatcccagacctactcgtaactgataatggtaaagagtttttgtcgaaagcatttgatcaagcatgtgaatcactattgatcaatgtgcatcaaaataaagttgagacgcccgacaacaaacctcatgttgaacgtaactacgggactattaatacttctctgttagacgatttacctgggaaatccttcagccagtaccttcaaagagaagggtacgactctgtgggagaagctacccttacactcaatgagattagagaaatttacttaatttggttggtggatatttatcataaaaaacccaatcagagaggcactaattgtcctaatgttgcgtggaaaaagggttgtcaagaatgggaaccagaggagttctctggttctaaagacgaattagactttaaatttgctattgttgattacaaacaacttactaaagtagggataactgtctacaaagaactgagttatagcaatgaccgtttagctgaatatagagggaagaaaggaaaccataaagttcagttcaagtataaccctgagtgtatggcagttatttgggtgttggatgaggatatgaatgagtactttacagttaatgcgattgactacgaatatgcaagtagagtatcactttggcaacataaatataacatgaaatatcaagcagaactaaattcagcagaatatgatgaggacaaggaaattgatgcagaaataaaaattgaagaaatcgcagatcgttcaattgttaagactaacaaaatcagagctcggaggcgtggcgctaggcatcaagagaatagcgcaagggctaagtcaatcagtaatgcgaacccggcctcgatacaaaaacatgaagatgaaatcgttagtgcagataatgacgattgggatattgattatgtctgagaaatcgtcaaatgagtgaaacgcgtgaggctcgtatatcaagagctaaaagggcatttgtatccacaccgagcgttaggaaaatcttgagttacatggatagatgtagagatctatcagacctagagtctgagcctacatgcatgatggtctatggtgcttcgggtgtaggtaaaacgaccgtcatcaagaaatacttaaatcaaaacagaagagagtccgaagccgggggcgatataataccggttttgcatattgagttgccagacaatgcgaagccagtagatgcagcaagggaattgctggttgaaatgggtgacccgctagcactttatgaaactgacttagctagattgacgaaaagactgactgaattaatccctgcggtcggcgtgaagctgattattatcgatgagttccaacatttggtggaagaaaggtcaaatcgggttcttacccaagtaggtaattggctaaaaatgatacttaacaaaacgaaatgtccaattgttatatttggtatgccatactcaaaagttgtactgcaagcaaactcgcaacttcacgggcgattttccattcaggttgaactgcgcccctttagctaccagggaggtagaggtgtatttaaaacttttttggaataccttgataaagccctaccttttgaaaaacaggctggcttagccaacgaaagtttgcagaaaaaattgtatgcattctctcagggaaacatgcgttcgttgagaaaccttatttatcaagcatctatcgaagcaattgataatcagcatgagacgataaccgaagaagatttcgtttttgcatcgaagttgacatcgggcgataaacccaactcatggaaaaatccttttgaggagggtgttgaggtaacagaagatatgttacgaccgccaccaaaagatattggttgggaggactatttgagacattcaaccccgagagtgagtaaaccaggtagaaataaaaactttttcgaataacctaggctgctgcgctgctgccaccgctgagcaataactagcataaccccttggggcctctaaacgggtcttgaggggttttttgctgaaacctcaggcatttgttgttgatacaaccataaaatgataattacacccataaattgataattatcacacccataaattgatattgcctcttcatggtctaaacttcagtaagtttacgacattttcatgaactcgaggtcatttccggggatccatggagaaaaaaatcactggatataccaccgttgatatatcccaatggcatcgtaaagaacattttgaggcatttcagtcagttgctcaatgtacctataaccagaccgttcagctggatattacggcctttttaaagaccgtaaagaaaaataagcacaagttttatccggcctttattcacattcttgcccgcctgatgaatgctcatccggagttccgtatggcaatgaaagacggtgagctggtgatatgggatagtgttcacccttgttacaccgttttccatgagcaaactgaaacgttttcatcgctctggagtgaataccacgacgatttccggcagtttctacacatatattcgcaagatgtggcgtgttacggtgaaaacctggcctatttccctaaagggtttattgagaatatgtttttcgtctcagccaatccctgggtgagtttcaccagttttgatttaaacgtggccaatatggacaacttcttcgcccccgttttcactatgggcaaatattatacgcaaggcgacaaggtgctgatgccgctggcgattcaggttcatcatgccgtttgtgatggcttccatgtcggcagaatgcttaatgaattacaacagtactgcgatgagtggcagggcggggcgtaatttttttaaggcagttattggtgcccttctagagtccttactgcagtagttttgctgaaatactcgattcacaaaaatatcaacttatggttgttttgtgagatatcaatatatggttgttttgtggttaagttgctgattataaataattattaaatatcactttatggttgcatcaacaggtaccgagctcgaattcactggccgtcgttttacaacgtcgtgactgggaaaaccctggcgttacccaacttaatcgccttgccattttttaaccaataggccgtactgcgatgagtggcagggcggggcgtaatttttttaaggcagttattggtgcccttaaacgcctggttgctacgcctgaataagtgataataagcggatgaatggcagaaattcgaaagcaaattcgacccggtcgtcggttcagggcagggtcgttaaatagccgcttatgtctattgctggtttaccggtttattgactaccggaagcagtgtgaccgtgtgcttctcaaatgcctgaggccagtttgctcaggctctccccgtggaggtaataattgacgatatgatcatttattctgcctcccagagcctgataaaaacggtgaatccgttagcgaggtgccgccggcttccattcaggtcgaggtggcccggctccatgcaccgcgacgcaacgcggggaggcagacaaggtatagggcggcgaggcggctacagccgatagtctggaacagcgcacttacgggttgctgcgcaacccaagtgctaccggcgcggcagcgtgacccgtgtcggcggctccaacggctcgccatcgtccagaaaacacggctcatcgggcatcggcaggcgctgctgcccgcgccgttcccattcctccgtttcggtcaaggctggcaggtctggttccatgcccggaatgccgggctggctgggcggctcctcgccggggccggtcggtagttgctgctcgcccggatacagggtcgggatgcggcgcaggtcgccatgccccaacagcgattcgtcctggtcgtcgtgatcaaccaccacggcggcactgaacaccgacaggcgcaactggtcgcggggctggccccacgccacgcggtcattgaccacgtaggccgacacggtgccggggccgttgagcttcacgacggagatccagcgctcggccaccaagtccttgactgcgtattggaccgtccgcaaagaacgtccgatgagcttggaaagtgtcttctggctgaccaccacggcgttctggtggcccatctgcgccacgaggtgatgcagcagcattgccgccgtgggtttcctcgcaataagcccggcccacgcctcatgcgctttgcgttccgtttgcacccagtgaccgggcttgttcttggcttgaatgccgatttctctggactgcgtggccatgcttatctccatgcggtaggggtgccgcacggttgcggcaccatgcgcaatcagctgcaacttttcggcagcgcgacaacaattatgcgttgcgtaaaagtggcagtcaattacagattttctttaacctacgcaatgagctattgcggggggtgccgcaatgagctgttgcgtaccccccttttttaagttgttgatttttaagtctttcgcatttcgccctatatctagttctttggtgcccaaagaagggcacccctgcggggttcccccacgccttcggcgcggctccccctccggcaaaaagtggcccctccggggcttgttgatcgactgcgcggccttcggccttgcccaaggtggcgctgcccccttggaacccccgcactcgccgccgtgaggctcggggggcaggcgggcgggcttcgcccttcgactgcccccactcgcataggcttgggtcgttccaggcgcgtcaaggccaagccgctgcgcggtcgctgcgcgagccttgacccgccttccacttggtgtccaaccggcaagcgaagcgcgcaggccgcaggccggaggcttttccccagagaaaattaaaaaaattgatggggcaaggccgcaggccgcgcagttggagccggtgggtatgtggtcgaaggctgggtagccggtgggcaatccctgtggtcaagctcgtgggcaggcgcagcctgtccatcagcttgtccagcagggttgtccacgggccgagcgaagcgagccagccggtggccgctcgcggccatcgtccacatatccacgggctggcaagggagcgcagcgaccgcgcagggcgaagcccggagagcaagcccgtagggcgccgcagccgccgtaggcggtcacgactttgcgaagcaaagtctagtgagtatactcaagcattgagtggcccgccggaggcaccgccttgcgctgcccccgtcgagccggttggacaccaaaagggaggggcaggcatggcggcatacgcgatcatgcgatgcaagaagctggcgaaaatgggcaacgtggcggccagtctcaagcacgcctaccgcgagcgcgagacgcccaacgctgacgccagcaggacgccagagaacgagcactgggcggccagcagcaccgatgaagcgatgggccgactgcgcgagttgctgccagagaagcggcgcaaggacgctgtgttggcggtcgagtacgtcatgacggccagcccggaatggtggaagtcggccagccaagaacagcaggcggcgttcttcgagaaggcgcacaagtggctggcggacaagtacggggcggatcgcatcgtgacggccagcatccaccgtgacgaaaccagcccgcacatgaccgcgttcgtggtgccgctgacgcaggacggcaggctgtcggccaaggagttcatcggcaacaaagcgcagatgacccgcgaccagaccacgtttgcggccgctgtggccgatctagggctgcaacggggcatcgagggcagcaaggcacgtcacacgcgcattcaggcgttctacgaggccctggagcggccaccagtgggccacgtcaccatcagcccgcaagcggtcgagccacgcgcctatgcaccgcagggattggccgaaaagctgggaatctcaaagcgcgttgagacgccggaagccgtggccgaccggctgacaaaagcggttcggcaggggtatgagcctgccctacaggccgccgcaggagcgcgtgagatgcgcaagaaggccgatcaagcccaagagacggcccgag

SEQ ID NO: 872 - DNA, 11898 bp, Synthetic construct
  source 1..11898: mol_type = other DNA
gtatctttatagtcctgtcgggtttcgccaccactgatttgagcgtcagatttcgtgatgcttgtcaggggggcggagcctatggaaaaacggctttgccgcggccctctcacttccctgttaagtatcttcctggcatcttccaggaaatctccgccccgttcgtaagccatttccgctcgccgcagtcgaacgaccgagcgtagcgagtcagtgagcgaggaagcggaatatatcctgtatcacatattctgctgacgcaccggtgcagccttttttctcctgccacatgaagcacttcactgacaccctcatcagtgccaacatagtaagccagtatacactccgctagcgctgatgtccggcggtgcttttgccgttacgcaccaccccgtcagtagctgaacaggagggacagctgatagaaacagaagccactggagcacctcaaaaacaccatcatacactaaatcagtaagttggcagcatcacccgacgcactttgcgccgaataaatacctgtgacggaagatcacttcgcagaataaataaatcctggtgtccctgttgataccgggaagccctgggccaacttttggcgaaaatgagacgttgatcggcacgtaagaggttccaactttcaccataatgaaataagatcactaccgggcgtattttttgagttatcgagattttcaggagctaaggaagctaaaatggagaaaaaaatcactggatataccaccgttgatatatcccaatggcatcgtaaagaacattttgaggcatttcagtcagttgctcaatgtacctataaccagaccgttcagctggatattacggcctttttaaagaccgtaaagaaaaataagcacaagttttatccggcctttattcacattcttgcccgcctgatgaatgctcatccggagttccgtatggcaatgaaagacggtgagctggtgatatgggatagtgttcacccttgttacaccgttttccatgagcaaactgaaacgttttcatcgctctggagtgaataccacgacgatttccggcagtttctacacatatattcgcaagatgtggcgtgttacggtgaaaacctggcctatttccctaaagggtttattgagaatatgtttttcgtctcagccaatccctgggtgagtttcaccagttttgatttaaacgtggccaatatggacaacttcttcgcccccgttttcactatgggcaaatattatacgcaaggcgacaaggtgctgatgccgctggcgattcaggttcatcatgccgtttgtgatggcttccatgtcggcagaatgcttaatgaattacaacagtactgcgatgagtggcagggcggggcgtaatttttttaaggcagttattggtgcccttaaacgcctggttgctacgcctgaataagtgataataagcggatgaatggcagaaattcgaaagcaaattcgacccggtcgtcggttcagggcagggtcgttaaatagccgcttatgtctattgctggtttaccggtttattgactaccggtggataaccgtattaccgcctttgagtgagctgataccgctcgccgcagccgaacgaccgagcgcagcgagtcagtgagcgaggattgacagctagctcagtcctaggtataatactagccacgtggagatataccatgggtgaactgccgagtaggtagctgataacagtacagcgcggctgaaatcatcattaaagcggtgaactgccgagtaggtagctgataacggatccgaattcgagcgaaggagatatacatatgtttttgcaaagacctaaaccttacagcgatgaaagtttagaaagtttctttatccgagtggctaacaaaaatggctacggtgatgtccatcgcttcctagaagccactaaacgattccttcaagacattgaccataatggctatcaaacctttccgactgatataactcggataaacccatactcagctaaaaacagttccagcgcacgaactgcgtcattcctgaaacttgcacaattgacatttaatgaaccgccagagctacttgggttggcaattaacagaacaaacatgaaatactcgccgtcaactagcgcggttgttagaggtgcagaagtctttcctcgcagtttactacggacgcactccatcccctgctgtcctttgtgtctgcgagaaaatggctacgcctcctacctttggcactttcaggggtacgaatactgccacagccataacgtacctttaattaccacttgtagctgtggtaaggagtttgactaccgagtatctgggttaaagggcatttgctgcaaatgcaaggagcctatcaccttaaccagcagggagaacggtcatgaggcagcgtgtactgtttcaaactggcttgctggccatgaatctaaacctctgccaaatcttcctaaaagctaccgatggggtttagttcattggtggatgggtattaaagatagcgagttcgatcacttttcgttcgttcaatttttctcaaactggccaaggtcattccactcgataatcgaagatgaagtagagttcaaccttgagcatgctgttgtcagcacgtctgaattacgactaaaagatcttcttggtcgattgtttttcggttcaattcggttacctgagcggaatcttcaacacaatatcatccttggtgagcttctctgctatttagaaaatcgtttatggcaagacaagggattaatcgccaacctcaaaatgaacgcgttagaggcgactgtaatgttaaattgtagcctcgatcagattgcatcaatggttgaacaacgcatcttgaagccaaatcgaaaaagcaagcccaacagccctcttgatgttaccgattatctatttcatttcggcgatattttctgtctttggttagctgagttccaaagcgatgagtttaaccgttcgttttatgtgtcgaggtggtaaatgcaaactctgaaagaactaatcgcatccaatcctgacgacttaacaactgaacttaagagagcatttcgtccactcacaccgcatattgcaattgatggtaatgaacttgacgcactgacgatattagtcaatttaaccgataagactgatgatcagaaagacctgctcgatcgagccaaatgcaagcaaaaacttcgagatgaaaaatggtgggctagctgcataaattgcgttaattacagacaaagccataacccaaaattcccggatatacgttctgaaggcgtgattcgaacccaagccctgggtgaattaccgagtttcctactctcgtcctcaaaaatcccaccataccattggtcatatagccatgattcaaaatacgtcaacaaaagcgcattcctcaccaatgagttttgttgggatggtgagatctcatgtttgggtgagcttcttaaagatgcagatcacccactttggaatactttgaaaaagttaggttgttctcaaaaaacttgcaaagcaatggcaaaacaactagctgatattactctcacgactatcaatgtcacactcgcaccaaattacctgactcaaatatctctccccgatagtgatacatcctacatttcactctctcctgttgcatcgctatcgatgcaaagccactttcatcagaggctccaagatgaaaatcggcatagcgcgataacgcggtttagccgaactaccaacatgggggtcactgcgatgacatgtggcggcgcatttagaatgttaaagtctggcgctaagttttccagcccccctcatcaccgattaaacagtaaacgaagttggttgacgtcagagcatgttcagtcattaaaacagtaccagcgcctcaacaaaagcctcatacctgaaaactctcggattgcactccgtagaaaatacaaaatcgagcttcaaaatatggtcagatcttggtttgcaatgcaagaccatacccttgattcgaacatacttatccaacatttgaatcatgacctatcttacttaggagccacaaaacgttttgcatacgatccagcgatgaccaagctctttactgagcttttgaaacgagagttatcaaattcaatcaataatggtgagcaacacactaatggatcgtttttagtcctaccgaatatcagggtttgtggcgcaacagctttaagctccccggtaacggtggggattccatcacttacagctttctttggcttcgttcacgcatttgaacggaatataaatcgcaccacctcatcgtttcgtgttgaatcctttgcgatatgcgtccatcaactacatgtcgagaagcgaggtttgacagcagagtttgtggaaaaaggcgacgggactatatccgctcccgcgacccgggatgactggcagtgtgatgtcgtatttagccttattttgaacaccaactttgctcaacatattgaccaagatacgttagttacatcactaccaaagcgattggctcggggttcagcaaaaattgcgattgatgactttaaacatatcaactcattctcgacattagaaacagcgatcgaatctctgccaatagaagctggtaggtggttatcactttacgcacagtcaaacaataatctaagtgatctattagcagccatgacagaggaccatcagctcatggcaagctgcgtcggttaccacttgttagaagagcccaaagataaaccaaactccctcagaggttacaaacacgctatcgccgagtgcatcattggactcattaactcaatcacctttagctcagagactgatcccaacacaatcttttggtcgctaaagaactatcaaaactacctagtggtacagccaaggagtatcaacgatgaaactaccgacaaatctagcctatgagcgctctatcgacccatcagatgtctgtttttttgtcgtctggcccgatgatagaaaaacacctttaacctacaattctcgtactctgctcgggcaaatggaagcggcatcattagcctatgatgtctcaggtcaaccaataaaaagtgccaccgctgaggcgttagctcaagggaaccctcatcaagttgatttctgccacgttccatacggtgcgagtcatattgaatgcagtttctccgtctcgttttcttctgaactacgtcaaccatataagtgtaactcaagcaaagttaaacaaacgctagtgcaattagtcgagctctacgaaacgaaaatcggctggactgagctagcaacccgatatttgatgaacatttgcaacggtaaatggctgtggaaaaatacccgtaaagcctattgctggaacattgtacttacaccttggccttggaacggggaaaaggttggatttgaagatattcgtactaactacacctcacggcaagactttaaaaataataaaaattggtctgctatagttgaaatgatcaaaaccgcattttctagtactgatgggctggcgatatttgaagtcagggccaccttgcacttgccaacgaatgctatggtgcggccaagccaagttttcacagaaaaagaaagtggcagtaaaagtaaatctaaaactcaaaacagtcgagtttttcagagtacaactattgatggtgaacgatcgccaatactaggggcctttaaaacgggagcagctattgcaaccattgacgactggtatcctgaagccactgagccactaagggtcggacggtttggggttcatcgcgaagatgtcacttgctaccgtcatccgtctaccggaaaagattttttctcgatattacaacaagcagagcactatattgaagtgttgagcgccaacaaaactcccgctcaagaaactatcaacgacatgcactttttaatggctaacctgattaagggtgggatgttccagcataaaggagactgactgtgaaatggtattataagacaatcacctttctgccagagttgtgcaacaacgagtcactggctgcaaagtgtctccgcgttctgcatggatttaactatcagtatgagacacgaaatatcggcgtttcatttccgctttggtgtgatgcaacggttggaaaaaagatttcatttgtcagcaagaacaagatagaactcgacttactacttaaacaacactatttcgtccaaatggaacaacttcaatactttcatatatccaacactgttctcgtcccagaagattgtacatacgtttcctttagacgctgtcaatctatagataagctcacagcagcagggctggcaaggaaaatcagacgcctggagaaacgtgctctatctagaggcgagcaatttgacccatcatcttttgctcaaaaagagcatactgcaatagcgcactaccactcacttggggagtccagcaaacagacgaaccgcaactttcgactcaatatcaggatgctctcggagcaaccccgtgaggggaactcgatttttagtagctatggcttatcaaattcagaaaactcgtttcagcctgtacccttaatctgacctttaataaggagatataccatggcgacaagtttacctacgccctcagcaattacgacttcggcgttagagtatgcattccatactcccgctcgcaatctaacgaaatctcgcggaaaaaacattcatcgttatgtcagtgtaaagatgagtaagaggattacggtagaatctactctagagtgtgatgcctgctatcactttgattttgagccaagtattgttcgcttttgcgctcaaccgattcgatttttatattatctcaatggtcagtctcactcctatgttcctgactttctagttcaatttgataccaacgagtttgttctatatgaagtaaagtcagcttatgctaagaacaaacctgattttgatgttgaatgggaggcgaaagtaaaagcagcaactgaactagggctagaattggagcttgttgaagagagtgatattagggatacggttgtattaaataatcttaagcgcatgcatcgttatgcttcgaaagatgagctgaataacgtacataactctctcttaaaaataataaagtacaatggcgcccaatctgcaagatgcttgggagaacagttgggtttaaaaggccgaactgttttaccaattttgtgcgatttgctgtcaaggtgtttactcgatacacgtttggataagcctctatctcttgaatctcgatttgagttggccagttatggctaagaaagggttctcaagtttccatagaaaagcagtctcttcccaagatacgcttgaatcgatagagcttgtctctagcgctaattgtctagaaagtgttacgtatcaagatatatcagcatttcccgaaacaattgcggtagagattaatttccgattaagcattcttcgctttttagcgcgaaagtgcgaaaccattgtggccaaatcaattgaaccacatcgtgtagagctacagcaaaactatagtagaaaaatacccagtgcaataacgatatatcgatggtggcttgcttttcgaaaatcagactacaaccccattagcttagcacctaatatcaaggatagaggtaatagagagacaaaagtgtcaacagttgttgattctattatggaacaggcagttgaaagagttatatctggacgaaaagtcaatgttagctctgcatataaacgtgttcgacgaaaagttcgtcaatacaatctaactcatggaacgaaatacacgtatcctaagtacgaatctgtaagaaagcgagtaaaaaagaaaaccccatttgagttattagccgcagggaaaggggagagagtagctaagagagagtttcgccgaatgggaaaaaagatcctcacgtctagcgtgctagagagggttgaaatagatcacactgtcgttgacctttttgcagtacacgaagagtatcgaatcccattgggccgaccttggcttactcaattggttgattgttacagtaaagctgtaatcggtttttatttaggtttcgagcctcctagctatgtgtcggtttcccttgcacttaagaatgcaatacaacgcaaagatgacttaatctcctcgtatgaatcgatcgagaatgaatggctatgttatggcatcccagacctactcgtaactgataatggtaaagagtttttgtcgaaagcatttgatcaagcatgtgaatcactattgatcaatgtgcatcaaaataaagttgagacgcccgacaacaaacctcatgttgaacgtaactacgggactattaatacttctctgttagacgatttacctgggaaatccttcagccagtaccttcaaagagaagggtacgactctgtgggagaagctacccttacactcaatgagattagagaaatttacttaatttggttggtggatatttatcataaaaaacccaatcagagaggcactaattgtcctaatgttgcgtggaaaaagggttgtcaagaatgggaaccagaggagttctctggttctaaagacgaattagactttaaatttgctattgttgattacaaacaacttactaaagtagggataactgtctacaaagaactgagttatagcaatgaccgtttagctgaatatagagggaagaaaggaaaccataaagttcagttcaagtataaccctgagtgtatggcagttatttgggtgttggatgaggatatgaatgagtactttacagttaatgcgattgactacgaatatgcaagtagagtatcactttggcaacataaatataacatgaaatatcaagcagaactaaattcagcagaatatgatgaggacaaggaaattgatgcagaaataaaaattgaagaaatcgcagatcgttcaattgttaagactaacaaaatcagagctcggaggcgtggcgctaggcatcaagagaatagcgcaagggctaagtcaatcagtaatgcgaacccggcctcgatacaaaaacatgaagatgaaatcgttagtgcagataatgacgattgggatattgattatgtctgagaaatcgtcaaatgagtgaaacgcgtgaggctcgtatatcaagagctaaaagggcatttgtatccacaccgagcgttaggaaaatcttgagttacatggatagatgtagagatctatcagacctagagtctgagcctacatgcatgatggtctatggtgcttcgggtgtaggtaaaacgaccgtcatcaagaaatacttaaatcaaaacagaagagagtccgaagccgggggcgatataataccggttttgcatattgagttgccagacaatgcgaagccagtagatgcagcaagggaattgctggttgaaatgggtgacccgctagcactttatgaaactgacttagctagattgacgaaaagactgactgaattaatccctgcggtcggcgtgaagctgattattatcgatgagttccaacatttggtggaagaaaggtcaaatcgggttcttacccaagtaggtaattggctaaaaatgatacttaacaaaacgaaatgtccaattgttatatttggtatgccatactcaaaagttgtactgcaagcaaactcgcaacttcacgggcgattttccattcaggttgaactgcgcccctttagctaccagggaggtagaggtgtatttaaaacttttttggaataccttgataaagccctaccttttgaaaaacaggctggcttagccaacgaaagtttgcagaaaaaattgtatgcattctctcagggaaacatgcgttcgttgagaaaccttatttatcaagcatctatcgaagcaattgataatcagcatgagacgataaccgaagaagatttcgtttttgcatcgaagttgacatcgggcgataaacccaactcatggaaaaatccttttgaggagggtgttgaggtaacagaagatatgttacgaccgccaccaaaagatattggttgggaggactatttgagacattcaaccccgagagtgagtaaaccaggtagaaataaaaactttttcgaataacctaggctgctgcgctgctgccaccgctgagcaataactagcataaccccttggggcctctaaacgggtcttgaggggttttttgctgaaacctcaggcatttgttgttgatacaaccataaaatgataattacacccataaattgataattatcacacccataaattgatattgcctcttcatggtctaaacttcagtaagtttacgacattttcatgaactcgaggtcatttccggggatccatggagaaaaaaatcactggatataccaccgttgatatatcccaatggcatcgtaaagaacattttgaggcatttcagtcagttgctcaatgtacctataaccagaccgttcagctggatattacggcctttttaaagaccgtaaagaaaaataagcacaagttttatccggcctttattcacattcttgcccgcctgatgaatgctcatccggagttccgtatggcaatgaaagacggtgagctggtgatatgggatagtgttcacccttgttacaccgttttccatgagcaaactgaaacgttttcatcgctctggagtgaataccacgacgatttccggcagtttctacacatatattcgcaagatgtggcgtgttacggtgaaaacctggcctatttccctaaagggtttattgagaatatgtttttcgtctcagccaatccctgggtgagtttcaccagttttgatttaaacgtggccaatatggacaacttcttcgcccccgttttcactatgggcaaatattatacgcaaggcgacaaggtgctgatgccgctggcgattcaggttcatcatgccgtttgtgatggcttccatgtcggcagaatgcttaatgaattacaacagtactgcgatgagtggcagggcggggcgtaatttttttaaggcagttattggtgcccttctagagtccttactgcagtagttttgctgaaatactcgattcacaaaaatatcaacttatggttgttttgtgagatatcaatatatggttgttttgtggttaagttgctgattataaataattattaaatatcactttatggttgcatcaacaggtaccgagctcgaattcactggccgtcgttttacaacgtcgtgactgggaaaaccctggcgttacccaacttaatcgccttgccactcattaggcaccgggatctcgaccgatgcccttgagagccttcaacccagtcagctccttccggtgggcgcggggcatgactaacatgagaattacaacttatatcgtatggggctgacttcaggtgctacatttgaagagataaattgcactgaaatctagaaatattttatctgattaataagatgatcttcttgagatcgttttggtctgcgcgtaatctcttgctctgaaaacgaaaaaaccgccttgcagggcggtttttcgaaggttctctgagctaccaactctttgaaccgaggtaactggcttggaggagcgcagtcaccaaaacttgtcctttcagtttagccttaaccggcgcatgacttcaagactaactcctctaaatcaattaccagtggctgctgccagtggtgcttttgcatgtctttccgggttggactcaagacgatagttaccggataaggcgcagcggtcggactgaacggggggttcgtgcatacagtccagcttggagcgaactgcctacccggaactgagtgtcaggcgtggaatgagacaaacgcggccataacagcggaatgacaccggtaaaccgaaaggcaggaacaggagagcgcacgagggagccgccaggggaaacgcctg

SEQ ID NO: 873 - DNA, 11898 bp, Synthetic construct
  source 1..11898: mol_type = other DNA
gtatctttatagtcctgtcgggtttcgccaccactgatttgagcgtcagatttcgtgatgcttgtcaggggggcggagcctatggaaaaacggctttgccgcggccctctcacttccctgttaagtatcttcctggcatcttccaggaaatctccgccccgttcgtaagccatttccgctcgccgcagtcgaacgaccgagcgtagcgagtcagtgagcgaggaagcggaatatatcctgtatcacatattctgctgacgcaccggtgcagccttttttctcctgccacatgaagcacttcactgacaccctcatcagtgccaacatagtaagccagtatacactccgctagcgctgatgtccggcggtgcttttgccgttacgcaccaccccgtcagtagctgaacaggagggacagctgatagaaacagaagccactggagcacctcaaaaacaccatcatacactaaatcagtaagttggcagcatcacccgacgcactttgcgccgaataaatacctgtgacggaagatcacttcgcagaataaataaatcctggtgtccctgttgataccgggaagccctgggccaacttttggcgaaaatgagacgttgatcggcacgtaagaggttccaactttcaccataatgaaataagatcactaccgggcgtattttttgagttatcgagattttcaggagctaaggaagctaaaatggagaaaaaaatcactggatataccaccgttgatatatcccaatggcatcgtaaagaacattttgaggcatttcagtcagttgctcaatgtacctataaccagaccgttcagctggatattacggcctttttaaagaccgtaaagaaaaataagcacaagttttatccggcctttattcacattcttgcccgcctgatgaatgctcatccggagttccgtatggcaatgaaagacggtgagctggtgatatgggatagtgttcacccttgttacaccgttttccatgagcaaactgaaacgttttcatcgctctggagtgaataccacgacgatttccggcagtttctacacatatattcgcaagatgtggcgtgttacggtgaaaacctggcctatttccctaaagggtttattgagaatatgtttttcgtctcagccaatccctgggtgagtttcaccagttttgatttaaacgtggccaatatggacaacttcttcgcccccgttttcactatgggcaaatattatacgcaaggcgacaaggtgctgatgccgctggcgattcaggttcatcatgccgtttgtgatggcttccatgtcggcagaatgcttaatgaattacaacagtactgcgatgagtggcagggcggggcgtaatttttttaaggcagttattggtgcccttaaacgcctggttgctacgcctgaataagtgataataagcggatgaatggcagaaattcgaaagcaaattcgacccggtcgtcggttcagggcagggtcgttaaatagccgcttatgtctattgctggtttaccggtttattgactaccggtggataaccgtattaccgcctttgagtgagctgataccgctcgccgcagccgaacgaccgagcgcagcgagtcagtgagcgaggatttacagctagctcagtcctaggtattatgctagccacgtggagatataccatgggtgaactgccgagtaggtagctgataacagtacagcgcggctgaaatcatcattaaagcggtgaactgccgagtaggtagctgataacggatccgaattcgagcgaaggagatatacatatgtttttgcaaagacctaaaccttacagcgatgaaagtttagaaagtttctttatccgagtggctaacaaaaatggctacggtgatgtccatcgcttcctagaagccactaaacgattccttcaagacattgaccataatggctatcaaacctttccgactgatataactcggataaacccatactcagctaaaaacagttccagcgcacgaactgcgtcattcctgaaacttgcacaattgacatttaatgaaccgccagagctacttgggttggcaattaacagaacaaacatgaaatactcgccgtcaactagcgcggttgttagaggtgcagaagtctttcctcgcagtttactacggacgcactccatcccctgctgtcctttgtgtctgcgagaaaatggctacgcctcctacctttggcactttcaggggtacgaatactgccacagccataacgtacctttaattaccacttgtagctgtggtaaggagtttgactaccgagtatctgggttaaagggcatttgctgcaaatgcaaggagcctatcaccttaaccagcagggagaacggtcatgaggcagcgtgtactgtttcaaactggcttgctggccatgaatctaaacctctgccaaatcttcctaaaagctaccgatggggtttagttcattggtggatgggtattaaagatagcgagttcgatcacttttcgttcgttcaatttttctcaaactggccaaggtcattccactcgataatcgaagatgaagtagagttcaaccttgagcatgctgttgtcagcacgtctgaattacgactaaaagatcttcttggtcgattgtttttcggttcaattcggttacctgagcggaatcttcaacacaatatcatccttggtgagcttctctgctatttagaaaatcgtttatggcaagacaagggattaatcgccaacctcaaaatgaacgcgttagaggcgactgtaatgttaaattgtagcctcgatcagattgcatcaatggttgaacaacgcatcttgaagccaaatcgaaaaagcaagcccaacagccctcttgatgttaccgattatctatttcatttcggcgatattttctgtctttggttagctgagttccaaagcgatgagtttaaccgttcgttttatgtgtcgaggtggtaaatgcaaactctgaaagaactaatcgcatccaatcctgacgacttaacaactgaacttaagagagcatttcgtccactcacaccgcatattgcaattgatggtaatgaacttgacgcactgacgatattagtcaatttaaccgataagactgatgatcagaaagacctgctcgatcgagccaaatgcaagcaaaaacttcgagatgaaaaatggtgggctagctgcataaattgcgttaattacagacaaagccataacccaaaattcccggatatacgttctgaaggcgtgattcgaacccaagccctgggtgaattaccgagtttcctactctcgtcctcaaaaatcccaccataccattggtcatatagccatgattcaaaatacgtcaacaaaagcgcattcctcaccaatgagttttgttgggatggtgagatctcatgtttgggtgagcttcttaaagatgcagatcacccactttggaatactttgaaaaagttaggttgttctcaaaaaacttgcaaagcaatggcaaaacaactagctgatattactctcacgactatcaatgtcacactcgcaccaaattacctgactcaaatatctctccccgatagtgatacatcctacatttcactctctcctgttgcatcgctatcgatgcaaagccactttcatcagaggctccaagatgaaaatcggcatagcgcgataacgcggtttagccgaactaccaacatgggggtcactgcgatgacatgtggcggcgcatttagaatgttaaagtctggcgctaagttttccagcccccctcatcaccgattaaacagtaaacgaagttggttgacgtcagagcatgttcagtcattaaaacagtaccagcgcctcaacaaaagcctcatacctgaaaactctcggattgcactccgtagaaaatacaaaatcgagcttcaaaatatggtcagatcttggtttgcaatgcaagaccatacccttgattcgaacatacttatccaacatttgaatcatgacctatcttacttaggagccacaaaacgttttgcatacgatccagcgatgaccaagctctttactgagcttttgaaacgagagttatcaaattcaatcaataatggtgagcaacacactaatggatcgtttttagtcctaccgaatatcagggtttgtggcgcaacagctttaagctccccggtaacggtggggattccatcacttacagctttctttggcttcgttcacgcatttgaacggaatataaatcgcaccacctcatcgtttcgtgttgaatcctttgcgatatgcgtccatcaactacatgtcgagaagcgaggtttgacagcagagtttgtggaaaaaggcgacgggactatatccgctcccgcgacccgggatgactggcagtgtgatgtcgtatttagccttattttgaacaccaactttgctcaacatattgaccaagatacgttagttacatcactaccaaagcgattggctcggggttcagcaaaaattgcgattgatgactttaaacatatcaactcattctcgacattagaaacagcgatcgaatctctgccaatagaagctggtaggtggttatcactttacgcacagtcaaacaataatctaagtgatctattagcagccatgacagaggaccatcagctcatggcaagctgcgtcggttaccacttgttagaagagcccaaagataaaccaaactccctcagaggttacaaacacgctatcgccgagtgcatcattggactcattaactcaatcacctttagctcagagactgatcccaacacaatcttttggtcgctaaagaactatcaaaactacctagtggtacagccaaggagtatcaacgatgaaactaccgacaaatctagcctatgagcgctctatcgacccatcagatgtctgtttttttgtcgtctggcccgatgatagaaaaacacctttaacctacaattctcgtactctgctcgggcaaatggaagcggcatcattagcctatgatgtctcaggtcaaccaataaaaagtgccaccgctgaggcgttagctcaagggaaccctcatcaagttgatttctgccacgttccatacggtgcgagtcatattgaatgcagtttctccgtctcgttttcttctgaactacgtcaaccatataagtgtaactcaagcaaagttaaacaaacgctagtgcaattagtcgagctctacgaaacgaaaatcggctggactgagctagcaacccgatatttgatgaacatttgcaacggtaaatggctgtggaaaaatacccgtaaagcctattgctggaacattgtacttacaccttggccttggaacggggaaaaggttggatttgaagatattcgtactaactacacctcacggcaagactttaaaaataataaaaattggtctgctatagttgaaatgatcaaaaccgcattttctagtactgatgggctggcgatatttgaagtcagggccaccttgcacttgccaacgaatgctatggtgcggccaagccaagttttcacagaaaaagaaagtggcagtaaaagtaaatctaaaactcaaaacagtcgagtttttcagagtacaactattgatggtgaacgatcgccaatactaggggcctttaaaacgggagcagctattgcaaccattgacgactggtatcctgaagccactgagccactaagggtcggacggtttggggttcatcgcgaagatgtcacttgctaccgtcatccgtctaccggaaaagattttttctcgatattacaacaagcagagcactatattgaagtgttgagcgccaacaaaactcccgctcaagaaactatcaacgacatgcactttttaatggctaacctgattaagggtgggatgttccagcataaaggagactgactgtgaaatggtattataagacaatcacctttctgccagagttgtgcaacaacgagtcactggctgcaaagtgtctccgcgttctgcatggatttaactatcagtatgagacacgaaatatcggcgtttcatttccgctttggtgtgatgcaacggttggaaaaaagatttcatttgtcagcaagaacaagatagaactcgacttactacttaaacaacactatttcgtccaaatggaacaacttcaatactttcatatatccaacactgttctcgtcccagaagattgtacatacgtttcctttagacgctgtcaatctatagataagctcacagcagcagggctggcaaggaaaatcagacgcctggagaaacgtgctctatctagaggcgagcaatttgacccatcatcttttgctcaaaaagagcatactgcaatagcgcactaccactcacttggggagtccagcaaacagacgaaccgcaactttcgactcaatatcaggatgctctcggagcaaccccgtgaggggaactcgatttttagtagctatggcttatcaaattcagaaaactcgtttcagcctgtacccttaatctgacctttaataaggagatataccatggcgacaagtttacctacgccctcagcaattacgacttcggcgttagagtatgcattccatactcccgctcgcaatctaacgaaatctcgcggaaaaaacattcatcgttatgtcagtgtaaagatgagtaagaggattacggtagaatctactctagagtgtgatgcctgctatcactttgattttgagccaagtattgttcgcttttgcgctcaaccgattcgatttttatattatctcaatggtcagtctcactcctatgttcctgactttctagttcaatttgataccaacgagtttgttctatatgaagtaaagtcagcttatgctaagaacaaacctgattttgatgttgaatgggaggcgaaagtaaaagcagcaactgaactagggctagaattggagcttgttgaagagagtgatattagggatacggttgtattaaataatcttaagcgcatgcatcgttatgcttcgaaagatgagctgaataacgtacataactctctcttaaaaataataaagtacaatggcgcccaatctgcaagatgcttgggagaacagttgggtttaaaaggccgaactgttttaccaattttgtgcgatttgctgtcaaggtgtttactcgatacacgtttggataagcctctatctcttgaatctcgatttgagttggccagttatggctaagaaagggttctcaagtttccatagaaaagcagtctcttcccaagatacgcttgaatcgatagagcttgtctctagcgctaattgtctagaaagtgttacgtatcaagatatatcagcatttcccgaaacaattgcggtagagattaatttccgattaagcattcttcgctttttagcgcgaaagtgcgaaaccattgtggccaaatcaattgaaccacatcgtgtagagctacagcaaaactatagtagaaaaatacccagtgcaataacgatatatcgatggtggcttgcttttcgaaaatcagactacaaccccattagcttagcacctaatatcaaggatagaggtaatagagagacaaaagtgtcaacagttgttgattctattatggaacaggcagttgaaagagttatatctggacgaaaagtcaatgttagctctgcatataaacgtgttcgacgaaaagttcgtcaatacaatctaactcatggaacgaaatacacgtatcctaagtacgaatctgtaagaaagcgagtaaaaaagaaaaccccatttgagttattagccgcagggaaaggggagagagtagctaagagagagtttcgccgaatgggaaaaaagatcctcacgtctagcgtgctagagagggttgaaatagatcacactgtcgttgacctttttgcagtacacgaagagtatcgaatcccattgggccgaccttggcttactcaattggttgattgttacagtaaagctgtaatcggtttttatttaggtttcgagcctcctagctatgtgtcggtttcccttgcacttaagaatgcaatacaacgcaaagatgacttaatctcctcgtatgaatcgatcgagaatgaatggctatgttatggcatcccagacctactcgtaactgataatggtaaagagtttttgtcgaaagcatttgatcaagcatgtgaatcactattgatcaatgtgcatcaaaataaagttgagacgcccgacaacaaacctcatgttgaacgtaactacgggactattaatacttctctgttagacgatttacctgggaaatccttcagccagtaccttcaaagagaagggtacgactctgtgggagaagctacccttacactcaatgagattagagaaatttacttaatttggttggtggatatttatcataaaaaacccaatcagagaggcactaattgtcctaatgttgcgtggaaaaagggttgtcaagaatgggaaccagaggagttctctggttctaaagacgaattagactttaaatttgctattgttgattacaaacaacttactaaagtagggataactgtctacaaagaactgagttatagcaatgaccgtttagctgaatatagagggaagaaaggaaaccataaagttcagttcaagtataaccctgagtgtatggcagttatttgggtgttggatgaggatatgaatgagtactttacagttaatgcgattgactacgaatatgcaagtagagtatcactttggcaacataaatataacatgaaatatcaagcagaactaaattcagcagaatatgatgaggacaaggaaattgatgcagaaataaaaattgaagaaatcgcagatcgttcaattgttaagactaacaaaatcagagctcggaggcgtggcgctaggcatcaagagaatagcgcaagggctaagtcaatcagtaatgcgaacccggcctcgatacaaaaacatgaagatgaaatcgttagtgcagataatgacgattgggatattgattatgtctgagaaatcgtcaaatgagtgaaacgcgtgaggctcgtatatcaagagctaaaagggcatttgtatccacaccgagcgttaggaaaatcttgagttacatggatagatgtagagatctatcagacctagagtctgagcctacatgcatgatggtctatggtgcttcgggtgtaggtaaaacgaccgtcatcaagaaatacttaaatcaaaacagaagagagtccgaagccgggggcgatataataccggttttgcatattgagttgccagacaatgcgaagccagtagatgcagcaagggaattgctggttgaaatgggtgacccgctagcactttatgaaactgacttagctagattgacgaaaagactgactgaattaatccctgcggtcggcgtgaagctgattattatcgatgagttccaacatttggtggaagaaaggtcaaatcgggttcttacccaagtaggtaattggctaaaaatgatacttaacaaaacgaaatgtccaattgttatatttggtatgccatactcaaaagttgtactgcaagcaaactcgcaacttcacgggcgattttccattcaggttgaactgcgcccctttagctaccagggaggtagaggtgtatttaaaacttttttggaataccttgataaagccctaccttttgaaaaacaggctggcttagccaacgaaagtttgcagaaaaaattgtatgcattctctcagggaaacatgcgttcgttgagaaaccttatttatcaagcatctatcgaagcaattgataatcagcatgagacgataaccgaagaagatttcgtttttgcatcgaagttgacatcgggcgataaacccaactcatggaaaaatccttttgaggagggtgttgaggtaacagaagatatgttacgaccgccaccaaaagatattggttgggaggactatttgagacattcaaccccgagagtgagtaaaccaggtagaaataaaaactttttcgaataacctaggctgctgcgctgctgccaccgctgagcaataactagcataaccccttggggcctctaaacgggtcttgaggggttttttgctgaaacctcaggcatttgttgttgatacaaccataaaatgataattacacccataaattgataattatcacacccataaattgatattgcctcttcatggtctaaacttcagtaagtttacgacattttcatgaactcgaggtcatttccggggatccatggagaaaaaaatcactggatataccaccgttgatatatcccaatggcatcgtaaagaacattttgaggcatttcagtcagttgctcaatgtacctataaccagaccgttcagctggatattacggcctttttaaagaccgtaaagaaaaataagcacaagttttatccggcctttattcacattcttgcccgcctgatgaatgctcatccggagttccgtatggcaatgaaagacggtgagctggtgatatgggatagtgttcacccttgttacaccgttttccatgagcaaactgaaacgttttcatcgctctggagtgaataccacgacgatttccggcagtttctacacatatattcgcaagatgtggcgtgttacggtgaaaacctggcctatttccctaaagggtttattgagaatatgtttttcgtctcagccaatccctgggtgagtttcaccagttttgatttaaacgtggccaatatggacaacttcttcgcccccgttttcactatgggcaaatattatacgcaaggcgacaaggtgctgatgccgctggcgattcaggttcatcatgccgtttgtgatggcttccatgtcggcagaatgcttaatgaattacaacagtactgcgatgagtggcagggcggggcgtaatttttttaaggcagttattggtgcccttctagagtccttactgcagtagttttgctgaaatactcgattcacaaaaatatcaacttatggttgttttgtgagatatcaatatatggttgttttgtggttaagttgctgattataaataattattaaatatcactttatggttgcatcaacaggtaccgagctcgaattcactggccgtcgttttacaacgtcgtgactgggaaaaccctggcgttacccaacttaatcgccttgccactcattaggcaccgggatctcgaccgatgcccttgagagccttcaacccagtcagctccttccggtgggcgcggggcatgactaacatgagaattacaacttatatcgtatggggctgacttcaggtgctacatttgaagagataaattgcactgaaatctagaaatattttatctgattaataagatgatcttcttgagatcgttttggtctgcgcgtaatctcttgctctgaaaacgaaaaaaccgccttgcagggcggtttttcgaaggttctctgagctaccaactctttgaaccgaggtaactggcttggaggagcgcagtcaccaaaacttgtcctttcagtttagccttaaccggcgcatgacttcaagactaactcctctaaatcaattaccagtggctgctgccagtggtgcttttgcatgtctttccgggttggactcaagacgatagttaccggataaggcgcagcggtcggactgaacggggggttcgtgcatacagtccagcttggagcgaactgcctacccggaactgagtgtcaggcgtggaatgagacaaacgcggccataacagcggaatgacaccggtaaaccgaaaggcaggaacaggagagcgcacgagggagccgccaggggaaacgcctg

SEQ ID NO: 874 - DNA, 11898 bp, Synthetic construct
  source 1..11898: mol_type = other DNA
gtatctttatagtcctgtcgggtttcgccaccactgatttgagcgtcagatttcgtgatgcttgtcaggggggcggagcctatggaaaaacggctttgccgcggccctctcacttccctgttaagtatcttcctggcatcttccaggaaatctccgccccgttcgtaagccatttccgctcgccgcagtcgaacgaccgagcgtagcgagtcagtgagcgaggaagcggaatatatcctgtatcacatattctgctgacgcaccggtgcagccttttttctcctgccacatgaagcacttcactgacaccctcatcagtgccaacatagtaagccagtatacactccgctagcgctgatgtccggcggtgcttttgccgttacgcaccaccccgtcagtagctgaacaggagggacagctgatagaaacagaagccactggagcacctcaaaaacaccatcatacactaaatcagtaagttggcagcatcacccgacgcactttgcgccgaataaatacctgtgacggaagatcacttcgcagaataaataaatcctggtgtccctgttgataccgggaagccctgggccaacttttggcgaaaatgagacgttgatcggcacgtaagaggttccaactttcaccataatgaaataagatcactaccgggcgtattttttgagttatcgagattttcaggagctaaggaagctaaaatggagaaaaaaatcactggatataccaccgttgatatatcccaatggcatcgtaaagaacattttgaggcatttcagtcagttgctcaatgtacctataaccagaccgttcagctggatattacggcctttttaaagaccgtaaagaaaaataagcacaagttttatccggcctttattcacattcttgcccgcctgatgaatgctcatccggagttccgtatggcaatgaaagacggtgagctggtgatatgggatagtgttcacccttgttacaccgttttccatgagcaaactgaaacgttttcatcgctctggagtgaataccacgacgatttccggcagtttctacacatatattcgcaagatgtggcgtgttacggtgaaaacctggcctatttccctaaagggtttattgagaatatgtttttcgtctcagccaatccctgggtgagtttcaccagttttgatttaaacgtggccaatatggacaacttcttcgcccccgttttcactatgggcaaatattatacgcaaggcgacaaggtgctgatgccgctggcgattcaggttcatcatgccgtttgtgatggcttccatgtcggcagaatgcttaatgaattacaacagtactgcgatgagtggcagggcggggcgtaatttttttaaggcagttattggtgcccttaaacgcctggttgctacgcctgaataagtgataataagcggatgaatggcagaaattcgaaagcaaattcgacccggtcgtcggttcagggcagggtcgttaaatagccgcttatgtctattgctggtttaccggtttattgactaccggtggataaccgtattaccgcctttgagtgagctgataccgctcgccgcagccgaacgaccgagcgcagcgagtcagtgagcgaggatttacggctagctcagtcctaggtactatgctagccacgtggagatataccatgggtgaactgccgagtaggtagctgataacagtacagcgcggctgaaatcatcattaaagcggtgaactgccgagtaggtagctgataacggatccgaattcgagcgaaggagatatacatatgtttttgcaaagacctaaaccttacagcgatgaaagtttagaaagtttctttatccgagtggctaacaaaaatggctacggtgatgtccatcgcttcctagaagccactaaacgattccttcaagacattgaccataatggctatcaaacctttccgactgatataactcggataaacccatactcagctaaaaacagttccagcgcacgaactgcgtcattcctgaaacttgcacaattgacatttaatgaaccgccagagctacttgggttggcaattaacagaacaaacatgaaatactcgccgtcaactagcgcggttgttagaggtgcagaagtctttcctcgcagtttactacggacgcactccatcccctgctgtcctttgtgtctgcgagaaaatggctacgcctcctacctttggcactttcaggggtacgaatactgccacagccataacgtacctttaattaccacttgtagctgtggtaaggagtttgactaccgagtatctgggttaaagggcatttgctgcaaatgcaaggagcctatcaccttaaccagcagggagaacggtcatgaggcagcgtgtactgtttcaaactggcttgctggccatgaatctaaacctctgccaaatcttcctaaaagctaccgatggggtttagttcattggtggatgggtattaaagatagcgagttcgatcacttttcgttcgttcaatttttctcaaactggccaaggtcattccactcgataatcgaagatgaagtagagttcaaccttgagcatgctgttgtcagcacgtctgaattacgactaaaagatcttcttggtcgattgtttttcggttcaattcggttacctgagcggaatcttcaacacaatatcatccttggtgagcttctctgctatttagaaaatcgtttatggcaagacaagggattaatcgccaacctcaaaatgaacgcgttagaggcgactgtaatgttaaattgtagcctcgatcagattgcatcaatggttgaacaacgcatcttgaagccaaatcgaaaaagcaagcccaacagccctcttgatgttaccgattatctatttcatttcggcgatattttctgtctttggttagctgagttccaaagcgatgagtttaaccgttcgttttatgtgtcgaggtggtaaatgcaaactctgaaagaactaatcgcatccaatcctgacgacttaacaactgaacttaagagagcatttcgtccactcacaccgcatattgcaattgatggtaatgaacttgacgcactgacgatattagtcaatttaaccgataagactgatgatcagaaagacctgctcgatcgagccaaatgcaagcaaaaacttcgagatgaaaaatggtgggctagctgcataaattgcgttaattacagacaaagccataacccaaaattcccggatatacgttctgaaggcgtgattcgaacccaagccctgggtgaattaccgagtttcctactctcgtcctcaaaaatcccaccataccattggtcatatagccatgattcaaaatacgtcaacaaaagcgcattcctcaccaatgagttttgttgggatggtgagatctcatgtttgggtgagcttcttaaagatgcagatcacccactttggaatactttgaaaaagttaggttgttctcaaaaaacttgcaaagcaatggcaaaacaactagctgatattactctcacgactatcaatgtcacactcgcaccaaattacctgactcaaatatctctccccgatagtgatacatcctacatttcactctctcctgttgcatcgctatcgatgcaaagccactttcatcagaggctccaagatgaaaatcggcatagcgcgataacgcggtttagccgaactaccaacatgggggtcactgcgatgacatgtggcggcgcatttagaatgttaaagtctggcgctaagttttccagcccccctcatcaccgattaaacagtaaacgaagttggttgacgtcagagcatgttcagtcattaaaacagtaccagcgcctcaacaaaagcctcatacctgaaaactctcggattgcactccgtagaaaatacaaaatcgagcttcaaaatatggtcagatcttggtttgcaatgcaagaccatacccttgattcgaacatacttatccaacatttgaatcatgacctatcttacttaggagccacaaaacgttttgcatacgatccagcgatgaccaagctctttactgagcttttgaaacgagagttatcaaattcaatcaataatggtgagcaacacactaatggatcgtttttagtcctaccgaatatcagggtttgtggcgcaacagctttaagctccccggtaacggtggggattccatcacttacagctttctttggcttcgttcacgcatttgaacggaatataaatcgcaccacctcatcgtttcgtgttgaatcctttgcgatatgcgtccatcaactacatgtcgagaagcgaggtttgacagcagagtttgtggaaaaaggcgacgggactatatccgctcccgcgacccgggatgactggcagtgtgatgtcgtatttagccttattttgaacaccaactttgctcaacatattgaccaagatacgttagttacatcactaccaaagcgattggctcggggttcagcaaaaattgcgattgatgactttaaacatatcaactcattctcgacattagaaacagcgatcgaatctctgccaatagaagctggtaggtggttatcactttacgcacagtcaaacaataatctaagtgatctattagcagccatgacagaggaccatcagctcatggcaagctgcgtcggttaccacttgttagaagagcccaaagataaaccaaactccctcagaggttacaaacacgctatcgccgagtgcatcattggactcattaactcaatcacctttagctcagagactgatcccaacacaatcttttggtcgctaaagaactatcaaaactacctagtggtacagccaaggagtatcaacgatgaaactaccgacaaatctagcctatgagcgctctatcgacccatcagatgtctgtttttttgtcgtctggcccgatgatagaaaaacacctttaacctacaattctcgtactctgctcgggcaaatggaagcggcatcattagcctatgatgtctcaggtcaaccaataaaaagtgccaccgctgaggcgttagctcaagggaaccctcatcaagttgatttctgccacgttccatacggtgcgagtcatattgaatgcagtttctccgtctcgttttcttctgaactacgtcaaccatataagtgtaactcaagcaaagttaaacaaacgctagtgcaattagtcgagctctacgaaacgaaaatcggctggactgagctagcaacccgatatttgatgaacatttgcaacggtaaatggctgtggaaaaatacccgtaaagcctattgctggaacattgtacttacaccttggccttggaacggggaaaaggttggatttgaagatattcgtactaactacacctcacggcaagactttaaaaataataaaaattggtctgctatagttgaaatgatcaaaaccgcattttctagtactgatgggctggcgatatttgaagtcagggccaccttgcacttgccaacgaatgctatggtgcggccaagccaagttttcacagaaaaagaaagtggcagtaaaagtaaatctaaaactcaaaacagtcgagtttttcagagtacaactattgatggtgaacgatcgccaatactaggggcctttaaaacgggagcagctattgcaaccattgacgactggtatcctgaagccactgagccactaagggtcggacggtttggggttcatcgcgaagatgtcacttgctaccgtcatccgtctaccggaaaagattttttctcgatattacaacaagcagagcactatattgaagtgttgagcgccaacaaaactcccgctcaagaaactatcaacgacatgcactttttaatggctaacctgattaagggtgggatgttccagcataaaggagactgactgtgaaatggtattataagacaatcacctttctgccagagttgtgcaacaacgagtcactggctgcaaagtgtctccgcgttctgcatggatttaactatcagtatgagacacgaaatatcggcgtttcatttccgctttggtgtgatgcaacggttggaaaaaagatttcatttgtcagcaagaacaagatagaactcgacttactacttaaacaacactatttcgtccaaatggaacaacttcaatactttcatatatccaacactgttctcgtcccagaagattgtacatacgtttcctttagacgctgtcaatctatagataagctcacagcagcagggctggcaaggaaaatcagacgcctggagaaacgtgctctatctagaggcgagcaatttgacccatcatcttttgctcaaaaagagcatactgcaatagcgcactaccactcacttggggagtccagcaaacagacgaaccgcaactttcgactcaatatcaggatgctctcggagcaaccccgtgaggggaactcgatttttagtagctatggcttatcaaattcagaaaactcgtttcagcctgtacccttaatctgacctttaataaggagatataccatggcgacaagtttacctacgccctcagcaattacgacttcggcgttagagtatgcattccatactcccgctcgcaatctaacgaaatctcgcggaaaaaacattcatcgttatgtcagtgtaaagatgagtaagaggattacggtagaatctactctagagtgtgatgcctgctatcactttgattttgagccaagtattgttcgcttttgcgctcaaccgattcgatttttatattatctcaatggtcagtctcactcctatgttcctgactttctagttcaatttgataccaacgagtttgttctatatgaagtaaagtcagcttatgctaagaacaaacctgattttgatgttgaatgggaggcgaaagtaaaagcagcaactgaactagggctagaattggagcttgttgaagagagtgatattagggatacggttgtattaaataatcttaagcgcatgcatcgttatgcttcgaaagatgagctgaataacgtacataactctctcttaaaaataataaagtacaatggcgcccaatctgcaagatgcttgggagaacagttgggtttaaaaggccgaactgttttaccaattttgtgcgatttgctgtcaaggtgtttactcgatacacgtttggataagcctctatctcttgaatctcgatttgagttggccagttatggctaagaaagggttctcaagtttccatagaaaagcagtctcttcccaagatacgcttgaatcgatagagcttgtctctagcgctaattgtctagaaagtgttacgtatcaagatatatcagcatttcccgaaacaattgcggtagagattaatttccgattaagcattcttcgctttttagcgcgaaagtgcgaaaccattgtggccaaatcaattgaaccacatcgtgtagagctacagcaaaactatagtagaaaaatacccagtgcaataacgatatatcgatggtggcttgcttttcgaaaatcagactacaaccccattagcttagcacctaatatcaaggatagaggtaatagagagacaaaagtgtcaacagttgttgattctattatggaacaggcagttgaaagagttatatctggacgaaaagtcaatgttagctctgcatataaacgtgttcgacgaaaagttcgtcaatacaatctaactcatggaacgaaatacacgtatcctaagtacgaatctgtaagaaagcgagtaaaaaagaaaaccccatttgagttattagccgcagggaaaggggagagagtagctaagagagagtttcgccgaatgggaaaaaagatcctcacgtctagcgtgctagagagggttgaaatagatcacactgtcgttgacctttttgcagtacacgaagagtatcgaatcccattgggccgaccttggcttactcaattggttgattgttacagtaaagctgtaatcggtttttatttaggtttcgagcctcctagctatgtgtcggtttcccttgcacttaagaatgcaatacaacgcaaagatgacttaatctcctcgtatgaatcgatcgagaatgaatggctatgttatggcatcccagacctactcgtaactgataatggtaaagagtttttgtcgaaagcatttgatcaagcatgtgaatcactattgatcaatgtgcatcaaaataaagttgagacgcccgacaacaaacctcatgttgaacgtaactacgggactattaatacttctctgttagacgatttacctgggaaatccttcagccagtaccttcaaagagaagggtacgactctgtgggagaagctacccttacactcaatgagattagagaaatttacttaatttggttggtggatatttatcataaaaaacccaatcagagaggcactaattgtcctaatgttgcgtggaaaaagggttgtcaagaatgggaaccagaggagttctctggttctaaagacgaattagactttaaatttgctattgttgattacaaacaacttactaaagtagggataactgtctacaaagaactgagttatagcaatgaccgtttagctgaatatagagggaagaaaggaaaccataaagttcagttcaagtataaccctgagtgtatggcagttatttgggtgttggatgaggatatgaatgagtactttacagttaatgcgattgactacgaatatgcaagtagagtatcactttggcaacataaatataacatgaaatatcaagcagaactaaattcagcagaatatgatgaggacaaggaaattgatgcagaaataaaaattgaagaaatcgcagatcgttcaattgttaagactaacaaaatcagagctcggaggcgtggcgctaggcatcaagagaatagcgcaagggctaagtcaatcagtaatgcgaacccggcctcgatacaaaaacatgaagatgaaatcgttagtgcagataatgacgattgggatattgattatgtctgagaaatcgtcaaatgagtgaaacgcgtgaggctcgtatatcaagagctaaaagggcatttgtatccacaccgagcgttaggaaaatcttgagttacatggatagatgtagagatctatcagacctagagtctgagcctacatgcatgatggtctatggtgcttcgggtgtaggtaaaacgaccgtcatcaagaaatacttaaatcaaaacagaagagagtccgaagccgggggcgatataataccggttttgcatattgagttgccagacaatgcgaagccagtagatgcagcaagggaattgctggttgaaatgggtgacccgctagcactttatgaaactgacttagctagattgacgaaaagactgactgaattaatccctgcggtcggcgtgaagctgattattatcgatgagttccaacatttggtggaagaaaggtcaaatcgggttcttacccaagtaggtaattggctaaaaatgatacttaacaaaacgaaatgtccaattgttatatttggtatgccatactcaaaagttgtactgcaagcaaactcgcaacttcacgggcgattttccattcaggttgaactgcgcccctttagctaccagggaggtagaggtgtatttaaaacttttttggaataccttgataaagccctaccttttgaaaaacaggctggcttagccaacgaaagtttgcagaaaaaattgtatgcattctctcagggaaacatgcgttcgttgagaaaccttatttatcaagcatctatcgaagcaattgataatcagcatgagacgataaccgaagaagatttcgtttttgcatcgaagttgacatcgggcgataaacccaactcatggaaaaatccttttgaggagggtgttgaggtaacagaagatatgttacgaccgccaccaaaagatattggttgggaggactatttgagacattcaaccccgagagtgagtaaaccaggtagaaataaaaactttttcgaataacctaggctgctgcgctgctgccaccgctgagcaataactagcataaccccttggggcctctaaacgggtcttgaggggttttttgctgaaacctcaggcatttgttgttgatacaaccataaaatgataattacacccataaattgataattatcacacccataaattgatattgcctcttcatggtctaaacttcagtaagtttacgacattttcatgaactcgaggtcatttccggggatccatggagaaaaaaatcactggatataccaccgttgatatatcccaatggcatcgtaaagaacattttgaggcatttcagtcagttgctcaatgtacctataaccagaccgttcagctggatattacggcctttttaaagaccgtaaagaaaaataagcacaagttttatccggcctttattcacattcttgcccgcctgatgaatgctcatccggagttccgtatggcaatgaaagacggtgagctggtgatatgggatagtgttcacccttgttacaccgttttccatgagcaaactgaaacgttttcatcgctctggagtgaataccacgacgatttccggcagtttctacacatatattcgcaagatgtggcgtgttacggtgaaaacctggcctatttccctaaagggtttattgagaatatgtttttcgtctcagccaatccctgggtgagtttcaccagttttgatttaaacgtggccaatatggacaacttcttcgcccccgttttcactatgggcaaatattatacgcaaggcgacaaggtgctgatgccgctggcgattcaggttcatcatgccgtttgtgatggcttccatgtcggcagaatgcttaatgaattacaacagtactgcgatgagtggcagggcggggcgtaatttttttaaggcagttattggtgcccttctagagtccttactgcagtagttttgctgaaatactcgattcacaaaaatatcaacttatggttgttttgtgagatatcaatatatggttgttttgtggttaagttgctgattataaataattattaaatatcactttatggttgcatcaacaggtaccgagctcgaattcactggccgtcgttttacaacgtcgtgactgggaaaaccctggcgttacccaacttaatcgccttgccactcattaggcaccgggatctcgaccgatgcccttgagagccttcaacccagtcagctccttccggtgggcgcggggcatgactaacatgagaattacaacttatatcgtatggggctgacttcaggtgctacatttgaagagataaattgcactgaaatctagaaatattttatctgattaataagatgatcttcttgagatcgttttggtctgcgcgtaatctcttgctctgaaaacgaaaaaaccgccttgcagggcggtttttcgaaggttctctgagctaccaactctttgaaccgaggtaactggcttggaggagcgcagtcaccaaaacttgtcctttcagtttagccttaaccggcgcatgacttcaagactaactcctctaaatcaattaccagtggctgctgccagtggtgcttttgcatgtctttccgggttggactcaagacgatagttaccggataaggcgcagcggtcggactgaacggggggttcgtgcatacagtccagcttggagcgaactgcctacccggaactgagtgtcaggcgtggaatgagacaaacgcggccataacagcggaatgacaccggtaaaccgaaaggcaggaacaggagagcgcacgagggagccgccaggggaaacgcctg

SEQ ID NO: 875 - DNA, 11898 bp, Synthetic construct
  source 1..11898: mol_type = other DNA
gtatctttatagtcctgtcgggtttcgccaccactgatttgagcgtcagatttcgtgatgcttgtcaggggggcggagcctatggaaaaacggctttgccgcggccctctcacttccctgttaagtatcttcctggcatcttccaggaaatctccgccccgttcgtaagccatttccgctcgccgcagtcgaacgaccgagcgtagcgagtcagtgagcgaggaagcggaatatatcctgtatcacatattctgctgacgcaccggtgcagccttttttctcctgccacatgaagcacttcactgacaccctcatcagtgccaacatagtaagccagtatacactccgctagcgctgatgtccggcggtgcttttgccgttacgcaccaccccgtcagtagctgaacaggagggacagctgatagaaacagaagccactggagcacctcaaaaacaccatcatacactaaatcagtaagttggcagcatcacccgacgcactttgcgccgaataaatacctgtgacggaagatcacttcgcagaataaataaatcctggtgtccctgttgataccgggaagccctgggccaacttttggcgaaaatgagacgttgatcggcacgtaagaggttccaactttcaccataatgaaataagatcactaccgggcgtattttttgagttatcgagattttcaggagctaaggaagctaaaatggagaaaaaaatcactggatataccaccgttgatatatcccaatggcatcgtaaagaacattttgaggcatttcagtcagttgctcaatgtacctataaccagaccgttcagctggatattacggcctttttaaagaccgtaaagaaaaataagcacaagttttatccggcctttattcacattcttgcccgcctgatgaatgctcatccggagttccgtatggcaatgaaagacggtgagctggtgatatgggatagtgttcacccttgttacaccgttttccatgagcaaactgaaacgttttcatcgctctggagtgaataccacgacgatttccggcagtttctacacatatattcgcaagatgtggcgtgttacggtgaaaacctggcctatttccctaaagggtttattgagaatatgtttttcgtctcagccaatccctgggtgagtttcaccagttttgatttaaacgtggccaatatggacaacttcttcgcccccgttttcactatgggcaaatattatacgcaaggcgacaaggtgctgatgccgctggcgattcaggttcatcatgccgtttgtgatggcttccatgtcggcagaatgcttaatgaattacaacagtactgcgatgagtggcagggcggggcgtaatttttttaaggcagttattggtgcccttaaacgcctggttgctacgcctgaataagtgataataagcggatgaatggcagaaattcgaaagcaaattcgacccggtcgtcggttcagggcagggtcgttaaatagccgcttatgtctattgctggtttaccggtttattgactaccggtggataaccgtattaccgcctttgagtgagctgataccgctcgccgcagccgaacgaccgagcgcagcgagtcagtgagcgaggatttatggctagctcagtcctaggtacaatgctagccacgtggagatataccatgggtgaactgccgagtaggtagctgataacagtacagcgcggctgaaatcatcattaaagcggtgaactgccgagtaggtagctgataacggatccgaattcgagcgaaggagatatacatatgtttttgcaaagacctaaaccttacagcgatgaaagtttagaaagtttctttatccgagtggctaacaaaaatggctacggtgatgtccatcgcttcctagaagccactaaacgattccttcaagacattgaccataatggctatcaaacctttccgactgatataactcggataaacccatactcagctaaaaacagttccagcgcacgaactgcgtcattcctgaaacttgcacaattgacatttaatgaaccgccagagctacttgggttggcaattaacagaacaaacatgaaatactcgccgtcaactagcgcggttgttagaggtgcagaagtctttcctcgcagtttactacggacgcactccatcccctgctgtcctttgtgtctgcgagaaaatggctacgcctcctacctttggcactttcaggggtacgaatactgccacagccataacgtacctttaattaccacttgtagctgtggtaaggagtttgactaccgagtatctgggttaaagggcatttgctgcaaatgcaaggagcctatcaccttaaccagcagggagaacggtcatgaggcagcgtgtactgtttcaaactggcttgctggccatgaatctaaacctctgccaaatcttcctaaaagctaccgatggggtttagttcattggtggatgggtattaaagatagcgagttcgatcacttttcgttcgttcaatttttctcaaactggccaaggtcattccactcgataatcgaagatgaagtagagttcaaccttgagcatgctgttgtcagcacgtctgaattacgactaaaagatcttcttggtcgattgtttttcggttcaattcggttacctgagcggaatcttcaacacaatatcatccttggtgagcttctctgctatttagaaaatcgtttatggcaagacaagggattaatcgccaacctcaaaatgaacgcgttagaggcgactgtaatgttaaattgtagcctcgatcagattgcatcaatggttgaacaacgcatcttgaagccaaatcgaaaaagcaagcccaacagccctcttgatgttaccgattatctatttcatttcggcgatattttctgtctttggttagctgagttccaaagcgatgagtttaaccgttcgttttatgtgtcgaggtggtaaatgcaaactctgaaagaactaatcgcatccaatcctgacgacttaacaactgaacttaagagagcatttcgtccactcacaccgcatattgcaattgatggtaatgaacttgacgcactgacgatattagtcaatttaaccgataagactgatgatcagaaagacctgctcgatcgagccaaatgcaagcaaaaacttcgagatgaaaaatggtgggctagctgcataaattgcgttaattacagacaaagccataacccaaaattcccggatatacgttctgaaggcgtgattcgaacccaagccctgggtgaattaccgagtttcctactctcgtcctcaaaaatcccaccataccattggtcatatagccatgattcaaaatacgtcaacaaaagcgcattcctcaccaatgagttttgttgggatggtgagatctcatgtttgggtgagcttcttaaagatgcagatcacccactttggaatactttgaaaaagttaggttgttctcaaaaaacttgcaaagcaatggcaaaacaactagctgatattactctcacgactatcaatgtcacactcgcaccaaattacctgactcaaatatctctccccgatagtgatacatcctacatttcactctctcctgttgcatcgctatcgatgcaaagccactttcatcagaggctccaagatgaaaatcggcatagcgcgataacgcggtttagccgaactaccaacatgggggtcactgcgatgacatgtggcggcgcatttagaatgttaaagtctggcgctaagttttccagcccccctcatcaccgattaaacagtaaacgaagttggttgacgtcagagcatgttcagtcattaaaacagtaccagcgcctcaacaaaagcctcatacctgaaaactctcggattgcactccgtagaaaatacaaaatcgagcttcaaaatatggtcagatcttggtttgcaatgcaagaccatacccttgattcgaacatacttatccaacatttgaatcatgacctatcttacttaggagccacaaaacgttttgcatacgatccagcgatgaccaagctctttactgagcttttgaaacgagagttatcaaattcaatcaataatggtgagcaacacactaatggatcgtttttagtcctaccgaatatcagggtttgtggcgcaacagctttaagctccccggtaacggtggggattccatcacttacagctttctttggcttcgttcacgcatttgaacggaatataaatcgcaccacctcatcgtttcgtgttgaatcctttgcgatatgcgtccatcaactacatgtcgagaagcgaggtttgacagcagagtttgtggaaaaaggcgacgggactatatccgctcccgcgacccgggatgactggcagtgtgatgtcgtatttagccttattttgaacaccaactttgctcaacatattgaccaagatacgttagttacatcactaccaaagcgattggctcggggttcagcaaaaattgcgattgatgactttaaacatatcaactcattctcgacattagaaacagcgatcgaatctctgccaatagaagctggtaggtggttatcactttacgcacagtcaaacaataatctaagtgatctattagcagccatgacagaggaccatcagctcatggcaagctgcgtcggttaccacttgttagaagagcccaaagataaaccaaactccctcagaggttacaaacacgctatcgccgagtgcatcattggactcattaactcaatcacctttagctcagagactgatcccaacacaatcttttggtcgctaaagaactatcaaaactacctagtggtacagccaaggagtatcaacgatgaaactaccgacaaatctagcctatgagcgctctatcgacccatcagatgtctgtttttttgtcgtctggcccgatgatagaaaaacacctttaacctacaattctcgtactctgctcgggcaaatggaagcggcatcattagcctatgatgtctcaggtcaaccaataaaaagtgccaccgctgaggcgttagctcaagggaaccctcatcaagttgatttctgccacgttccatacggtgcgagtcatattgaatgcagtttctccgtctcgttttcttctgaactacgtcaaccatataagtgtaactcaagcaaagttaaacaaacgctagtgcaattagtcgagctctacgaaacgaaaatcggctggactgagctagcaacccgatatttgatgaacatttgcaacggtaaatggctgtggaaaaatacccgtaaagcctattgctggaacattgtacttacaccttggccttggaacggggaaaaggttggatttgaagatattcgtactaactacacctcacggcaagactttaaaaataataaaaattggtctgctatagttgaaatgatcaaaaccgcattttctagtactgatgggctggcgatatttgaagtcagggccaccttgcacttgccaacgaatgctatggtgcggccaagccaagttttcacagaaaaagaaagtggcagtaaaagtaaatctaaaactcaaaacagtcgagtttttcagagtacaactattgatggtgaacgatcgccaatactaggggcctttaaaacgggagcagctattgcaaccattgacgactggtatcctgaagccactgagccactaagggtcggacggtttggggttcatcgcgaagatgtcacttgctaccgtcatccgtctaccggaaaagattttttctcgatattacaacaagcagagcactatattgaagtgttgagcgccaacaaaactcccgctcaagaaactatcaacgacatgcactttttaatggctaacctgattaagggtgggatgttccagcataaaggagactgactgtgaaatggtattataagacaatcacctttctgccagagttgtgcaacaacgagtcactggctgcaaagtgtctccgcgttctgcatggatttaactatcagtatgagacacgaaatatcggcgtttcatttccgctttggtgtgatgcaacggttggaaaaaagatttcatttgtcagcaagaacaagatagaactcgacttactacttaaacaacactatttcgtccaaatggaacaacttcaatactttcatatatccaacactgttctcgtcccagaagattgtacatacgtttcctttagacgctgtcaatctatagataagctcacagcagcagggctggcaaggaaaatcagacgcctggagaaacgtgctctatctagaggcgagcaatttgacccatcatcttttgctcaaaaagagcatactgcaatagcgcactaccactcacttggggagtccagcaaacagacgaaccgcaactttcgactcaatatcaggatgctctcggagcaaccccgtgaggggaactcgatttttagtagctatggcttatcaaattcagaaaactcgtttcagcctgtacccttaatctgacctttaataaggagatataccatggcgacaagtttacctacgccctcagcaattacgacttcggcgttagagtatgcattccatactcccgctcgcaatctaacgaaatctcgcggaaaaaacattcatcgttatgtcagtgtaaagatgagtaagaggattacggtagaatctactctagagtgtgatgcctgctatcactttgattttgagccaagtattgttcgcttttgcgctcaaccgattcgatttttatattatctcaatggtcagtctcactcctatgttcctgactttctagttcaatttgataccaacgagtttgttctatatgaagtaaagtcagcttatgctaagaacaaacctgattttgatgttgaatgggaggcgaaagtaaaagcagcaactgaactagggctagaattggagcttgttgaagagagtgatattagggatacggttgtattaaataatcttaagcgcatgcatcgttatgcttcgaaagatgagctgaataacgtacataactctctcttaaaaataataaagtacaatggcgcccaatctgcaagatgcttgggagaacagttgggtttaaaaggccgaactgttttaccaattttgtgcgatttgctgtcaaggtgtttactcgatacacgtttggataagcctctatctcttgaatctcgatttgagttggccagttatggctaagaaagggttctcaagtttccatagaaaagcagtctcttcccaagatacgcttgaatcgatagagcttgtctctagcgctaattgtctagaaagtgttacgtatcaagatatatcagcatttcccgaaacaattgcggtagagattaatttccgattaagcattcttcgctttttagcgcgaaagtgcgaaaccattgtggccaaatcaattgaaccacatcgtgtagagctacagcaaaactatagtagaaaaatacccagtgcaataacgatatatcgatggtggcttgcttttcgaaaatcagactacaaccccattagcttagcacctaatatcaaggatagaggtaatagagagacaaaagtgtcaacagttgttgattctattatggaacaggcagttgaaagagttatatctggacgaaaagtcaatgttagctctgcatataaacgtgttcgacgaaaagttcgtcaatacaatctaactcatggaacgaaatacacgtatcctaagtacgaatctgtaagaaagcgagtaaaaaagaaaaccccatttgagttattagccgcagggaaaggggagagagtagctaagagagagtttcgccgaatgggaaaaaagatcctcacgtctagcgtgctagagagggttgaaatagatcacactgtcgttgacctttttgcagtacacgaagagtatcgaatcccattgggccgaccttggcttactcaattggttgattgttacagtaaagctgtaatcggtttttatttaggtttcgagcctcctagctatgtgtcggtttcccttgcacttaagaatgcaatacaacgcaaagatgacttaatctcctcgtatgaatcgatcgagaatgaatggctatgttatggcatcccagacctactcgtaactgataatggtaaagagtttttgtcgaaagcatttgatcaagcatgtgaatcactattgatcaatgtgcatcaaaataaagttgagacgcccgacaacaaacctcatgttgaacgtaactacgggactattaatacttctctgttagacgatttacctgggaaatccttcagccagtaccttcaaagagaagggtacgactctgtgggagaagctacccttacactcaatgagattagagaaatttacttaatttggttggtggatatttatcataaaaaacccaatcagagaggcactaattgtcctaatgttgcgtggaaaaagggttgtcaagaatgggaaccagaggagttctctggttctaaagacgaattagactttaaatttgctattgttgattacaaacaacttactaaagtagggataactgtctacaaagaactgagttatagcaatgaccgtttagctgaatatagagggaagaaaggaaaccataaagttcagttcaagtataaccctgagtgtatggcagttatttgggtgttggatgaggatatgaatgagtactttacagttaatgcgattgactacgaatatgcaagtagagtatcactttggcaacataaatataacatgaaatatcaagcagaactaaattcagcagaatatgatgaggacaaggaaattgatgcagaaataaaaattgaagaaatcgcagatcgttcaattgttaagactaacaaaatcagagctcggaggcgtggcgctaggcatcaagagaatagcgcaagggctaagtcaatcagtaatgcgaacccggcctcgatacaaaaacatgaagatgaaatcgttagtgcagataatgacgattgggatattgattatgtctgagaaatcgtcaaatgagtgaaacgcgtgaggctcgtatatcaagagctaaaagggcatttgtatccacaccgagcgttaggaaaatcttgagttacatggatagatgtagagatctatcagacctagagtctgagcctacatgcatgatggtctatggtgcttcgggtgtaggtaaaacgaccgtcatcaagaaatacttaaatcaaaacagaagagagtccgaagccgggggcgatataataccggttttgcatattgagttgccagacaatgcgaagccagtagatgcagcaagggaattgctggttgaaatgggtgacccgctagcactttatgaaactgacttagctagattgacgaaaagactgactgaattaatccctgcggtcggcgtgaagctgattattatcgatgagttccaacatttggtggaagaaaggtcaaatcgggttcttacccaagtaggtaattggctaaaaatgatacttaacaaaacgaaatgtccaattgttatatttggtatgccatactcaaaagttgtactgcaagcaaactcgcaacttcacgggcgattttccattcaggttgaactgcgcccctttagctaccagggaggtagaggtgtatttaaaacttttttggaataccttgataaagccctaccttttgaaaaacaggctggcttagccaacgaaagtttgcagaaaaaattgtatgcattctctcagggaaacatgcgttcgttgagaaaccttatttatcaagcatctatcgaagcaattgataatcagcatgagacgataaccgaagaagatttcgtttttgcatcgaagttgacatcgggcgataaacccaactcatggaaaaatccttttgaggagggtgttgaggtaacagaagatatgttacgaccgccaccaaaagatattggttgggaggactatttgagacattcaaccccgagagtgagtaaaccaggtagaaataaaaactttttcgaataacctaggctgctgcgctgctgccaccgctgagcaataactagcataaccccttggggcctctaaacgggtcttgaggggttttttgctgaaacctcaggcatttgttgttgatacaaccataaaatgataattacacccataaattgataattatcacacccataaattgatattgcctcttcatggtctaaacttcagtaagtttacgacattttcatgaactcgaggtcatttccggggatccatggagaaaaaaatcactggatataccaccgttgatatatcccaatggcatcgtaaagaacattttgaggcatttcagtcagttgctcaatgtacctataaccagaccgttcagctggatattacggcctttttaaagaccgtaaagaaaaataagcacaagttttatccggcctttattcacattcttgcccgcctgatgaatgctcatccggagttccgtatggcaatgaaagacggtgagctggtgatatgggatagtgttcacccttgttacaccgttttccatgagcaaactgaaacgttttcatcgctctggagtgaataccacgacgatttccggcagtttctacacatatattcgcaagatgtggcgtgttacggtgaaaacctggcctatttccctaaagggtttattgagaatatgtttttcgtctcagccaatccctgggtgagtttcaccagttttgatttaaacgtggccaatatggacaacttcttcgcccccgttttcactatgggcaaatattatacgcaaggcgacaaggtgctgatgccgctggcgattcaggttcatcatgccgtttgtgatggcttccatgtcggcagaatgcttaatgaattacaacagtactgcgatgagtggcagggcggggcgtaatttttttaaggcagttattggtgcccttctagagtccttactgcagtagttttgctgaaatactcgattcacaaaaatatcaacttatggttgttttgtgagatatcaatatatggttgttttgtggttaagttgctgattataaataattattaaatatcactttatggttgcatcaacaggtaccgagctcgaattcactggccgtcgttttacaacgtcgtgactgggaaaaccctggcgttacccaacttaatcgccttgccactcattaggcaccgggatctcgaccgatgcccttgagagccttcaacccagtcagctccttccggtgggcgcggggcatgactaacatgagaattacaacttatatcgtatggggctgacttcaggtgctacatttgaagagataaattgcactgaaatctagaaatattttatctgattaataagatgatcttcttgagatcgttttggtctgcgcgtaatctcttgctctgaaaacgaaaaaaccgccttgcagggcggtttttcgaaggttctctgagctaccaactctttgaaccgaggtaactggcttggaggagcgcagtcaccaaaacttgtcctttcagtttagccttaaccggcgcatgacttcaagactaactcctctaaatcaattaccagtggctgctgccagtggtgcttttgcatgtctttccgggttggactcaagacgatagttaccggataaggcgcagcggtcggactgaacggggggttcgtgcatacagtccagcttggagcgaactgcctacccggaactgagtgtcaggcgtggaatgagacaaacgcggccataacagcggaatgacaccggtaaaccgaaaggcaggaacaggagagcgcacgagggagccgccaggggaaacgcctg

SEQ ID NO: 876 - DNA, 12940 bp, Synthetic construct
  source 1..12940: mol_type = other DNA
gagtccaagcgagctctcgaaccccagagtcccgctcagaagaactcgtcaagaaggcgatagaaggcgatgcgctgcgaatcgggagcggcgataccgtaaagcacgaggaagcggtcagcccattcgccgccaagctcttcagcaatatcacgggtagccaacgctatgtcctgatagcggtccgccacacccagccggccacagtcgatgaatccagaaaagcggccattttccaccatgatattcggcaagcaggcatcgccatgggtcacgacgagatcctcgccgtcgggcatgcgcgccttgagcctggcgaacagttcggctggcgcgagcccctgatgctcttcgtccagatcatcctgatcgacaagaccggcttccatccgagtacgtgctcgctcgatgcgatgtttcgcttggtggtcgaatgggcaggtagccggatcaagcgtatgcagccgccgcattgcatcagccatgatggatactttctcggcaggagcaaggtgagatgacaggagatcctgccccggcacttcgcccaatagcagccagtcccttcccgcttcagtgacaacgtcgagcacagctgcgcaaggaacgcccgtcgtggccagccacgatagccgcgctgcctcgtcttgcagttcattcagggcaccggacaggtcggtcttgacaaaaagaaccgggcgcccctgcgctgacagccggaacacggcggcatcagagcagccgattgtctgttgtgcccagtcatagccgaatagcctctccacccaagcggccggagaacctgcgtgcaatccatcttgttcaatcatactccttcctttttcaatattattgaagcatttatcagggttattgtctcatgagcggatacatatttgaatgtatttagaaaaataaacaaataggggttccgcgcacatttccccgaaaagtgccacctgacgtctaagaaaccattattatcatgacattaacctataaaaataggcgtatcacgaggcagaatttcagataaaaaaaatccttagctttcgctaaggatgatttctggtggataaccgtattaccgcctttgagtgagctgataccgctcgccgcagccgaacgaccgagcgcagcgagtcagtgagcgaggattgacagctagctcagtcctaggtataatactagccacgtggagatataccatgggtgaactgccgagtaggtagctgataacagtacagcgcggctgaaatcatcattaaagcggtgaactgccgagtaggtagctgataacggatccgaattcgagcgaaggagatatacatatgtttttgcaaagacctaaaccttacagcgatgaaagtttagaaagtttctttatccgagtggctaacaaaaatggctacggtgatgtccatcgcttcctagaagccactaaacgattccttcaagacattgaccataatggctatcaaacctttccgactgatataactcggataaacccatactcagctaaaaacagttccagcgcacgaactgcgtcattcctgaaacttgcacaattgacatttaatgaaccgccagagctacttgggttggcaattaacagaacaaacatgaaatactcgccgtcaactagcgcggttgttagaggtgcagaagtctttcctcgcagtttactacggacgcactccatcccctgctgtcctttgtgtctgcgagaaaatggctacgcctcctacctttggcactttcaggggtacgaatactgccacagccataacgtacctttaattaccacttgtagctgtggtaaggagtttgactaccgagtatctgggttaaagggcatttgctgcaaatgcaaggagcctatcaccttaaccagcagggagaacggtcatgaggcagcgtgtactgtttcaaactggcttgctggccatgaatctaaacctctgccaaatcttcctaaaagctaccgatggggtttagttcattggtggatgggtattaaagatagcgagttcgatcacttttcgttcgttcaatttttctcaaactggccaaggtcattccactcgataatcgaagatgaagtagagttcaaccttgagcatgctgttgtcagcacgtctgaattacgactaaaagatcttcttggtcgattgtttttcggttcaattcggttacctgagcggaatcttcaacacaatatcatccttggtgagcttctctgctatttagaaaatcgtttatggcaagacaagggattaatcgccaacctcaaaatgaacgcgttagaggcgactgtaatgttaaattgtagcctcgatcagattgcatcaatggttgaacaacgcatcttgaagccaaatcgaaaaagcaagcccaacagccctcttgatgttaccgattatctatttcatttcggcgatattttctgtctttggttagctgagttccaaagcgatgagtttaaccgttcgttttatgtgtcgaggtggtaaatgcaaactctgaaagaactaatcgcatccaatcctgacgacttaacaactgaacttaagagagcatttcgtccactcacaccgcatattgcaattgatggtaatgaacttgacgcactgacgatattagtcaatttaaccgataagactgatgatcagaaagacctgctcgatcgagccaaatgcaagcaaaaacttcgagatgaaaaatggtgggctagctgcataaattgcgttaattacagacaaagccataacccaaaattcccggatatacgttctgaaggcgtgattcgaacccaagccctgggtgaattaccgagtttcctactctcgtcctcaaaaatcccaccataccattggtcatatagccatgattcaaaatacgtcaacaaaagcgcattcctcaccaatgagttttgttgggatggtgagatctcatgtttgggtgagcttcttaaagatgcagatcacccactttggaatactttgaaaaagttaggttgttctcaaaaaacttgcaaagcaatggcaaaacaactagctgatattactctcacgactatcaatgtcacactcgcaccaaattacctgactcaaatatctctccccgatagtgatacatcctacatttcactctctcctgttgcatcgctatcgatgcaaagccactttcatcagaggctccaagatgaaaatcggcatagcgcgataacgcggtttagccgaactaccaacatgggggtcactgcgatgacatgtggcggcgcatttagaatgttaaagtctggcgctaagttttccagcccccctcatcaccgattaaacagtaaacgaagttggttgacgtcagagcatgttcagtcattaaaacagtaccagcgcctcaacaaaagcctcatacctgaaaactctcggattgcactccgtagaaaatacaaaatcgagcttcaaaatatggtcagatcttggtttgcaatgcaagaccatacccttgattcgaacatacttatccaacatttgaatcatgacctatcttacttaggagccacaaaacgttttgcatacgatccagcgatgaccaagctctttactgagcttttgaaacgagagttatcaaattcaatcaataatggtgagcaacacactaatggatcgtttttagtcctaccgaatatcagggtttgtggcgcaacagctttaagctccccggtaacggtggggattccatcacttacagctttctttggcttcgttcacgcatttgaacggaatataaatcgcaccacctcatcgtttcgtgttgaatcctttgcgatatgcgtccatcaactacatgtcgagaagcgaggtttgacagcagagtttgtggaaaaaggcgacgggactatatccgctcccgcgacccgggatgactggcagtgtgatgtcgtatttagccttattttgaacaccaactttgctcaacatattgaccaagatacgttagttacatcactaccaaagcgattggctcggggttcagcaaaaattgcgattgatgactttaaacatatcaactcattctcgacattagaaacagcgatcgaatctctgccaatagaagctggtaggtggttatcactttacgcacagtcaaacaataatctaagtgatctattagcagccatgacagaggaccatcagctcatggcaagctgcgtcggttaccacttgttagaagagcccaaagataaaccaaactccctcagaggttacaaacacgctatcgccgagtgcatcattggactcattaactcaatcacctttagctcagagactgatcccaacacaatcttttggtcgctaaagaactatcaaaactacctagtggtacagccaaggagtatcaacgatgaaactaccgacaaatctagcctatgagcgctctatcgacccatcagatgtctgtttttttgtcgtctggcccgatgatagaaaaacacctttaacctacaattctcgtactctgctcgggcaaatggaagcggcatcattagcctatgatgtctcaggtcaaccaataaaaagtgccaccgctgaggcgttagctcaagggaaccctcatcaagttgatttctgccacgttccatacggtgcgagtcatattgaatgcagtttctccgtctcgttttcttctgaactacgtcaaccatataagtgtaactcaagcaaagttaaacaaacgctagtgcaattagtcgagctctacgaaacgaaaatcggctggactgagctagcaacccgatatttgatgaacatttgcaacggtaaatggctgtggaaaaatacccgtaaagcctattgctggaacattgtacttacaccttggccttggaacggggaaaaggttggatttgaagatattcgtactaactacacctcacggcaagactttaaaaataataaaaattggtctgctatagttgaaatgatcaaaaccgcattttctagtactgatgggctggcgatatttgaagtcagggccaccttgcacttgccaacgaatgctatggtgcggccaagccaagttttcacagaaaaagaaagtggcagtaaaagtaaatctaaaactcaaaacagtcgagtttttcagagtacaactattgatggtgaacgatcgccaatactaggggcctttaaaacgggagcagctattgcaaccattgacgactggtatcctgaagccactgagccactaagggtcggacggtttggggttcatcgcgaagatgtcacttgctaccgtcatccgtctaccggaaaagattttttctcgatattacaacaagcagagcactatattgaagtgttgagcgccaacaaaactcccgctcaagaaactatcaacgacatgcactttttaatggctaacctgattaagggtgggatgttccagcataaaggagactgactgtgaaatggtattataagacaatcacctttctgccagagttgtgcaacaacgagtcactggctgcaaagtgtctccgcgttctgcatggatttaactatcagtatgagacacgaaatatcggcgtttcatttccgctttggtgtgatgcaacggttggaaaaaagatttcatttgtcagcaagaacaagatagaactcgacttactacttaaacaacactatttcgtccaaatggaacaacttcaatactttcatatatccaacactgttctcgtcccagaagattgtacatacgtttcctttagacgctgtcaatctatagataagctcacagcagcagggctggcaaggaaaatcagacgcctggagaaacgtgctctatctagaggcgagcaatttgacccatcatcttttgctcaaaaagagcatactgcaatagcgcactaccactcacttggggagtccagcaaacagacgaaccgcaactttcgactcaatatcaggatgctctcggagcaaccccgtgaggggaactcgatttttagtagctatggcttatcaaattcagaaaactcgtttcagcctgtacccttaatctgacctttaataaggagatataccatggcgacaagtttacctacgccctcagcaattacgacttcggcgttagagtatgcattccatactcccgctcgcaatctaacgaaatctcgcggaaaaaacattcatcgttatgtcagtgtaaagatgagtaagaggattacggtagaatctactctagagtgtgatgcctgctatcactttgattttgagccaagtattgttcgcttttgcgctcaaccgattcgatttttatattatctcaatggtcagtctcactcctatgttcctgactttctagttcaatttgataccaacgagtttgttctatatgaagtaaagtcagcttatgctaagaacaaacctgattttgatgttgaatgggaggcgaaagtaaaagcagcaactgaactagggctagaattggagcttgttgaagagagtgatattagggatacggttgtattaaataatcttaagcgcatgcatcgttatgcttcgaaagatgagctgaataacgtacataactctctcttaaaaataataaagtacaatggcgcccaatctgcaagatgcttgggagaacagttgggtttaaaaggccgaactgttttaccaattttgtgcgatttgctgtcaaggtgtttactcgatacacgtttggataagcctctatctcttgaatctcgatttgagttggccagttatggctaagaaagggttctcaagtttccatagaaaagcagtctcttcccaagatacgcttgaatcgatagagcttgtctctagcgctaattgtctagaaagtgttacgtatcaagatatatcagcatttcccgaaacaattgcggtagagattaatttccgattaagcattcttcgctttttagcgcgaaagtgcgaaaccattgtggccaaatcaattgaaccacatcgtgtagagctacagcaaaactatagtagaaaaatacccagtgcaataacgatatatcgatggtggcttgcttttcgaaaatcagactacaaccccattagcttagcacctaatatcaaggatagaggtaatagagagacaaaagtgtcaacagttgttgattctattatggaacaggcagttgaaagagttatatctggacgaaaagtcaatgttagctctgcatataaacgtgttcgacgaaaagttcgtcaatacaatctaactcatggaacgaaatacacgtatcctaagtacgaatctgtaagaaagcgagtaaaaaagaaaaccccatttgagttattagccgcagggaaaggggagagagtagctaagagagagtttcgccgaatgggaaaaaagatcctcacgtctagcgtgctagagagggttgaaatagatcacactgtcgttgacctttttgcagtacacgaagagtatcgaatcccattgggccgaccttggcttactcaattggttgattgttacagtaaagctgtaatcggtttttatttaggtttcgagcctcctagctatgtgtcggtttcccttgcacttaagaatgcaatacaacgcaaagatgacttaatctcctcgtatgaatcgatcgagaatgaatggctatgttatggcatcccagacctactcgtaactgataatggtaaagagtttttgtcgaaagcatttgatcaagcatgtgaatcactattgatcaatgtgcatcaaaataaagttgagacgcccgacaacaaacctcatgttgaacgtaactacgggactattaatacttctctgttagacgatttacctgggaaatccttcagccagtaccttcaaagagaagggtacgactctgtgggagaagctacccttacactcaatgagattagagaaatttacttaatttggttggtggatatttatcataaaaaacccaatcagagaggcactaattgtcctaatgttgcgtggaaaaagggttgtcaagaatgggaaccagaggagttctctggttctaaagacgaattagactttaaatttgctattgttgattacaaacaacttactaaagtagggataactgtctacaaagaactgagttatagcaatgaccgtttagctgaatatagagggaagaaaggaaaccataaagttcagttcaagtataaccctgagtgtatggcagttatttgggtgttggatgaggatatgaatgagtactttacagttaatgcgattgactacgaatatgcaagtagagtatcactttggcaacataaatataacatgaaatatcaagcagaactaaattcagcagaatatgatgaggacaaggaaattgatgcagaaataaaaattgaagaaatcgcagatcgttcaattgttaagactaacaaaatcagagctcggaggcgtggcgctaggcatcaagagaatagcgcaagggctaagtcaatcagtaatgcgaacccggcctcgatacaaaaacatgaagatgaaatcgttagtgcagataatgacgattgggatattgattatgtctgagaaatcgtcaaatgagtgaaacgcgtgaggctcgtatatcaagagctaaaagggcatttgtatccacaccgagcgttaggaaaatcttgagttacatggatagatgtagagatctatcagacctagagtctgagcctacatgcatgatggtctatggtgcttcgggtgtaggtaaaacgaccgtcatcaagaaatacttaaatcaaaacagaagagagtccgaagccgggggcgatataataccggttttgcatattgagttgccagacaatgcgaagccagtagatgcagcaagggaattgctggttgaaatgggtgacccgctagcactttatgaaactgacttagctagattgacgaaaagactgactgaattaatccctgcggtcggcgtgaagctgattattatcgatgagttccaacatttggtggaagaaaggtcaaatcgggttcttacccaagtaggtaattggctaaaaatgatacttaacaaaacgaaatgtccaattgttatatttggtatgccatactcaaaagttgtactgcaagcaaactcgcaacttcacgggcgattttccattcaggttgaactgcgcccctttagctaccagggaggtagaggtgtatttaaaacttttttggaataccttgataaagccctaccttttgaaaaacaggctggcttagccaacgaaagtttgcagaaaaaattgtatgcattctctcagggaaacatgcgttcgttgagaaaccttatttatcaagcatctatcgaagcaattgataatcagcatgagacgataaccgaagaagatttcgtttttgcatcgaagttgacatcgggcgataaacccaactcatggaaaaatccttttgaggagggtgttgaggtaacagaagatatgttacgaccgccaccaaaagatattggttgggaggactatttgagacattcaaccccgagagtgagtaaaccaggtagaaataaaaactttttcgaataacctaggctgctgcgctgctgccaccgctgagcaataactagcataaccccttggggcctctaaacgggtcttgaggggttttttgctgaaacctcaggcatttgttgttgatacaaccataaaatgataattacacccataaattgataattatcacacccataaattgatattgcctcttcatggtctaaacttcagtaagtttacgacattttcatgaactcgaggtcatttccggggatccatggagaaaaaaatcactggatataccaccgttgatatatcccaatggcatcgtaaagaacattttgaggcatttcagtcagttgctcaatgtacctataaccagaccgttcagctggatattacggcctttttaaagaccgtaaagaaaaataagcacaagttttatccggcctttattcacattcttgcccgcctgatgaatgctcatccggagttccgtatggcaatgaaagacggtgagctggtgatatgggatagtgttcacccttgttacaccgttttccatgagcaaactgaaacgttttcatcgctctggagtgaataccacgacgatttccggcagtttctacacatatattcgcaagatgtggcgtgttacggtgaaaacctggcctatttccctaaagggtttattgagaatatgtttttcgtctcagccaatccctgggtgagtttcaccagttttgatttaaacgtggccaatatggacaacttcttcgcccccgttttcactatgggcaaatattatacgcaaggcgacaaggtgctgatgccgctggcgattcaggttcatcatgccgtttgtgatggcttccatgtcggcagaatgcttaatgaattacaacagtactgcgatgagtggcagggcggggcgtaatttttttaaggcagttattggtgcccttctagagtccttactgcagtagttttgctgaaatactcgattcacaaaaatatcaacttatggttgttttgtgagatatcaatatatggttgttttgtggttaagttgctgattataaataattattaaatatcactttatggttgcatcaacaggtaccgagctcgaattcactggccgtcgttttacaacgtcgtgactgggaaaaccctggcgttacccaacttaatcgccttgcgtataatactagtagctgcggaatcgacgttttagagctagaaatagcaagttaaaataaggctagtccgttatcaacttgaaaaagtggcaccgagtcggtgctttttttataaaacgaaaggctcagtcgaaagactgggcctttcgttttatccgaatacgggttcttgcatgttacattgtcgatctgttcatggtgaacagctttaaatgcaccaaaaactcgtaaaagctctgatgtatctatcttttttacaccgttttcatctgtgcatatggacagttttccctttgatatctaacggtgaacagttgttctacttttgtttgttagtcttgatgcttcactgatagatacaagagccataagaacctcagatccttccgtatttagccagtatgttctctagtgtggttcgttgtttttgcgtgagccatgagaacgaaccattgagatcatgcttactttgcatgtcactcaaaaattttgcctcaaaactggtgagctgaatttttgcagttaaagcatcgtgtagtgtttttcttagtccgttacgtaggtaggaatctgatgtaatggttgttggtattttgtcaccattcatttttatctggttgttctcaagttcggttacgagatccatttgtctatctagttcaacttggaaaatcaacgtatcagtcgggcggcctcgcttatcaaccaccaatttcatattgctgtaagtgtttaaatctttacttattggtttcaaaacccattggttaagccttttaaactcatggtagttattttcaagcattaacatgaacttaaattcatcaaggctaatctctatatttgccttgtgagttttcttttgtgttagttcttttaataaccactcataaatcctcatagagtatttgttttcaaaagacttaacatgttccagattatattttatgaatttttttaactggaaaagataaggcaatatctcttcactaaaaactaattctaatttttcgcttgagaacttggcatagtttgtccactggaaaatctcaaagcctttaaccaaaggattcctgatttccacagttctcgtcatcagctctctggttgctttagctaatacaccataagcattttccctactgatgttcatcatctgagcgtattggttataagtgaacgataccgtccgttctttccttgtagggttttcaatcgtggggttgagtagtgccacacagcataaaattagcttggtttcatgctccgttaagtcatagcgactaatcgctagttcatttgctttgaaaacaactaattcagacatacatctcaattggtctaggtgattttaatcactataccaattgagatgggctagtcaatgataattactagtccttttcccgggagatctgggtatctgtaaattctgctagacctttgctggaaaacttgtaaattctgctagaccctctgtaaattccgctagacctttgtgtgttttttttgtttatattcaagtggttataatttatagaataaagaaagaataaaaaaagataaaaagaatagatcccagccctgtgtataactcactactttagtcagttccgcagtattacaaaaggatgtcgcaaacgctgtttgctcctctacaaaacagaccttaaaaccctaaaggcttaagtagcaccctcgcaagctcgggcaaatcgctgaatattccttttgtctccgaccatcaggcacctgagtcgctgtctttttcgtgacattcagttcgctgcgctcacggctctggcagtgaatgggggtaaatggcactacaggcgccttttatggattcatgcaaggaaactacccataatacaagaaaagcccgtcacgggcttctcagggcgttttatggcgggtctgctatgtggtgctatctgactttttgctgttcagcagttcctgccctctgattttccagtctgaccacttcggattatcccgtgacaggtcattcagactggctaatgcacccagtaaggcagcggtatcatcaacaggcttacccgtcttactgtccctagtgcttggattctcaccaataaaaaacgcccggcggcaaccgagcgttctgaacaaatccagatggagttctgaggtcattactggatctatcaacag

SEQ ID NO: 877 - DNA, 12940 bp, Synthetic construct
  source 1..12940: mol_type = other DNA
gagtccaagcgagctctcgaaccccagagtcccgctcagaagaactcgtcaagaaggcgatagaaggcgatgcgctgcgaatcgggagcggcgataccgtaaagcacgaggaagcggtcagcccattcgccgccaagctcttcagcaatatcacgggtagccaacgctatgtcctgatagcggtccgccacacccagccggccacagtcgatgaatccagaaaagcggccattttccaccatgatattcggcaagcaggcatcgccatgggtcacgacgagatcctcgccgtcgggcatgcgcgccttgagcctggcgaacagttcggctggcgcgagcccctgatgctcttcgtccagatcatcctgatcgacaagaccggcttccatccgagtacgtgctcgctcgatgcgatgtttcgcttggtggtcgaatgggcaggtagccggatcaagcgtatgcagccgccgcattgcatcagccatgatggatactttctcggcaggagcaaggtgagatgacaggagatcctgccccggcacttcgcccaatagcagccagtcccttcccgcttcagtgacaacgtcgagcacagctgcgcaaggaacgcccgtcgtggccagccacgatagccgcgctgcctcgtcttgcagttcattcagggcaccggacaggtcggtcttgacaaaaagaaccgggcgcccctgcgctgacagccggaacacggcggcatcagagcagccgattgtctgttgtgcccagtcatagccgaatagcctctccacccaagcggccggagaacctgcgtgcaatccatcttgttcaatcatactccttcctttttcaatattattgaagcatttatcagggttattgtctcatgagcggatacatatttgaatgtatttagaaaaataaacaaataggggttccgcgcacatttccccgaaaagtgccacctgacgtctaagaaaccattattatcatgacattaacctataaaaataggcgtatcacgaggcagaatttcagataaaaaaaatccttagctttcgctaaggatgatttctggtggataaccgtattaccgcctttgagtgagctgataccgctcgccgcagccgaacgaccgagcgcagcgagtcagtgagcgaggatttacagctagctcagtcctaggtattatgctagccacgtggagatataccatgggtgaactgccgagtaggtagctgataacagtacagcgcggctgaaatcatcattaaagcggtgaactgccgagtaggtagctgataacggatccgaattcgagcgaaggagatatacatatgtttttgcaaagacctaaaccttacagcgatgaaagtttagaaagtttctttatccgagtggctaacaaaaatggctacggtgatgtccatcgcttcctagaagccactaaacgattccttcaagacattgaccataatggctatcaaacctttccgactgatataactcggataaacccatactcagctaaaaacagttccagcgcacgaactgcgtcattcctgaaacttgcacaattgacatttaatgaaccgccagagctacttgggttggcaattaacagaacaaacatgaaatactcgccgtcaactagcgcggttgttagaggtgcagaagtctttcctcgcagtttactacggacgcactccatcccctgctgtcctttgtgtctgcgagaaaatggctacgcctcctacctttggcactttcaggggtacgaatactgccacagccataacgtacctttaattaccacttgtagctgtggtaaggagtttgactaccgagtatctgggttaaagggcatttgctgcaaatgcaaggagcctatcaccttaaccagcagggagaacggtcatgaggcagcgtgtactgtttcaaactggcttgctggccatgaatctaaacctctgccaaatcttcctaaaagctaccgatggggtttagttcattggtggatgggtattaaagatagcgagttcgatcacttttcgttcgttcaatttttctcaaactggccaaggtcattccactcgataatcgaagatgaagtagagttcaaccttgagcatgctgttgtcagcacgtctgaattacgactaaaagatcttcttggtcgattgtttttcggttcaattcggttacctgagcggaatcttcaacacaatatcatccttggtgagcttctctgctatttagaaaatcgtttatggcaagacaagggattaatcgccaacctcaaaatgaacgcgttagaggcgactgtaatgttaaattgtagcctcgatcagattgcatcaatggttgaacaacgcatcttgaagccaaatcgaaaaagcaagcccaacagccctcttgatgttaccgattatctatttcatttcggcgatattttctgtctttggttagctgagttccaaagcgatgagtttaaccgttcgttttatgtgtcgaggtggtaaatgcaaactctgaaagaactaatcgcatccaatcctgacgacttaacaactgaacttaagagagcatttcgtccactcacaccgcatattgcaattgatggtaatgaacttgacgcactgacgatattagtcaatttaaccgataagactgatgatcagaaagacctgctcgatcgagccaaatgcaagcaaaaacttcgagatgaaaaatggtgggctagctgcataaattgcgttaattacagacaaagccataacccaaaattcccggatatacgttctgaaggcgtgattcgaacccaagccctgggtgaattaccgagtttcctactctcgtcctcaaaaatcccaccataccattggtcatatagccatgattcaaaatacgtcaacaaaagcgcattcctcaccaatgagttttgttgggatggtgagatctcatgtttgggtgagcttcttaaagatgcagatcacccactttggaatactttgaaaaagttaggttgttctcaaaaaacttgcaaagcaatggcaaaacaactagctgatattactctcacgactatcaatgtcacactcgcaccaaattacctgactcaaatatctctccccgatagtgatacatcctacatttcactctctcctgttgcatcgctatcgatgcaaagccactttcatcagaggctccaagatgaaaatcggcatagcgcgataacgcggtttagccgaactaccaacatgggggtcactgcgatgacatgtggcggcgcatttagaatgttaaagtctggcgctaagttttccagcccccctcatcaccgattaaacagtaaacgaagttggttgacgtcagagcatgttcagtcattaaaacagtaccagcgcctcaacaaaagcctcatacctgaaaactctcggattgcactccgtagaaaatacaaaatcgagcttcaaaatatggtcagatcttggtttgcaatgcaagaccatacccttgattcgaacatacttatccaacatttgaatcatgacctatcttacttaggagccacaaaacgttttgcatacgatccagcgatgaccaagctctttactgagcttttgaaacgagagttatcaaattcaatcaataatggtgagcaacacactaatggatcgtttttagtcctaccgaatatcagggtttgtggcgcaacagctttaagctccccggtaacggtggggattccatcacttacagctttctttggcttcgttcacgcatttgaacggaatataaatcgcaccacctcatcgtttcgtgttgaatcctttgcgatatgcgtccatcaactacatgtcgagaagcgaggtttgacagcagagtttgtggaaaaaggcgacgggactatatccgctcccgcgacccgggatgactggcagtgtgatgtcgtatttagccttattttgaacaccaactttgctcaacatattgaccaagatacgttagttacatcactaccaaagcgattggctcggggttcagcaaaaattgcgattgatgactttaaacatatcaactcattctcgacattagaaacagcgatcgaatctctgccaatagaagctggtaggtggttatcactttacgcacagtcaaacaataatctaagtgatctattagcagccatgacagaggaccatcagctcatggcaagctgcgtcggttaccacttgttagaagagcccaaagataaaccaaactccctcagaggttacaaacacgctatcgccgagtgcatcattggactcattaactcaatcacctttagctcagagactgatcccaacacaatcttttggtcgctaaagaactatcaaaactacctagtggtacagccaaggagtatcaacgatgaaactaccgacaaatctagcctatgagcgctctatcgacccatcagatgtctgtttttttgtcgtctggcccgatgatagaaaaacacctttaacctacaattctcgtactctgctcgggcaaatggaagcggcatcattagcctatgatgtctcaggtcaaccaataaaaagtgccaccgctgaggcgttagctcaagggaaccctcatcaagttgatttctgccacgttccatacggtgcgagtcatattgaatgcagtttctccgtctcgttttcttctgaactacgtcaaccatataagtgtaactcaagcaaagttaaacaaacgctagtgcaattagtcgagctctacgaaacgaaaatcggctggactgagctagcaacccgatatttgatgaacatttgcaacggtaaatggctgtggaaaaatacccgtaaagcctattgctggaacattgtacttacaccttggccttggaacggggaaaaggttggatttgaagatattcgtactaactacacctcacggcaagactttaaaaataataaaaattggtctgctatagttgaaatgatcaaaaccgcattttctagtactgatgggctggcgatatttgaagtcagggccaccttgcacttgccaacgaatgctatggtgcggccaagccaagttttcacagaaaaagaaagtggcagtaaaagtaaatctaaaactcaaaacagtcgagtttttcagagtacaactattgatggtgaacgatcgccaatactaggggcctttaaaacgggagcagctattgcaaccattgacgactggtatcctgaagccactgagccactaagggtcggacggtttggggttcatcgcgaagatgtcacttgctaccgtcatccgtctaccggaaaagattttttctcgatattacaacaagcagagcactatattgaagtgttgagcgccaacaaaactcccgctcaagaaactatcaacgacatgcactttttaatggctaacctgattaagggtgggatgttccagcataaaggagactgactgtgaaatggtattataagacaatcacctttctgccagagttgtgcaacaacgagtcactggctgcaaagtgtctccgcgttctgcatggatttaactatcagtatgagacacgaaatatcggcgtttcatttccgctttggtgtgatgcaacggttggaaaaaagatttcatttgtcagcaagaacaagatagaactcgacttactacttaaacaacactatttcgtccaaatggaacaacttcaatactttcatatatccaacactgttctcgtcccagaagattgtacatacgtttcctttagacgctgtcaatctatagataagctcacagcagcagggctggcaaggaaaatcagacgcctggagaaacgtgctctatctagaggcgagcaatttgacccatcatcttttgctcaaaaagagcatactgcaatagcgcactaccactcacttggggagtccagcaaacagacgaaccgcaactttcgactcaatatcaggatgctctcggagcaaccccgtgaggggaactcgatttttagtagctatggcttatcaaattcagaaaactcgtttcagcctgtacccttaatctgacctttaataaggagatataccatggcgacaagtttacctacgccctcagcaattacgacttcggcgttagagtatgcattccatactcccgctcgcaatctaacgaaatctcgcggaaaaaacattcatcgttatgtcagtgtaaagatgagtaagaggattacggtagaatctactctagagtgtgatgcctgctatcactttgattttgagccaagtattgttcgcttttgcgctcaaccgattcgatttttatattatctcaatggtcagtctcactcctatgttcctgactttctagttcaatttgataccaacgagtttgttctatatgaagtaaagtcagcttatgctaagaacaaacctgattttgatgttgaatgggaggcgaaagtaaaagcagcaactgaactagggctagaattggagcttgttgaagagagtgatattagggatacggttgtattaaataatcttaagcgcatgcatcgttatgcttcgaaagatgagctgaataacgtacataactctctcttaaaaataataaagtacaatggcgcccaatctgcaagatgcttgggagaacagttgggtttaaaaggccgaactgttttaccaattttgtgcgatttgctgtcaaggtgtttactcgatacacgtttggataagcctctatctcttgaatctcgatttgagttggccagttatggctaagaaagggttctcaagtttccatagaaaagcagtctcttcccaagatacgcttgaatcgatagagcttgtctctagcgctaattgtctagaaagtgttacgtatcaagatatatcagcatttcccgaaacaattgcggtagagattaatttccgattaagcattcttcgctttttagcgcgaaagtgcgaaaccattgtggccaaatcaattgaaccacatcgtgtagagctacagcaaaactatagtagaaaaatacccagtgcaataacgatatatcgatggtggcttgcttttcgaaaatcagactacaaccccattagcttagcacctaatatcaaggatagaggtaatagagagacaaaagtgtcaacagttgttgattctattatggaacaggcagttgaaagagttatatctggacgaaaagtcaatgttagctctgcatataaacgtgttcgacgaaaagttcgtcaatacaatctaactcatggaacgaaatacacgtatcctaagtacgaatctgtaagaaagcgagtaaaaaagaaaaccccatttgagttattagccgcagggaaaggggagagagtagctaagagagagtttcgccgaatgggaaaaaagatcctcacgtctagcgtgctagagagggttgaaatagatcacactgtcgttgacctttttgcagtacacgaagagtatcgaatcccattgggccgaccttggcttactcaattggttgattgttacagtaaagctgtaatcggtttttatttaggtttcgagcctcctagctatgtgtcggtttcccttgcacttaagaatgcaatacaacgcaaagatgacttaatctcctcgtatgaatcgatcgagaatgaatggctatgttatggcatcccagacctactcgtaactgataatggtaaagagtttttgtcgaaagcatttgatcaagcatgtgaatcactattgatcaatgtgcatcaaaataaagttgagacgcccgacaacaaacctcatgttgaacgtaactacgggactattaatacttctctgttagacgatttacctgggaaatccttcagccagtaccttcaaagagaagggtacgactctgtgggagaagctacccttacactcaatgagattagagaaatttacttaatttggttggtggatatttatcataaaaaacccaatcagagaggcactaattgtcctaatgttgcgtggaaaaagggttgtcaagaatgggaaccagaggagttctctggttctaaagacgaattagactttaaatttgctattgttgattacaaacaacttactaaagtagggataactgtctacaaagaactgagttatagcaatgaccgtttagctgaatatagagggaagaaaggaaaccataaagttcagttcaagtataaccctgagtgtatggcagttatttgggtgttggatgaggatatgaatgagtactttacagttaatgcgattgactacgaatatgcaagtagagtatcactttggcaacataaatataacatgaaatatcaagcagaactaaattcagcagaatatgatgaggacaaggaaattgatgcagaaataaaaattgaagaaatcgcagatcgttcaattgttaagactaacaaaatcagagctcggaggcgtggcgctaggcatcaagagaatagcgcaagggctaagtcaatcagtaatgcgaacccggcctcgatacaaaaacatgaagatgaaatcgttagtgcagataatgacgattgggatattgattatgtctgagaaatcgtcaaatgagtgaaacgcgtgaggctcgtatatcaagagctaaaagggcatttgtatccacaccgagcgttaggaaaatcttgagttacatggatagatgtagagatctatcagacctagagtctgagcctacatgcatgatggtctatggtgcttcgggtgtaggtaaaacgaccgtcatcaagaaatacttaaatcaaaacagaagagagtccgaagccgggggcgatataataccggttttgcatattgagttgccagacaatgcgaagccagtagatgcagcaagggaattgctggttgaaatgggtgacccgctagcactttatgaaactgacttagctagattgacgaaaagactgactgaattaatccctgcggtcggcgtgaagctgattattatcgatgagttccaacatttggtggaagaaaggtcaaatcgggttcttacccaagtaggtaattggctaaaaatgatacttaacaaaacgaaatgtccaattgttatatttggtatgccatactcaaaagttgtactgcaagcaaactcgcaacttcacgggcgattttccattcaggttgaactgcgcccctttagctaccagggaggtagaggtgtatttaaaacttttttggaataccttgataaagccctaccttttgaaaaacaggctggcttagccaacgaaagtttgcagaaaaaattgtatgcattctctcagggaaacatgcgttcgttgagaaaccttatttatcaagcatctatcgaagcaattgataatcagcatgagacgataaccgaagaagatttcgtttttgcatcgaagttgacatcgggcgataaacccaactcatggaaaaatccttttgaggagggtgttgaggtaacagaagatatgttacgaccgccaccaaaagatattggttgggaggactatttgagacattcaaccccgagagtgagtaaaccaggtagaaataaaaactttttcgaataacctaggctgctgcgctgctgccaccgctgagcaataactagcataaccccttggggcctctaaacgggtcttgaggggttttttgctgaaacctcaggcatttgttgttgatacaaccataaaatgataattacacccataaattgataattatcacacccataaattgatattgcctcttcatggtctaaacttcagtaagtttacgacattttcatgaactcgaggtcatttccggggatccatggagaaaaaaatcactggatataccaccgttgatatatcccaatggcatcgtaaagaacattttgaggcatttcagtcagttgctcaatgtacctataaccagaccgttcagctggatattacggcctttttaaagaccgtaaagaaaaataagcacaagttttatccggcctttattcacattcttgcccgcctgatgaatgctcatccggagttccgtatggcaatgaaagacggtgagctggtgatatgggatagtgttcacccttgttacaccgttttccatgagcaaactgaaacgttttcatcgctctggagtgaataccacgacgatttccggcagtttctacacatatattcgcaagatgtggcgtgttacggtgaaaacctggcctatttccctaaagggtttattgagaatatgtttttcgtctcagccaatccctgggtgagtttcaccagttttgatttaaacgtggccaatatggacaacttcttcgcccccgttttcactatgggcaaatattatacgcaaggcgacaaggtgctgatgccgctggcgattcaggttcatcatgccgtttgtgatggcttccatgtcggcagaatgcttaatgaattacaacagtactgcgatgagtggcagggcggggcgtaatttttttaaggcagttattggtgcccttctagagtccttactgcagtagttttgctgaaatactcgattcacaaaaatatcaacttatggttgttttgtgagatatcaatatatggttgttttgtggttaagttgctgattataaataattattaaatatcactttatggttgcatcaacaggtaccgagctcgaattcactggccgtcgttttacaacgtcgtgactgggaaaaccctggcgttacccaacttaatcgccttgcgtataatactagtagctgcggaatcgacgttttagagctagaaatagcaagttaaaataaggctagtccgttatcaacttgaaaaagtggcaccgagtcggtgctttttttataaaacgaaaggctcagtcgaaagactgggcctttcgttttatccgaatacgggttcttgcatgttacattgtcgatctgttcatggtgaacagctttaaatgcaccaaaaactcgtaaaagctctgatgtatctatcttttttacaccgttttcatctgtgcatatggacagttttccctttgatatctaacggtgaacagttgttctacttttgtttgttagtcttgatgcttcactgatagatacaagagccataagaacctcagatccttccgtatttagccagtatgttctctagtgtggttcgttgtttttgcgtgagccatgagaacgaaccattgagatcatgcttactttgcatgtcactcaaaaattttgcctcaaaactggtgagctgaatttttgcagttaaagcatcgtgtagtgtttttcttagtccgttacgtaggtaggaatctgatgtaatggttgttggtattttgtcaccattcatttttatctggttgttctcaagttcggttacgagatccatttgtctatctagttcaacttggaaaatcaacgtatcagtcgggcggcctcgcttatcaaccaccaatttcatattgctgtaagtgtttaaatctttacttattggtttcaaaacccattggttaagccttttaaactcatggtagttattttcaagcattaacatgaacttaaattcatcaaggctaatctctatatttgccttgtgagttttcttttgtgttagttcttttaataaccactcataaatcctcatagagtatttgttttcaaaagacttaacatgttccagattatattttatgaatttttttaactggaaaagataaggcaatatctcttcactaaaaactaattctaatttttcgcttgagaacttggcatagtttgtccactggaaaatctcaaagcctttaaccaaaggattcctgatttccacagttctcgtcatcagctctctggttgctttagctaatacaccataagcattttccctactgatgttcatcatctgagcgtattggttataagtgaacgataccgtccgttctttccttgtagggttttcaatcgtggggttgagtagtgccacacagcataaaattagcttggtttcatgctccgttaagtcatagcgactaatcgctagttcatttgctttgaaaacaactaattcagacatacatctcaattggtctaggtgattttaatcactataccaattgagatgggctagtcaatgataattactagtccttttcccgggagatctgggtatctgtaaattctgctagacctttgctggaaaacttgtaaattctgctagaccctctgtaaattccgctagacctttgtgtgttttttttgtttatattcaagtggttataatttatagaataaagaaagaataaaaaaagataaaaagaatagatcccagccctgtgtataactcactactttagtcagttccgcagtattacaaaaggatgtcgcaaacgctgtttgctcctctacaaaacagaccttaaaaccctaaaggcttaagtagcaccctcgcaagctcgggcaaatcgctgaatattccttttgtctccgaccatcaggcacctgagtcgctgtctttttcgtgacattcagttcgctgcgctcacggctctggcagtgaatgggggtaaatggcactacaggcgccttttatggattcatgcaaggaaactacccataatacaagaaaagcccgtcacgggcttctcagggcgttttatggcgggtctgctatgtggtgctatctgactttttgctgttcagcagttcctgccctctgattttccagtctgaccacttcggattatcccgtgacaggtcattcagactggctaatgcacccagtaaggcagcggtatcatcaacaggcttacccgtcttactgtccctagtgcttggattctcaccaataaaaaacgcccggcggcaaccgagcgttctgaacaaatccagatggagttctgaggtcattactggatctatcaacag

SEQ ID NO: 878 - DNA, 12940 bp, Synthetic construct
  source 1..12940: mol_type = other DNA
gagtccaagcgagctctcgaaccccagagtcccgctcagaagaactcgtcaagaaggcgatagaaggcgatgcgctgcgaatcgggagcggcgataccgtaaagcacgaggaagcggtcagcccattcgccgccaagctcttcagcaatatcacgggtagccaacgctatgtcctgatagcggtccgccacacccagccggccacagtcgatgaatccagaaaagcggccattttccaccatgatattcggcaagcaggcatcgccatgggtcacgacgagatcctcgccgtcgggcatgcgcgccttgagcctggcgaacagttcggctggcgcgagcccctgatgctcttcgtccagatcatcctgatcgacaagaccggcttccatccgagtacgtgctcgctcgatgcgatgtttcgcttggtggtcgaatgggcaggtagccggatcaagcgtatgcagccgccgcattgcatcagccatgatggatactttctcggcaggagcaaggtgagatgacaggagatcctgccccggcacttcgcccaatagcagccagtcccttcccgcttcagtgacaacgtcgagcacagctgcgcaaggaacgcccgtcgtggccagccacgatagccgcgctgcctcgtcttgcagttcattcagggcaccggacaggtcggtcttgacaaaaagaaccgggcgcccctgcgctgacagccggaacacggcggcatcagagcagccgattgtctgttgtgcccagtcatagccgaatagcctctccacccaagcggccggagaacctgcgtgcaatccatcttgttcaatcatactccttcctttttcaatattattgaagcatttatcagggttattgtctcatgagcggatacatatttgaatgtatttagaaaaataaacaaataggggttccgcgcacatttccccgaaaagtgccacctgacgtctaagaaaccattattatcatgacattaacctataaaaataggcgtatcacgaggcagaatttcagataaaaaaaatccttagctttcgctaaggatgatttctggtggataaccgtattaccgcctttgagtgagctgataccgctcgccgcagccgaacgaccgagcgcagcgagtcagtgagcgaggatttacggctagctcagtcctaggtactatgctagccacgtggagatataccatgggtgaactgccgagtaggtagctgataacagtacagcgcggctgaaatcatcattaaagcggtgaactgccgagtaggtagctgataacggatccgaattcgagcgaaggagatatacatatgtttttgcaaagacctaaaccttacagcgatgaaagtttagaaagtttctttatccgagtggctaacaaaaatggctacggtgatgtccatcgcttcctagaagccactaaacgattccttcaagacattgaccataatggctatcaaacctttccgactgatataactcggataaacccatactcagctaaaaacagttccagcgcacgaactgcgtcattcctgaaacttgcacaattgacatttaatgaaccgccagagctacttgggttggcaattaacagaacaaacatgaaatactcgccgtcaactagcgcggttgttagaggtgcagaagtctttcctcgcagtttactacggacgcactccatcccctgctgtcctttgtgtctgcgagaaaatggctacgcctcctacctttggcactttcaggggtacgaatactgccacagccataacgtacctttaattaccacttgtagctgtggtaaggagtttgactaccgagtatctgggttaaagggcatttgctgcaaatgcaaggagcctatcaccttaaccagcagggagaacggtcatgaggcagcgtgtactgtttcaaactggcttgctggccatgaatctaaacctctgccaaatcttcctaaaagctaccgatggggtttagttcattggtggatgggtattaaagatagcgagttcgatcacttttcgttcgttcaatttttctcaaactggccaaggtcattccactcgataatcgaagatgaagtagagttcaaccttgagcatgctgttgtcagcacgtctgaattacgactaaaagatcttcttggtcgattgtttttcggttcaattcggttacctgagcggaatcttcaacacaatatcatccttggtgagcttctctgctatttagaaaatcgtttatggcaagacaagggattaatcgccaacctcaaaatgaacgcgttagaggcgactgtaatgttaaattgtagcctcgatcagattgcatcaatggttgaacaacgcatcttgaagccaaatcgaaaaagcaagcccaacagccctcttgatgttaccgattatctatttcatttcggcgatattttctgtctttggttagctgagttccaaagcgatgagtttaaccgttcgttttatgtgtcgaggtggtaaatgcaaactctgaaagaactaatcgcatccaatcctgacgacttaacaactgaacttaagagagcatttcgtccactcacaccgcatattgcaattgatggtaatgaacttgacgcactgacgatattagtcaatttaaccgataagactgatgatcagaaagacctgctcgatcgagccaaatgcaagcaaaaacttcgagatgaaaaatggtgggctagctgcataaattgcgttaattacagacaaagccataacccaaaattcccggatatacgttctgaaggcgtgattcgaacccaagccctgggtgaattaccgagtttcctactctcgtcctcaaaaatcccaccataccattggtcatatagccatgattcaaaatacgtcaacaaaagcgcattcctcaccaatgagttttgttgggatggtgagatctcatgtttgggtgagcttcttaaagatgcagatcacccactttggaatactttgaaaaagttaggttgttctcaaaaaacttgcaaagcaatggcaaaacaactagctgatattactctcacgactatcaatgtcacactcgcaccaaattacctgactcaaatatctctccccgatagtgatacatcctacatttcactctctcctgttgcatcgctatcgatgcaaagccactttcatcagaggctccaagatgaaaatcggcatagcgcgataacgcggtttagccgaactaccaacatgggggtcactgcgatgacatgtggcggcgcatttagaatgttaaagtctggcgctaagttttccagcccccctcatcaccgattaaacagtaaacgaagttggttgacgtcagagcatgttcagtcattaaaacagtaccagcgcctcaacaaaagcctcatacctgaaaactctcggattgcactccgtagaaaatacaaaatcgagcttcaaaatatggtcagatcttggtttgcaatgcaagaccatacccttgattcgaacatacttatccaacatttgaatcatgacctatcttacttaggagccacaaaacgttttgcatacgatccagcgatgaccaagctctttactgagcttttgaaacgagagttatcaaattcaatcaataatggtgagcaacacactaatggatcgtttttagtcctaccgaatatcagggtttgtggcgcaacagctttaagctccccggtaacggtggggattccatcacttacagctttctttggcttcgttcacgcatttgaacggaatataaatcgcaccacctcatcgtttcgtgttgaatcctttgcgatatgcgtccatcaactacatgtcgagaagcgaggtttgacagcagagtttgtggaaaaaggcgacgggactatatccgctcccgcgacccgggatgactggcagtgtgatgtcgtatttagccttattttgaacaccaactttgctcaacatattgaccaagatacgttagttacatcactaccaaagcgattggctcggggttcagcaaaaattgcgattgatgactttaaacatatcaactcattctcgacattagaaacagcgatcgaatctctgccaatagaagctggtaggtggttatcactttacgcacagtcaaacaataatctaagtgatctattagcagccatgacagaggaccatcagctcatggcaagctgcgtcggttaccacttgttagaagagcccaaagataaaccaaactccctcagaggttacaaacacgctatcgccgagtgcatcattggactcattaactcaatcacctttagctcagagactgatcccaacacaatcttttggtcgctaaagaactatcaaaactacctagtggtacagccaaggagtatcaacgatgaaactaccgacaaatctagcctatgagcgctctatcgacccatcagatgtctgtttttttgtcgtctggcccgatgatagaaaaacacctttaacctacaattctcgtactctgctcgggcaaatggaagcggcatcattagcctatgatgtctcaggtcaaccaataaaaagtgccaccgctgaggcgttagctcaagggaaccctcatcaagttgatttctgccacgttccatacggtgcgagtcatattgaatgcagtttctccgtctcgttttcttctgaactacgtcaaccatataagtgtaactcaagcaaagttaaacaaacgctagtgcaattagtcgagctctacgaaacgaaaatcggctggactgagctagcaacccgatatttgatgaacatttgcaacggtaaatggctgtggaaaaatacccgtaaagcctattgctggaacattgtacttacaccttggccttggaacggggaaaaggttggatttgaagatattcgtactaactacacctcacggcaagactttaaaaataataaaaattggtctgctatagttgaaatgatcaaaaccgcattttctagtactgatgggctggcgatatttgaagtcagggccaccttgcacttgccaacgaatgctatggtgcggccaagccaagttttcacagaaaaagaaagtggcagtaaaagtaaatctaaaactcaaaacagtcgagtttttcagagtacaactattgatggtgaacgatcgccaatactaggggcctttaaaacgggagcagctattgcaaccattgacgactggtatcctgaagccactgagccactaagggtcggacggtttggggttcatcgcgaagatgtcacttgctaccgtcatccgtctaccggaaaagattttttctcgatattacaacaagcagagcactatattgaagtgttgagcgccaacaaaactcccgctcaagaaactatcaacgacatgcactttttaatggctaacctgattaagggtgggatgttccagcataaaggagactgactgtgaaatggtattataagacaatcacctttctgccagagttgtgcaacaacgagtcactggctgcaaagtgtctccgcgttctgcatggatttaactatcagtatgagacacgaaatatcggcgtttcatttccgctttggtgtgatgcaacggttggaaaaaagatttcatttgtcagcaagaacaagatagaactcgacttactacttaaacaacactatttcgtccaaatggaacaacttcaatactttcatatatccaacactgttctcgtcccagaagattgtacatacgtttcctttagacgctgtcaatctatagataagctcacagcagcagggctggcaaggaaaatcagacgcctggagaaacgtgctctatctagaggcgagcaatttgacccatcatcttttgctcaaaaagagcatactgcaatagcgcactaccactcacttggggagtccagcaaacagacgaaccgcaactttcgactcaatatcaggatgctctcggagcaaccccgtgaggggaactcgatttttagtagctatggcttatcaaattcagaaaactcgtttcagcctgtacccttaatctgacctttaataaggagatataccatggcgacaagtttacctacgccctcagcaattacgacttcggcgttagagtatgcattccatactcccgctcgcaatctaacgaaatctcgcggaaaaaacattcatcgttatgtcagtgtaaagatgagtaagaggattacggtagaatctactctagagtgtgatgcctgctatcactttgattttgagccaagtattgttcgcttttgcgctcaaccgattcgatttttatattatctcaatggtcagtctcactcctatgttcctgactttctagttcaatttgataccaacgagtttgttctatatgaagtaaagtcagcttatgctaagaacaaacctgattttgatgttgaatgggaggcgaaagtaaaagcagcaactgaactagggctagaattggagcttgttgaagagagtgatattagggatacggttgtattaaataatcttaagcgcatgcatcgttatgcttcgaaagatgagctgaataacgtacataactctctcttaaaaataataaagtacaatggcgcccaatctgcaagatgcttgggagaacagttgggtttaaaaggccgaactgttttaccaattttgtgcgatttgctgtcaaggtgtttactcgatacacgtttggataagcctctatctcttgaatctcgatttgagttggccagttatggctaagaaagggttctcaagtttccatagaaaagcagtctcttcccaagatacgcttgaatcgatagagcttgtctctagcgctaattgtctagaaagtgttacgtatcaagatatatcagcatttcccgaaacaattgcggtagagattaatttccgattaagcattcttcgctttttagcgcgaaagtgcgaaaccattgtggccaaatcaattgaaccacatcgtgtagagctacagcaaaactatagtagaaaaatacccagtgcaataacgatatatcgatggtggcttgcttttcgaaaatcagactacaaccccattagcttagcacctaatatcaaggatagaggtaatagagagacaaaagtgtcaacagttgttgattctattatggaacaggcagttgaaagagttatatctggacgaaaagtcaatgttagctctgcatataaacgtgttcgacgaaaagttcgtcaatacaatctaactcatggaacgaaatacacgtatcctaagtacgaatctgtaagaaagcgagtaaaaaagaaaaccccatttgagttattagccgcagggaaaggggagagagtagctaagagagagtttcgccgaatgggaaaaaagatcctcacgtctagcgtgctagagagggttgaaatagatcacactgtcgttgacctttttgcagtacacgaagagtatcgaatcccattgggccgaccttggcttactcaattggttgattgttacagtaaagctgtaatcggtttttatttaggtttcgagcctcctagctatgtgtcggtttcccttgcacttaagaatgcaatacaacgcaaagatgacttaatctcctcgtatgaatcgatcgagaatgaatggctatgttatggcatcccagacctactcgtaactgataatggtaaagagtttttgtcgaaagcatttgatcaagcatgtgaatcactattgatcaatgtgcatcaaaataaagttgagacgcccgacaacaaacctcatgttgaacgtaactacgggactattaatacttctctgttagacgatttacctgggaaatccttcagccagtaccttcaaagagaagggtacgactctgtgggagaagctacccttacactcaatgagattagagaaatttacttaatttggttggtggatatttatcataaaaaacccaatcagagaggcactaattgtcctaatgttgcgtggaaaaagggttgtcaagaatgggaaccagaggagttctctggttctaaagacgaattagactttaaatttgctattgttgattacaaacaacttactaaagtagggataactgtctacaaagaactgagttatagcaatgaccgtttagctgaatatagagggaagaaaggaaaccataaagttcagttcaagtataaccctgagtgtatggcagttatttgggtgttggatgaggatatgaatgagtactttacagttaatgcgattgactacgaatatgcaagtagagtatcactttggcaacataaatataacatgaaatatcaagcagaactaaattcagcagaatatgatgaggacaaggaaattgatgcagaaataaaaattgaagaaatcgcagatcgttcaattgttaagactaacaaaatcagagctcggaggcgtggcgctaggcatcaagagaatagcgcaagggctaagtcaatcagtaatgcgaacccggcctcgatacaaaaacatgaagatgaaatcgttagtgcagataatgacgattgggatattgattatgtctgagaaatcgtcaaatgagtgaaacgcgtgaggctcgtatatcaagagctaaaagggcatttgtatccacaccgagcgttaggaaaatcttgagttacatggatagatgtagagatctatcagacctagagtctgagcctacatgcatgatggtctatggtgcttcgggtgtaggtaaaacgaccgtcatcaagaaatacttaaatcaaaacagaagagagtccgaagccgggggcgatataataccggttttgcatattgagttgccagacaatgcgaagccagtagatgcagcaagggaattgctggttgaaatgggtgacccgctagcactttatgaaactgacttagctagattgacgaaaagactgactgaattaatccctgcggtcggcgtgaagctgattattatcgatgagttccaacatttggtggaagaaaggtcaaatcgggttcttacccaagtaggtaattggctaaaaatgatacttaacaaaacgaaatgtccaattgttatatttggtatgccatactcaaaagttgtactgcaagcaaactcgcaacttcacgggcgattttccattcaggttgaactgcgcccctttagctaccagggaggtagaggtgtatttaaaacttttttggaataccttgataaagccctaccttttgaaaaacaggctggcttagccaacgaaagtttgcagaaaaaattgtatgcattctctcagggaaacatgcgttcgttgagaaaccttatttatcaagcatctatcgaagcaattgataatcagcatgagacgataaccgaagaagatttcgtttttgcatcgaagttgacatcgggcgataaacccaactcatggaaaaatccttttgaggagggtgttgaggtaacagaagatatgttacgaccgccaccaaaagatattggttgggaggactatttgagacattcaaccccgagagtgagtaaaccaggtagaaataaaaactttttcgaataacctaggctgctgcgctgctgccaccgctgagcaataactagcataaccccttggggcctctaaacgggtcttgaggggttttttgctgaaacctcaggcatttgttgttgatacaaccataaaatgataattacacccataaattgataattatcacacccataaattgatattgcctcttcatggtctaaacttcagtaagtttacgacattttcatgaactcgaggtcatttccggggatccatggagaaaaaaatcactggatataccaccgttgatatatcccaatggcatcgtaaagaacattttgaggcatttcagtcagttgctcaatgtacctataaccagaccgttcagctggatattacggcctttttaaagaccgtaaagaaaaataagcacaagttttatccggcctttattcacattcttgcccgcctgatgaatgctcatccggagttccgtatggcaatgaaagacggtgagctggtgatatgggatagtgttcacccttgttacaccgttttccatgagcaaactgaaacgttttcatcgctctggagtgaataccacgacgatttccggcagtttctacacatatattcgcaagatgtggcgtgttacggtgaaaacctggcctatttccctaaagggtttattgagaatatgtttttcgtctcagccaatccctgggtgagtttcaccagttttgatttaaacgtggccaatatggacaacttcttcgcccccgttttcactatgggcaaatattatacgcaaggcgacaaggtgctgatgccgctggcgattcaggttcatcatgccgtttgtgatggcttccatgtcggcagaatgcttaatgaattacaacagtactgcgatgagtggcagggcggggcgtaatttttttaaggcagttattggtgcccttctagagtccttactgcagtagttttgctgaaatactcgattcacaaaaatatcaacttatggttgttttgtgagatatcaatatatggttgttttgtggttaagttgctgattataaataattattaaatatcactttatggttgcatcaacaggtaccgagctcgaattcactggccgtcgttttacaacgtcgtgactgggaaaaccctggcgttacccaacttaatcgccttgcgtataatactagtagctgcggaatcgacgttttagagctagaaatagcaagttaaaataaggctagtccgttatcaacttgaaaaagtggcaccgagtcggtgctttttttataaaacgaaaggctcagtcgaaagactgggcctttcgttttatccgaatacgggttcttgcatgttacattgtcgatctgttcatggtgaacagctttaaatgcaccaaaaactcgtaaaagctctgatgtatctatcttttttacaccgttttcatctgtgcatatggacagttttccctttgatatctaacggtgaacagttgttctacttttgtttgttagtcttgatgcttcactgatagatacaagagccataagaacctcagatccttccgtatttagccagtatgttctctagtgtggttcgttgtttttgcgtgagccatgagaacgaaccattgagatcatgcttactttgcatgtcactcaaaaattttgcctcaaaactggtgagctgaatttttgcagttaaagcatcgtgtagtgtttttcttagtccgttacgtaggtaggaatctgatgtaatggttgttggtattttgtcaccattcatttttatctggttgttctcaagttcggttacgagatccatttgtctatctagttcaacttggaaaatcaacgtatcagtcgggcggcctcgcttatcaaccaccaatttcatattgctgtaagtgtttaaatctttacttattggtttcaaaacccattggttaagccttttaaactcatggtagttattttcaagcattaacatgaacttaaattcatcaaggctaatctctatatttgccttgtgagttttcttttgtgttagttcttttaataaccactcataaatcctcatagagtatttgttttcaaaagacttaacatgttccagattatattttatgaatttttttaactggaaaagataaggcaatatctcttcactaaaaactaattctaatttttcgcttgagaacttggcatagtttgtccactggaaaatctcaaagcctttaaccaaaggattcctgatttccacagttctcgtcatcagctctctggttgctttagctaatacaccataagcattttccctactgatgttcatcatctgagcgtattggttataagtgaacgataccgtccgttctttccttgtagggttttcaatcgtggggttgagtagtgccacacagcataaaattagcttggtttcatgctccgttaagtcatagcgactaatcgctagttcatttgctttgaaaacaactaattcagacatacatctcaattggtctaggtgattttaatcactataccaattgagatgggctagtcaatgataattactagtccttttcccgggagatctgggtatctgtaaattctgctagacctttgctggaaaacttgtaaattctgctagaccctctgtaaattccgctagacctttgtgtgttttttttgtttatattcaagtggttataatttatagaataaagaaagaataaaaaaagataaaaagaatagatcccagccctgtgtataactcactactttagtcagttccgcagtattacaaaaggatgtcgcaaacgctgtttgctcctctacaaaacagaccttaaaaccctaaaggcttaagtagcaccctcgcaagctcgggcaaatcgctgaatattccttttgtctccgaccatcaggcacctgagtcgctgtctttttcgtgacattcagttcgctgcgctcacggctctggcagtgaatgggggtaaatggcactacaggcgccttttatggattcatgcaaggaaactacccataatacaagaaaagcccgtcacgggcttctcagggcgttttatggcgggtctgctatgtggtgctatctgactttttgctgttcagcagttcctgccctctgattttccagtctgaccacttcggattatcccgtgacaggtcattcagactggctaatgcacccagtaaggcagcggtatcatcaacaggcttacccgtcttactgtccctagtgcttggattctcaccaataaaaaacgcccggcggcaaccgagcgttctgaacaaatccagatggagttctgaggtcattactggatctatcaacag

SEQ ID NO: 879 - DNA, 12940 bp, Synthetic construct
  source 1..12940: mol_type = other DNA
gagtccaagcgagctctcgaaccccagagtcccgctcagaagaactcgtcaagaaggcgatagaaggcgatgcgctgcgaatcgggagcggcgataccgtaaagcacgaggaagcggtcagcccattcgccgccaagctcttcagcaatatcacgggtagccaacgctatgtcctgatagcggtccgccacacccagccggccacagtcgatgaatccagaaaagcggccattttccaccatgatattcggcaagcaggcatcgccatgggtcacgacgagatcctcgccgtcgggcatgcgcgccttgagcctggcgaacagttcggctggcgcgagcccctgatgctcttcgtccagatcatcctgatcgacaagaccggcttccatccgagtacgtgctcgctcgatgcgatgtttcgcttggtggtcgaatgggcaggtagccggatcaagcgtatgcagccgccgcattgcatcagccatgatggatactttctcggcaggagcaaggtgagatgacaggagatcctgccccggcacttcgcccaatagcagccagtcccttcccgcttcagtgacaacgtcgagcacagctgcgcaaggaacgcccgtcgtggccagccacgatagccgcgctgcctcgtcttgcagttcattcagggcaccggacaggtcggtcttgacaaaaagaaccgggcgcccctgcgctgacagccggaacacggcggcatcagagcagccgattgtctgttgtgcccagtcatagccgaatagcctctccacccaagcggccggagaacctgcgtgcaatccatcttgttcaatcatactccttcctttttcaatattattgaagcatttatcagggttattgtctcatgagcggatacatatttgaatgtatttagaaaaataaacaaataggggttccgcgcacatttccccgaaaagtgccacctgacgtctaagaaaccattattatcatgacattaacctataaaaataggcgtatcacgaggcagaatttcagataaaaaaaatccttagctttcgctaaggatgatttctggtggataaccgtattaccgcctttgagtgagctgataccgctcgccgcagccgaacgaccgagcgcagcgagtcagtgagcgaggatttatggctagctcagtcctaggtacaatgctagccacgtggagatataccatgggtgaactgccgagtaggtagctgataacagtacagcgcggctgaaatcatcattaaagcggtgaactgccgagtaggtagctgataacggatccgaattcgagcgaaggagatatacatatgtttttgcaaagacctaaaccttacagcgatgaaagtttagaaagtttctttatccgagtggctaacaaaaatggctacggtgatgtccatcgcttcctagaagccactaaacgattccttcaagacattgaccataatggctatcaaacctttccgactgatataactcggataaacccatactcagctaaaaacagttccagcgcacgaactgcgtcattcctgaaacttgcacaattgacatttaatgaaccgccagagctacttgggttggcaattaacagaacaaacatgaaatactcgccgtcaactagcgcggttgttagaggtgcagaagtctttcctcgcagtttactacggacgcactccatcccctgctgtcctttgtgtctgcgagaaaatggctacgcctcctacctttggcactttcaggggtacgaatactgccacagccataacgtacctttaattaccacttgtagctgtggtaaggagtttgactaccgagtatctgggttaaagggcatttgctgcaaatgcaaggagcctatcaccttaaccagcagggagaacggtcatgaggcagcgtgtactgtttcaaactggcttgctggccatgaatctaaacctctgccaaatcttcctaaaagctaccgatggggtttagttcattggtggatgggtattaaagatagcgagttcgatcacttttcgttcgttcaatttttctcaaactggccaaggtcattccactcgataatcgaagatgaagtagagttcaaccttgagcatgctgttgtcagcacgtctgaattacgactaaaagatcttcttggtcgattgtttttcggttcaattcggttacctgagcggaatcttcaacacaatatcatccttggtgagcttctctgctatttagaaaatcgtttatggcaagacaagggattaatcgccaacctcaaaatgaacgcgttagaggcgactgtaatgttaaattgtagcctcgatcagattgcatcaatggttgaacaacgcatcttgaagccaaatcgaaaaagcaagcccaacagccctcttgatgttaccgattatctatttcatttcggcgatattttctgtctttggttagctgagttccaaagcgatgagtttaaccgttcgttttatgtgtcgaggtggtaaatgcaaactctgaaagaactaatcgcatccaatcctgacgacttaacaactgaacttaagagagcatttcgtccactcacaccgcatattgcaattgatggtaatgaacttgacgcactgacgatattagtcaatttaaccgataagactgatgatcagaaagacctgctcgatcgagccaaatgcaagcaaaaacttcgagatgaaaaatggtgggctagctgcataaattgcgttaattacagacaaagccataacccaaaattcccggatatacgttctgaaggcgtgattcgaacccaagccctgggtgaattaccgagtttcctactctcgtcctcaaaaatcccaccataccattggtcatatagccatgattcaaaatacgtcaacaaaagcgcattcctcaccaatgagttttgttgggatggtgagatctcatgtttgggtgagcttcttaaagatgcagatcacccactttggaatactttgaaaaagttaggttgttctcaaaaaacttgcaaagcaatggcaaaacaactagctgatattactctcacgactatcaatgtcacactcgcaccaaattacctgactcaaatatctctccccgatagtgatacatcctacatttcactctctcctgttgcatcgctatcgatgcaaagccactttcatcagaggctccaagatgaaaatcggcatagcgcgataacgcggtttagccgaactaccaacatgggggtcactgcgatgacatgtggcggcgcatttagaatgttaaagtctggcgctaagttttccagcccccctcatcaccgattaaacagtaaacgaagttggttgacgtcagagcatgttcagtcattaaaacagtaccagcgcctcaacaaaagcctcatacctgaaaactctcggattgcactccgtagaaaatacaaaatcgagcttcaaaatatggtcagatcttggtttgcaatgcaagaccatacccttgattcgaacatacttatccaacatttgaatcatgacctatcttacttaggagccacaaaacgttttgcatacgatccagcgatgaccaagctctttactgagcttttgaaacgagagttatcaaattcaatcaataatggtgagcaacacactaatggatcgtttttagtcctaccgaatatcagggtttgtggcgcaacagctttaagctccccggtaacggtggggattccatcacttacagctttctttggcttcgttcacgcatttgaacggaatataaatcgcaccacctcatcgtttcgtgttgaatcctttgcgatatgcgtccatcaactacatgtcgagaagcgaggtttgacagcagagtttgtggaaaaaggcgacgggactatatccgctcccgcgacccgggatgactggcagtgtgatgtcgtatttagccttattttgaacaccaactttgctcaacatattgaccaagatacgttagttacatcactaccaaagcgattggctcggggttcagcaaaaattgcgattgatgactttaaacatatcaactcattctcgacattagaaacagcgatcgaatctctgccaatagaagctggtaggtggttatcactttacgcacagtcaaacaataatctaagtgatctattagcagccatgacagaggaccatcagctcatggcaagctgcgtcggttaccacttgttagaagagcccaaagataaaccaaactccctcagaggttacaaacacgctatcgccgagtgcatcattggactcattaactcaatcacctttagctcagagactgatcccaacacaatcttttggtcgctaaagaactatcaaaactacctagtggtacagccaaggagtatcaacgatgaaactaccgacaaatctagcctatgagcgctctatcgacccatcagatgtctgtttttttgtcgtctggcccgatgatagaaaaacacctttaacctacaattctcgtactctgctcgggcaaatggaagcggcatcattagcctatgatgtctcaggtcaaccaataaaaagtgccaccgctgaggcgttagctcaagggaaccctcatcaagttgatttctgccacgttccatacggtgcgagtcatattgaatgcagtttctccgtctcgttttcttctgaactacgtcaaccatataagtgtaactcaagcaaagttaaacaaacgctagtgcaattagtcgagctctacgaaacgaaaatcggctggactgagctagcaacccgatatttgatgaacatttgcaacggtaaatggctgtggaaaaatacccgtaaagcctattgctggaacattgtacttacaccttggccttggaacggggaaaaggttggatttgaagatattcgtactaactacacctcacggcaagactttaaaaataataaaaattggtctgctatagttgaaatgatcaaaaccgcattttctagtactgatgggctggcgatatttgaagtcagggccaccttgcacttgccaacgaatgctatggtgcggccaagccaagttttcacagaaaaagaaagtggcagtaaaagtaaatctaaaactcaaaacagtcgagtttttcagagtacaactattgatggtgaacgatcgccaatactaggggcctttaaaacgggagcagctattgcaaccattgacgactggtatcctgaagccactgagccactaagggtcggacggtttggggttcatcgcgaagatgtcacttgctaccgtcatccgtctaccggaaaagattttttctcgatattacaacaagcagagcactatattgaagtgttgagcgccaacaaaactcccgctcaagaaactatcaacgacatgcactttttaatggctaacctgattaagggtgggatgttccagcataaaggagactgactgtgaaatggtattataagacaatcacctttctgccagagttgtgcaacaacgagtcactggctgcaaagtgtctccgcgttctgcatggatttaactatcagtatgagacacgaaatatcggcgtttcatttccgctttggtgtgatgcaacggttggaaaaaagatttcatttgtcagcaagaacaagatagaactcgacttactacttaaacaacactatttcgtccaaatggaacaacttcaatactttcatatatccaacactgttctcgtcccagaagattgtacatacgtttcctttagacgctgtcaatctatagataagctcacagcagcagggctggcaaggaaaatcagacgcctggagaaacgtgctctatctagaggcgagcaatttgacccatcatcttttgctcaaaaagagcatactgcaatagcgcactaccactcacttggggagtccagcaaacagacgaaccgcaactttcgactcaatatcaggatgctctcggagcaaccccgtgaggggaactcgatttttagtagctatggcttatcaaattcagaaaactcgtttcagcctgtacccttaatctgacctttaataaggagatataccatggcgacaagtttacctacgccctcagcaattacgacttcggcgttagagtatgcattccatactcccgctcgcaatctaacgaaatctcgcggaaaaaacattcatcgttatgtcagtgtaaagatgagtaagaggattacggtagaatctactctagagtgtgatgcctgctatcactttgattttgagccaagtattgttcgcttttgcgctcaaccgattcgatttttatattatctcaatggtcagtctcactcctatgttcctgactttctagttcaatttgataccaacgagtttgttctatatgaagtaaagtcagcttatgctaagaacaaacctgattttgatgttgaatgggaggcgaaagtaaaagcagcaactgaactagggctagaattggagcttgttgaagagagtgatattagggatacggttgtattaaataatcttaagcgcatgcatcgttatgcttcgaaagatgagctgaataacgtacataactctctcttaaaaataataaagtacaatggcgcccaatctgcaagatgcttgggagaacagttgggtttaaaaggccgaactgttttaccaattttgtgcgatttgctgtcaaggtgtttactcgatacacgtttggataagcctctatctcttgaatctcgatttgagttggccagttatggctaagaaagggttctcaagtttccatagaaaagcagtctcttcccaagatacgcttgaatcgatagagcttgtctctagcgctaattgtctagaaagtgttacgtatcaagatatatcagcatttcccgaaacaattgcggtagagattaatttccgattaagcattcttcgctttttagcgcgaaagtgcgaaaccattgtggccaaatcaattgaaccacatcgtgtagagctacagcaaaactatagtagaaaaatacccagtgcaataacgatatatcgatggtggcttgcttttcgaaaatcagactacaaccccattagcttagcacctaatatcaaggatagaggtaatagagagacaaaagtgtcaacagttgttgattctattatggaacaggcagttgaaagagttatatctggacgaaaagtcaatgttagctctgcatataaacgtgttcgacgaaaagttcgtcaatacaatctaactcatggaacgaaatacacgtatcctaagtacgaatctgtaagaaagcgagtaaaaaagaaaaccccatttgagttattagccgcagggaaaggggagagagtagctaagagagagtttcgccgaatgggaaaaaagatcctcacgtctagcgtgctagagagggttgaaatagatcacactgtcgttgacctttttgcagtacacgaagagtatcgaatcccattgggccgaccttggcttactcaattggttgattgttacagtaaagctgtaatcggtttttatttaggtttcgagcctcctagctatgtgtcggtttcccttgcacttaagaatgcaatacaacgcaaagatgacttaatctcctcgtatgaatcgatcgagaatgaatggctatgttatggcatcccagacctactcgtaactgataatggtaaagagtttttgtcgaaagcatttgatcaagcatgtgaatcactattgatcaatgtgcatcaaaataaagttgagacgcccgacaacaaacctcatgttgaacgtaactacgggactattaatacttctctgttagacgatttacctgggaaatccttcagccagtaccttcaaagagaagggtacgactctgtgggagaagctacccttacactcaatgagattagagaaatttacttaatttggttggtggatatttatcataaaaaacccaatcagagaggcactaattgtcctaatgttgcgtggaaaaagggttgtcaagaatgggaaccagaggagttctctggttctaaagacgaattagactttaaatttgctattgttgattacaaacaacttactaaagtagggataactgtctacaaagaactgagttatagcaatgaccgtttagctgaatatagagggaagaaaggaaaccataaagttcagttcaagtataaccctgagtgtatggcagttatttgggtgttggatgaggatatgaatgagtactttacagttaatgcgattgactacgaatatgcaagtagagtatcactttggcaacataaatataacatgaaatatcaagcagaactaaattcagcagaatatgatgaggacaaggaaattgatgcagaaataaaaattgaagaaatcgcagatcgttcaattgttaagactaacaaaatcagagctcggaggcgtggcgctaggcatcaagagaatagcgcaagggctaagtcaatcagtaatgcgaacccggcctcgatacaaaaacatgaagatgaaatcgttagtgcagataatgacgattgggatattgattatgtctgagaaatcgtcaaatgagtgaaacgcgtgaggctcgtatatcaagagctaaaagggcatttgtatccacaccgagcgttaggaaaatcttgagttacatggatagatgtagagatctatcagacctagagtctgagcctacatgcatgatggtctatggtgcttcgggtgtaggtaaaacgaccgtcatcaagaaatacttaaatcaaaacagaagagagtccgaagccgggggcgatataataccggttttgcatattgagttgccagacaatgcgaagccagtagatgcagcaagggaattgctggttgaaatgggtgacccgctagcactttatgaaactgacttagctagattgacgaaaagactgactgaattaatccctgcggtcggcgtgaagctgattattatcgatgagttccaacatttggtggaagaaaggtcaaatcgggttcttacccaagtaggtaattggctaaaaatgatacttaacaaaacgaaatgtccaattgttatatttggtatgccatactcaaaagttgtactgcaagcaaactcgcaacttcacgggcgattttccattcaggttgaactgcgcccctttagctaccagggaggtagaggtgtatttaaaacttttttggaataccttgataaagccctaccttttgaaaaacaggctggcttagccaacgaaagtttgcagaaaaaattgtatgcattctctcagggaaacatgcgttcgttgagaaaccttatttatcaagcatctatcgaagcaattgataatcagcatgagacgataaccgaagaagatttcgtttttgcatcgaagttgacatcgggcgataaacccaactcatggaaaaatccttttgaggagggtgttgaggtaacagaagatatgttacgaccgccaccaaaagatattggttgggaggactatttgagacattcaaccccgagagtgagtaaaccaggtagaaataaaaactttttcgaataacctaggctgctgcgctgctgccaccgctgagcaataactagcataaccccttggggcctctaaacgggtcttgaggggttttttgctgaaacctcaggcatttgttgttgatacaaccataaaatgataattacacccataaattgataattatcacacccataaattgatattgcctcttcatggtctaaacttcagtaagtttacgacattttcatgaactcgaggtcatttccggggatccatggagaaaaaaatcactggatataccaccgttgatatatcccaatggcatcgtaaagaacattttgaggcatttcagtcagttgctcaatgtacctataaccagaccgttcagctggatattacggcctttttaaagaccgtaaagaaaaataagcacaagttttatccggcctttattcacattcttgcccgcctgatgaatgctcatccggagttccgtatggcaatgaaagacggtgagctggtgatatgggatagtgttcacccttgttacaccgttttccatgagcaaactgaaacgttttcatcgctctggagtgaataccacgacgatttccggcagtttctacacatatattcgcaagatgtggcgtgttacggtgaaaacctggcctatttccctaaagggtttattgagaatatgtttttcgtctcagccaatccctgggtgagtttcaccagttttgatttaaacgtggccaatatggacaacttcttcgcccccgttttcactatgggcaaatattatacgcaaggcgacaaggtgctgatgccgctggcgattcaggttcatcatgccgtttgtgatggcttccatgtcggcagaatgcttaatgaattacaacagtactgcgatgagtggcagggcggggcgtaatttttttaaggcagttattggtgcccttctagagtccttactgcagtagttttgctgaaatactcgattcacaaaaatatcaacttatggttgttttgtgagatatcaatatatggttgttttgtggttaagttgctgattataaataattattaaatatcactttatggttgcatcaacaggtaccgagctcgaattcactggccgtcgttttacaacgtcgtgactgggaaaaccctggcgttacccaacttaatcgccttgcgtataatactagtagctgcggaatcgacgttttagagctagaaatagcaagttaaaataaggctagtccgttatcaacttgaaaaagtggcaccgagtcggtgctttttttataaaacgaaaggctcagtcgaaagactgggcctttcgttttatccgaatacgggttcttgcatgttacattgtcgatctgttcatggtgaacagctttaaatgcaccaaaaactcgtaaaagctctgatgtatctatcttttttacaccgttttcatctgtgcatatggacagttttccctttgatatctaacggtgaacagttgttctacttttgtttgttagtcttgatgcttcactgatagatacaagagccataagaacctcagatccttccgtatttagccagtatgttctctagtgtggttcgttgtttttgcgtgagccatgagaacgaaccattgagatcatgcttactttgcatgtcactcaaaaattttgcctcaaaactggtgagctgaatttttgcagttaaagcatcgtgtagtgtttttcttagtccgttacgtaggtaggaatctgatgtaatggttgttggtattttgtcaccattcatttttatctggttgttctcaagttcggttacgagatccatttgtctatctagttcaacttggaaaatcaacgtatcagtcgggcggcctcgcttatcaaccaccaatttcatattgctgtaagtgtttaaatctttacttattggtttcaaaacccattggttaagccttttaaactcatggtagttattttcaagcattaacatgaacttaaattcatcaaggctaatctctatatttgccttgtgagttttcttttgtgttagttcttttaataaccactcataaatcctcatagagtatttgttttcaaaagacttaacatgttccagattatattttatgaatttttttaactggaaaagataaggcaatatctcttcactaaaaactaattctaatttttcgcttgagaacttggcatagtttgtccactggaaaatctcaaagcctttaaccaaaggattcctgatttccacagttctcgtcatcagctctctggttgctttagctaatacaccataagcattttccctactgatgttcatcatctgagcgtattggttataagtgaacgataccgtccgttctttccttgtagggttttcaatcgtggggttgagtagtgccacacagcataaaattagcttggtttcatgctccgttaagtcatagcgactaatcgctagttcatttgctttgaaaacaactaattcagacatacatctcaattggtctaggtgattttaatcactataccaattgagatgggctagtcaatgataattactagtccttttcccgggagatctgggtatctgtaaattctgctagacctttgctggaaaacttgtaaattctgctagaccctctgtaaattccgctagacctttgtgtgttttttttgtttatattcaagtggttataatttatagaataaagaaagaataaaaaaagataaaaagaatagatcccagccctgtgtataactcactactttagtcagttccgcagtattacaaaaggatgtcgcaaacgctgtttgctcctctacaaaacagaccttaaaaccctaaaggcttaagtagcaccctcgcaagctcgggcaaatcgctgaatattccttttgtctccgaccatcaggcacctgagtcgctgtctttttcgtgacattcagttcgctgcgctcacggctctggcagtgaatgggggtaaatggcactacaggcgccttttatggattcatgcaaggaaactacccataatacaagaaaagcccgtcacgggcttctcagggcgttttatggcgggtctgctatgtggtgctatctgactttttgctgttcagcagttcctgccctctgattttccagtctgaccacttcggattatcccgtgacaggtcattcagactggctaatgcacccagtaaggcagcggtatcatcaacaggcttacccgtcttactgtccctagtgcttggattctcaccaataaaaaacgcccggcggcaaccgagcgttctgaacaaatccagatggagttctgaggtcattactggatctatcaacag

SEQ ID NO: 880 - DNA, 11176 bp, Synthetic construct
  source 1..11176: mol_type = other DNA
tttcggggaaatgtgcgcggaacccctatttgtttatttttctaaatacattcaaatatgtatccgctcatgagacaataaccctgataaatgcttcaataatattgaaaaaggaagagtatgagtattcaacatttccgtgtcgcccttattcccttttttgcggcattttgccttcctgtttttgctcacccagaaacgctggtgaaagtaaaagatgctgaagatcagttgggtgcacgagtgggttacatcgaactggatctcaacagcggtaagatccttgagagttttcgccccgaagaacgttttccaatgatgagcacttttaaagttctgctatgtggcgcggtattatcccgtattgacgccgggcaagagcaactcggtcgccgcatacactattctcagaatgacttggttgagtactcaccagtcacagaaaagcatcttacggatggcatgacagtaagagaattatgcagtgctgccataaccatgagtgataacactgcggccaacttacttctgacaacgatcggaggaccgaaggagctaaccgcttttttgcacaacatgggggatcatgtaactcgccttgatcgttgggaaccggagctgaatgaagccataccaaacgacgagcgtgacaccacgatgcctgtagcaatggcaacaacgttgcgcaaactattaactggcgaactacttactctagcttcccggcaacaattaatagactggatggaggcggataaagttgcaggaccacttctgcgctcggcccttccggctggctggtttattgctgataaatctggagccggtgagcgtggctctcgcggtatcattgcagcactggggccagatggtaagccctcccgtatcgtagttatctacacgacggggagtcaggcaactatggatgaacgaaatagacagatcgctgagataggtgcctcactgattaagcattggtaactgtcagaccaagtttactcatatatactttagattgatttaaaacttcatttttaatttaaaaggatctaggtgaagatcctttttgataatctcatgaccaaaatcccttaacgtgagttttcgttccactgagcgtcagaccccgtagaaaagatcaaaggatcttcttgagatcctttttttctgcgcgtaatctgctgcttgcaaacaaaaaaaccaccgctaccagcggtggtttgtttgccggatcaagagctaccaactctttttccgaaggtaactggcttcagcagagcgcagataccaaatactgttcttctagtgtagccgtagttaggccaccacttcaagaactctgtagcaccgcctacatacctcgctctgctaatcctgttaccagtggctgctgccagtggcgataagtcgtgtcttaccgggttggactcaagacgatagttaccggataaggcgcagcggtcgggctgaacggggggttcgtgcacacagcccagcttggagcgaacgacctacaccgaactgagatacctacagcgtgagctatgagaaagcgccacgcttcccgaagggagaaaggcggacaggtatccggtaagcggcagggtcggaacaggagagcgcacgagggagcttccagggggaaacgcctggtatctttatagtcctgtcgggtttcgccacctctgacttgagcgtcgatttttgtgatgctcgtcaggggggcggagcctatggaaaaacgccagcaacgcggcctttttacggttcctggccttttgctggccttttgctcacatgttctttcctgcgttatcccctgattctgtggataaccgtattaccgcctttgagtgagctgataccgctcgccgcagccgaactaccgagcgcagcgagtcagtgagcgaggagcgactcctgcattaggaaattaatacgactcactataggggaattgtgagcggataacaattcccctgtagaaataattttgtttaactttaataaggagatataccatgggtgaactgccgagtaggtagctgataacagtacagcgcggctgaaatcatcattaaagcggtgaactgccgagtaggtagctgataacggatccgaattcgagcgaaggagatatacatatgtttttgcaaagacctaaaccttacagcgatgaaagtttagaaagtttctttatccgagtggctaacaaaaatggctacggtgatgtccatcgcttcctagaagccactaaacgattccttcaagacattgaccataatggctatcaaacctttccgactgatataactcggataaacccatactcagctaaaaacagttccagcgcacgaactgcgtcattcctgaaacttgcacaattgacatttaatgaaccgccagagctacttgggttggcaattaacagaacaaacatgaaatactcgccgtcaactagcgcggttgttagaggtgcagaagtctttcctcgcagtttactacggacgcactccatcccctgctgtcctttgtgtctgcgagaaaatggctacgcctcctacctttggcactttcaggggtacgaatactgccacagccataacgtacctttaattaccacttgtagctgtggtaaggagtttgactaccgagtatctgggttaaagggcatttgctgcaaatgcaaggagcctatcaccttaaccagcagggagaacggtcatgaggcagcgtgtactgtttcaaactggcttgctggccatgaatctaaacctctgccaaatcttcctaaaagctaccgatggggtttagttcattggtggatgggtattaaagatagcgagttcgatcacttttcgttcgttcaatttttctcaaactggccaaggtcattccactcgataatcgaagatgaagtagagttcaaccttgagcatgctgttgtcagcacgtctgaattacgactaaaagatcttcttggtcgattgtttttcggttcaattcggttacctgagcggaatcttcaacacaatatcatccttggtgagcttctctgctatttagaaaatcgtttatggcaagacaagggattaatcgccaacctcaaaatgaacgcgttagaggcgactgtaatgttaaattgtagcctcgatcagattgcatcaatggttgaacaacgcatcttgaagccaaatcgaaaaagcaagcccaacagccctcttgatgttaccgattatctatttcatttcggcgatattttctgtctttggttagctgagttccaaagcgatgagtttaaccgttcgttttatgtgtcgaggtggtaaatgcaaactctgaaagaactaatcgcatccaatcctgacgacttaacaactgaacttaagagagcatttcgtccactcacaccgcatattgcaattgatggtaatgaacttgacgcactgacgatattagtcaatttaaccgataagactgatgatcagaaagacctgctcgatcgagccaaatgcaagcaaaaacttcgagatgaaaaatggtgggctagctgcataaattgcgttaattacagacaaagccataacccaaaattcccggatatacgttctgaaggcgtgattcgaacccaagccctgggtgaattaccgagtttcctactctcgtcctcaaaaatcccaccataccattggtcatatagccatgattcaaaatacgtcaacaaaagcgcattcctcaccaatgagttttgttgggatggtgagatctcatgtttgggtgagcttcttaaagatgcagatcacccactttggaatactttgaaaaagttaggttgttctcaaaaaacttgcaaagcaatggcaaaacaactagctgatattactctcacgactatcaatgtcacactcgcaccaaattacctgactcaaatatctctccccgatagtgatacatcctacatttcactctctcctgttgcatcgctatcgatgcaaagccactttcatcagaggctccaagatgaaaatcggcatagcgcgataacgcggtttagccgaactaccaacatgggggtcactgcgatgacatgtggcggcgcatttagaatgttaaagtctggcgctaagttttccagcccccctcatcaccgattaaacagtaaacgaagttggttgacgtcagagcatgttcagtcattaaaacagtaccagcgcctcaacaaaagcctcatacctgaaaactctcggattgcactccgtagaaaatacaaaatcgagcttcaaaatatggtcagatcttggtttgcaatgcaagaccatacccttgattcgaacatacttatccaacatttgaatcatgacctatcttacttaggagccacaaaacgttttgcatacgatccagcgatgaccaagctctttactgagcttttgaaacgagagttatcaaattcaatcaataatggtgagcaacacactaatggatcgtttttagtcctaccgaatatcagggtttgtggcgcaacagctttaagctccccggtaacggtggggattccatcacttacagctttctttggcttcgttcacgcatttgaacggaatataaatcgcaccacctcatcgtttcgtgttgaatcctttgcgatatgcgtccatcaactacatgtcgagaagcgaggtttgacagcagagtttgtggaaaaaggcgacgggactatatccgctcccgcgacccgggatgactggcagtgtgatgtcgtatttagccttattttgaacaccaactttgctcaacatattgaccaagatacgttagttacatcactaccaaagcgattggctcggggttcagcaaaaattgcgattgatgactttaaacatatcaactcattctcgacattagaaacagcgatcgaatctctgccaatagaagctggtaggtggttatcactttacgcacagtcaaacaataatctaagtgatctattagcagccatgacagaggaccatcagctcatggcaagctgcgtcggttaccacttgttagaagagcccaaagataaaccaaactccctcagaggttacaaacacgctatcgccgagtgcatcattggactcattaactcaatcacctttagctcagagactgatcccaacacaatcttttggtcgctaaagaactatcaaaactacctagtggtacagccaaggagtatcaacgatgaaactaccgacaaatctagcctatgagcgctctatcgacccatcagatgtctgtttttttgtcgtctggcccgatgatagaaaaacacctttaacctacaattctcgtactctgctcgggcaaatggaagcggcatcattagcctatgatgtctcaggtcaaccaataaaaagtgccaccgctgaggcgttagctcaagggaaccctcatcaagttgatttctgccacgttccatacggtgcgagtcatattgaatgcagtttctccgtctcgttttcttctgaactacgtcaaccatataagtgtaactcaagcaaagttaaacaaacgctagtgcaattagtcgagctctacgaaacgaaaatcggctggactgagctagcaacccgatatttgatgaacatttgcaacggtaaatggctgtggaaaaatacccgtaaagcctattgctggaacattgtacttacaccttggccttggaacggggaaaaggttggatttgaagatattcgtactaactacacctcacggcaagactttaaaaataataaaaattggtctgctatagttgaaatgatcaaaaccgcattttctagtactgatgggctggcgatatttgaagtcagggccaccttgcacttgccaacgaatgctatggtgcggccaagccaagttttcacagaaaaagaaagtggcagtaaaagtaaatctaaaactcaaaacagtcgagtttttcagagtacaactattgatggtgaacgatcgccaatactaggggcctttaaaacgggagcagctattgcaaccattgacgactggtatcctgaagccactgagccactaagggtcggacggtttggggttcatcgcgaagatgtcacttgctaccgtcatccgtctaccggaaaagattttttctcgatattacaacaagcagagcactatattgaagtgttgagcgccaacaaaactcccgctcaagaaactatcaacgacatgcactttttaatggctaacctgattaagggtgggatgttccagcataaaggagactgactgtgaaatggtattataagacaatcacctttctgccagagttgtgcaacaacgagtcactggctgcaaagtgtctccgcgttctgcatggatttaactatcagtatgagacacgaaatatcggcgtttcatttccgctttggtgtgatgcaacggttggaaaaaagatttcatttgtcagcaagaacaagatagaactcgacttactacttaaacaacactatttcgtccaaatggaacaacttcaatactttcatatatccaacactgttctcgtcccagaagattgtacatacgtttcctttagacgctgtcaatctatagataagctcacagcagcagggctggcaaggaaaatcagacgcctggagaaacgtgctctatctagaggcgagcaatttgacccatcatcttttgctcaaaaagagcatactgcaatagcgcactaccactcacttggggagtccagcaaacagacgaaccgcaactttcgactcaatatcaggatgctctcggagcaaccccgtgaggggaactcgatttttagtagctatggcttatcaaattcagaaaactcgtttcagcctgtacccttaatctgacctttaataaggagatataccatggcgacaagtttacctacgccctcagcaattacgacttcggcgttagagtatgcattccatactcccgctcgcaatctaacgaaatctcgcggaaaaaacattcatcgttatgtcagtgtaaagatgagtaagaggattacggtagaatctactctagagtgtgatgcctgctatcactttgattttgagccaagtattgttcgcttttgcgctcaaccgattcgatttttatattatctcaatggtcagtctcactcctatgttcctgactttctagttcaatttgataccaacgagtttgttctatatgaagtaaagtcagcttatgctaagaacaaacctgattttgatgttgaatgggaggcgaaagtaaaagcagcaactgaactagggctagaattggagcttgttgaagagagtgatattagggatacggttgtattaaataatcttaagcgcatgcatcgttatgcttcgaaagatgagctgaataacgtacataactctctcttaaaaataataaagtacaatggcgcccaatctgcaagatgcttgggagaacagttgggtttaaaaggccgaactgttttaccaattttgtgcgatttgctgtcaaggtgtttactcgatacacgtttggataagcctctatctcttgaatctcgatttgagttggccagttatggctaagaaagggttctcaagtttccatagaaaagcagtctcttcccaagatacgcttgaatcgatagagcttgtctctagcgctaattgtctagaaagtgttacgtatcaagatatatcagcatttcccgaaacaattgcggtagagattaatttccgattaagcattcttcgctttttagcgcgaaagtgcgaaaccattgtggccaaatcaattgaaccacatcgtgtagagctacagcaaaactatagtagaaaaatacccagtgcaataacgatatatcgatggtggcttgcttttcgaaaatcagactacaaccccattagcttagcacctaatatcaaggatagaggtaatagagagacaaaagtgtcaacagttgttgattctattatggaacaggcagttgaaagagttatatctggacgaaaagtcaatgttagctctgcatataaacgtgttcgacgaaaagttcgtcaatacaatctaactcatggaacgaaatacacgtatcctaagtacgaatctgtaagaaagcgagtaaaaaagaaaaccccatttgagttattagccgcagggaaaggggagagagtagctaagagagagtttcgccgaatgggaaaaaagatcctcacgtctagcgtgctagagagggttgaaatagatcacactgtcgttgacctttttgcagtacacgaagagtatcgaatcccattgggccgaccttggcttactcaattggttgattgttacagtaaagctgtaatcggtttttatttaggtttcgagcctcctagctatgtgtcggtttcccttgcacttaagaatgcaatacaacgcaaagatgacttaatctcctcgtatgaatcgatcgagaatgaatggctatgttatggcatcccagacctactcgtaactgataatggtaaagagtttttgtcgaaagcatttgatcaagcatgtgaatcactattgatcaatgtgcatcaaaataaagttgagacgcccgacaacaaacctcatgttgaacgtaactacgggactattaatacttctctgttagacgatttacctgggaaatccttcagccagtaccttcaaagagaagggtacgactctgtgggagaagctacccttacactcaatgagattagagaaatttacttaatttggttggtggatatttatcataaaaaacccaatcagagaggcactaattgtcctaatgttgcgtggaaaaagggttgtcaagaatgggaaccagaggagttctctggttctaaagacgaattagactttaaatttgctattgttgattacaaacaacttactaaagtagggataactgtctacaaagaactgagttatagcaatgaccgtttagctgaatatagagggaagaaaggaaaccataaagttcagttcaagtataaccctgagtgtatggcagttatttgggtgttggatgaggatatgaatgagtactttacagttaatgcgattgactacgaatatgcaagtagagtatcactttggcaacataaatataacatgaaatatcaagcagaactaaattcagcagaatatgatgaggacaaggaaattgatgcagaaataaaaattgaagaaatcgcagatcgttcaattgttaagactaacaaaatcagagctcggaggcgtggcgctaggcatcaagagaatagcgcaagggctaagtcaatcagtaatgcgaacccggcctcgatacaaaaacatgaagatgaaatcgttagtgcagataatgacgattgggatattgattatgtctgagaaatcgtcaaatgagtgaaacgcgtgaggctcgtatatcaagagctaaaagggcatttgtatccacaccgagcgttaggaaaatcttgagttacatggatagatgtagagatctatcagacctagagtctgagcctacatgcatgatggtctatggtgcttcgggtgtaggtaaaacgaccgtcatcaagaaatacttaaatcaaaacagaagagagtccgaagccgggggcgatataataccggttttgcatattgagttgccagacaatgcgaagccagtagatgcagcaagggaattgctggttgaaatgggtgacccgctagcactttatgaaactgacttagctagattgacgaaaagactgactgaattaatccctgcggtcggcgtgaagctgattattatcgatgagttccaacatttggtggaagaaaggtcaaatcgggttcttacccaagtaggtaattggctaaaaatgatacttaacaaaacgaaatgtccaattgttatatttggtatgccatactcaaaagttgtactgcaagcaaactcgcaacttcacgggcgattttccattcaggttgaactgcgcccctttagctaccagggaggtagaggtgtatttaaaacttttttggaataccttgataaagccctaccttttgaaaaacaggctggcttagccaacgaaagtttgcagaaaaaattgtatgcattctctcagggaaacatgcgttcgttgagaaaccttatttatcaagcatctatcgaagcaattgataatcagcatgagacgataaccgaagaagatttcgtttttgcatcgaagttgacatcgggcgataaacccaactcatggaaaaatccttttgaggagggtgttgaggtaacagaagatatgttacgaccgccaccaaaagatattggttgggaggactatttgagacattcaaccccgagagtgagtaaaccaggtagaaataaaaactttttcgaataacctaggctgctgcgctgctgccaccgctgagcaataactagcataaccccttggggcctctaaacgggtcttgaggggttttttgctgaaacctcaggcatttgttgttgatacaaccataaaatgataattacacccataaattgataattatcacacccaattcacaaaaatatcaacttatggttgttttgtgagatatcaatatatggttgttttgtggttaagttgctgattataaataattattaaatatcactttatggttgcatcaacaggtaccgagctcgaattcactggccgtcgttttacaacgtcgtgactgggaaaaccctggcgttacccaacttaatcgccttgcagcacatccccctttcgccagctggcgtaatagcgaagaggcccgcaccgatcgcccttcccaacagttgcgcagcctgaatggcgaatggcgcctgatgcggtattttctccttacgcatctgtgcggtatttcacaccgcatatggtgcactctcagtacaatctgctctgatgccgcatagttaagccagccccgacacccgccaacacccgctgacgcgccctgacgggcttgtctgctcccggcatccgcttacagacaagctgtgaccgtctccgggagctgcatgtgtcagaggttttcaccgtcatcaccgaaacgcgcgagacgaaagggcctcgtgatacgcctatttttataggttaatgtcatgataataatggtttcttagacgtcaggtggcact

SEQ ID NO: 881 - DNA, 13284 bp, Synthetic construct
  source 1..13284: mol_type = other DNA
gacgtcaggtggcacttttcggggaaatgtgcgcggaacccctatttgtttatttttctaaatacattcaaatatgtatccgctcatgagacaataaccctgataaatgcttcaataatattgaaaaaggaagagtatgagtattcaacatttccgtgtcgcccttattcccttttttgcggcattttgccttcctgtttttgctcacccagaaacgctggtgaaagtaaaagatgctgaagatcagttgggtgcacgagtgggttacatcgaactggatctcaacagcggtaagatccttgagagttttcgccccgaagaacgttttccaatgatgagcacttttaaagttctgctatgtggcgcggtattatcccgtattgacgccgggcaagagcaactcggtcgccgcatacactattctcagaatgacttggttgagtactcaccagtcacagaaaagcatcttacggatggcatgacagtaagagaattatgcagtgctgccataaccatgagtgataacactgcggccaacttacttctgacaacgatcggaggaccgaaggagctaaccgcttttttgcacaacatgggggatcatgtaactcgccttgatcgttgggaaccggagctgaatgaagccataccaaacgacgagcgtgacaccacgatgcctgtagcaatggcaacaacgttgcgcaaactattaactggcgaactacttactctagcttcccggcaacaattaatagactggatggaggcggataaagttgcaggaccacttctgcgctcggcccttccggctggctggtttattgctgataaatctggagccggtgagcgtgggtctcgcggtatcattgcagcactggggccagatggtaagccctcccgtatcgtagttatctacacgacggggagtcaggcaactatggatgaacgaaatagacagatcgctgagataggtgcctcactgattaagcattggtaactgtcagaccaagtttactcatatatactttagattgatttaaaacttcatttttaatttaaaaggatctaggtgaagatcctttttgataatctcatgaccaaaatcccttaacgtgagttttcgttccactgagcgtcagaccccgtagaaaagatcaaaggatcttcttgagatcctttttttctgcgcgtaatctgctgcttgcaaacaaaaaaaccaccgctaccagcggtggtttgtttgccggatcaagagctaccaactctttttccgaaggtaactggcttcagcagagcgcagataccaaatactgttcttctagtgtagccgtagttaggccaccacttcaagaactctgtagcaccgcctacatacctcgctctgctaatcctgttaccagtggctgctgccagtggcgataagtcgtgtcttaccgggttggactcaagacgatagttaccggataaggcgcagcggtcgggctgaacggggggttcgtgcacacagcccagcttggagcgaacgacctacaccgaactgagatacctacagcgtgagctatgagaaagcgccacgcttcccgaagggagaaaggcggacaggtatccggtaagcggcagggtcggaacaggagagcgcacgagggagcttccagggggaaacgcctggtatctttatagtcctgtcgggtttcgccacctctgacttgagcgtcgatttttgtgatgctcgtcaggggggcggagcctatggaaaaacgccagcaacgcggcctttttacggttcctggccttttgctggccttttgctcacatgttctttcctgcgttatcccctgattctgtggataaccgtattaccgcctttgagtgagctgataccgctcgccgcagccgaacgaccgagcgcagcgagtcagtgagcgaggagcgactcctgcattaggaaattaatacgactcactataggggaattgtgagcggataacaattcccctgtagaaataattttgtttaactttaataaggagatataccatgggtgaactgccgagtaggtagctgataacagtacagcgcggctgaaatcatcattaaagcggtgaactgccgagtaggtagctgataacggatccgaattcgagcgaaggagatatacatatgtttttgcaaagacctaaaccttacagcgatgaaagtttagaaagtttctttatccgagtggctaacaaaaatggctacggtgatgtccatcgcttcctagaagccactaaacgattccttcaagacattgaccataatggctatcaaacctttccgactgatataactcggataaacccatactcagctaaaaacagttccagcgcacgaactgcgtcattcctgaaacttgcacaattgacatttaatgaaccgccagagctacttgggttggcaattaacagaacaaacatgaaatactcgccgtcaactagcgcggttgttagaggtgcagaagtctttcctcgcagtttactacggacgcactccatcccctgctgtcctttgtgtctgcgagaaaatggctacgcctcctacctttggcactttcaggggtacgaatactgccacagccataacgtacctttaattaccacttgtagctgtggtaaggagtttgactaccgagtatctgggttaaagggcatttgctgcaaatgcaaggagcctatcaccttaaccagcagggagaacggtcatgaggcagcgtgtactgtttcaaactggcttgctggccatgaatctaaacctctgccaaatcttcctaaaagctaccgatggggtttagttcattggtggatgggtattaaagatagcgagttcgatcacttttcgttcgttcaatttttctcaaactggccaaggtcattccactcgataatcgaagatgaagtagagttcaaccttgagcatgctgttgtcagcacgtctgaattacgactaaaagatcttcttggtcgattgtttttcggttcaattcggttacctgagcggaatcttcaacacaatatcatccttggtgagcttctctgctatttagaaaatcgtttatggcaagacaagggattaatcgccaacctcaaaatgaacgcgttagaggcgactgtaatgttaaattgtagcctcgatcagattgcatcaatggttgaacaacgcatcttgaagccaaatcgaaaaagcaagcccaacagccctcttgatgttaccgattatctatttcatttcggcgatattttctgtctttggttagctgagttccaaagcgatgagtttaaccgttcgttttatgtgtcgaggtggtaaatgcaaactctgaaagaactaatcgcatccaatcctgacgacttaacaactgaacttaagagagcatttcgtccactcacaccgcatattgcaattgatggtaatgaacttgacgcactgacgatattagtcaatttaaccgataagactgatgatcagaaagacctgctcgatcgagccaaatgcaagcaaaaacttcgagatgaaaaatggtgggctagctgcataaattgcgttaattacagacaaagccataacccaaaattcccggatatacgttctgaaggcgtgattcgaacccaagccctgggtgaattaccgagtttcctactctcgtcctcaaaaatcccaccataccattggtcatatagccatgattcaaaatacgtcaacaaaagcgcattcctcaccaatgagttttgttgggatggtgagatctcatgtttgggtgagcttcttaaagatgcagatcacccactttggaatactttgaaaaagttaggttgttctcaaaaaacttgcaaagcaatggcaaaacaactagctgatattactctcacgactatcaatgtcacactcgcaccaaattacctgactcaaatatctctccccgatagtgatacatcctacatttcactctctcctgttgcatcgctatcgatgcaaagccactttcatcagaggctccaagatgaaaatcggcatagcgcgataacgcggtttagccgaactaccaacatgggggtcactgcgatgacatgtggcggcgcatttagaatgttaaagtctggcgctaagttttccagcccccctcatcaccgattaaacagtaaacgaagttggttgacgtcagagcatgttcagtcattaaaacagtaccagcgcctcaacaaaagcctcatacctgaaaactctcggattgcactccgtagaaaatacaaaatcgagcttcaaaatatggtcagatcttggtttgcaatgcaagaccatacccttgattcgaacatacttatccaacatttgaatcatgacctatcttacttaggagccacaaaacgttttgcatacgatccagcgatgaccaagctctttactgagcttttgaaacgagagttatcaaattcaatcaataatggtgagcaacacactaatggatcgtttttagtcctaccgaatatcagggtttgtggcgcaacagctttaagctccccggtaacggtggggattccatcacttacagctttctttggcttcgttcacgcatttgaacggaatataaatcgcaccacctcatcgtttcgtgttgaatcctttgcgatatgcgtccatcaactacatgtcgagaagcgaggtttgacagcagagtttgtggaaaaaggcgacgggactatatccgctcccgcgacccgggatgactggcagtgtgatgtcgtatttagccttattttgaacaccaactttgctcaacatattgaccaagatacgttagttacatcactaccaaagcgattggctcggggttcagcaaaaattgcgattgatgactttaaacatatcaactcattctcgacattagaaacagcgatcgaatctctgccaatagaagctggtaggtggttatcactttacgcacagtcaaacaataatctaagtgatctattagcagccatgacagaggaccatcagctcatggcaagctgcgtcggttaccacttgttagaagagcccaaagataaaccaaactccctcagaggttacaaacacgctatcgccgagtgcatcattggactcattaactcaatcacctttagctcagagactgatcccaacacaatcttttggtcgctaaagaactatcaaaactacctagtggtacagccaaggagtatcaacgatgaaactaccgacaaatctagcctatgagcgctctatcgacccatcagatgtctgtttttttgtcgtctggcccgatgatagaaaaacacctttaacctacaattctcgtactctgctcgggcaaatggaagcggcatcattagcctatgatgtctcaggtcaaccaataaaaagtgccaccgctgaggcgttagctcaagggaaccctcatcaagttgatttctgccacgttccatacggtgcgagtcatattgaatgcagtttctccgtctcgttttcttctgaactacgtcaaccatataagtgtaactcaagcaaagttaaacaaacgctagtgcaattagtcgagctctacgaaacgaaaatcggctggactgagctagcaacccgatatttgatgaacatttgcaacggtaaatggctgtggaaaaatacccgtaaagcctattgctggaacattgtacttacaccttggccttggaacggggaaaaggttggatttgaagatattcgtactaactacacctcacggcaagactttaaaaataataaaaattggtctgctatagttgaaatgatcaaaaccgcattttctagtactgatgggctggcgatatttgaagtcagggccaccttgcacttgccaacgaatgctatggtgcggccaagccaagttttcacagaaaaagaaagtggcagtaaaagtaaatctaaaactcaaaacagtcgagtttttcagagtacaactattgatggtgaacgatcgccaatactaggggcctttaaaacgggagcagctattgcaaccattgacgactggtatcctgaagccactgagccactaagggtcggacggtttggggttcatcgcgaagatgtcacttgctaccgtcatccgtctaccggaaaagattttttctcgatattacaacaagcagagcactatattgaagtgttgagcgccaacaaaactcccgctcaagaaactatcaacgacatgcactttttaatggctaacctgattaagggtgggatgttccagcataaaggagactgactgtgaaatggtattataagacaatcacctttctgccagagttgtgcaacaacgagtcactggctgcaaagtgtctccgcgttctgcatggatttaactatcagtatgagacacgaaatatcggcgtttcatttccgctttggtgtgatgcaacggttggaaaaaagatttcatttgtcagcaagaacaagatagaactcgacttactacttaaacaacactatttcgtccaaatggaacaacttcaatactttcatatatccaacactgttctcgtcccagaagattgtacatacgtttcctttagacgctgtcaatctatagataagctcacagcagcagggctggcaaggaaaatcagacgcctggagaaacgtgctctatctagaggcgagcaatttgacccatcatcttttgctcaaaaagagcatactgcaatagcgcactaccactcacttggggagtccagcaaacagacgaaccgcaactttcgactcaatatcaggatgctctcggagcaaccccgtgaggggaactcgatttttagtagctatggcttatcaaattcagaaaactcgtttcagcctgtacccttaatctgacctttaataaggagatataccatggcgacaagtttacctacgccctcagcaattacgacttcggcgttagagtatgcattccatactcccgctcgcaatctaacgaaatctcgcggaaaaaacattcatcgttatgtcagtgtaaagatgagtaagaggattacggtagaatctactctagagtgtgatgcctgctatcactttgattttgagccaagtattgttcgcttttgcgctcaaccgattcgatttttatattatctcaatggtcagtctcactcctatgttcctgactttctagttcaatttgataccaacgagtttgttctatatgaagtaaagtcagcttatgctaagaacaaacctgattttgatgttgaatgggaggcgaaagtaaaagcagcaactgaactagggctagaattggagcttgttgaagagagtgatattagggatacggttgtattaaataatcttaagcgcatgcatcgttatgcttcgaaagatgagctgaataacgtacataactctctcttaaaaataataaagtacaatggcgcccaatctgcaagatgcttgggagaacagttgggtttaaaaggccgaactgttttaccaattttgtgcgatttgctgtcaaggtgtttactcgatacacgtttggataagcctctatctcttgaatctcgatttgagttggccagttatggctaagaaagggttctcaagtttccatagaaaagcagtctcttcccaagatacgcttgaatcgatagagcttgtctctagcgctaattgtctagaaagtgttacgtatcaagatatatcagcatttcccgaaacaattgcggtagagattaatttccgattaagcattcttcgctttttagcgcgaaagtgcgaaaccattgtggccaaatcaattgaaccacatcgtgtagagctacagcaaaactatagtagaaaaatacccagtgcaataacgatatatcgatggtggcttgcttttcgaaaatcagactacaaccccattagcttagcacctaatatcaaggatagaggtaatagagagacaaaagtgtcaacagttgttgattctattatggaacaggcagttgaaagagttatatctggacgaaaagtcaatgttagctctgcatataaacgtgttcgacgaaaagttcgtcaatacaatctaactcatggaacgaaatacacgtatcctaagtacgaatctgtaagaaagcgagtaaaaaagaaaaccccatttgagttattagccgcagggaaaggggagagagtagctaagagagagtttcgccgaatgggaaaaaagatcctcacgtctagcgtgctagagagggttgaaatagatcacactgtcgttgacctttttgcagtacacgaagagtatcgaatcccattgggccgaccttggcttactcaattggttgattgttacagtaaagctgtaatcggtttttatttaggtttcgagcctcctagctatgtgtcggtttcccttgcacttaagaatgcaatacaacgcaaagatgacttaatctcctcgtatgaatcgatcgagaatgaatggctatgttatggcatcccagacctactcgtaactgataatggtaaagagtttttgtcgaaagcatttgatcaagcatgtgaatcactattgatcaatgtgcatcaaaataaagttgagacgcccgacaacaaacctcatgttgaacgtaactacgggactattaatacttctctgttagacgatttacctgggaaatccttcagccagtaccttcaaagagaagggtacgactctgtgggagaagctacccttacactcaatgagattagagaaatttacttaatttggttggtggatatttatcataaaaaacccaatcagagaggcactaattgtcctaatgttgcgtggaaaaagggttgtcaagaatgggaaccagaggagttctctggttctaaagacgaattagactttaaatttgctattgttgattacaaacaacttactaaagtagggataactgtctacaaagaactgagttatagcaatgaccgtttagctgaatatagagggaagaaaggaaaccataaagttcagttcaagtataaccctgagtgtatggcagttatttgggtgttggatgaggatatgaatgagtactttacagttaatgcgattgactacgaatatgcaagtagagtatcactttggcaacataaatataacatgaaatatcaagcagaactaaattcagcagaatatgatgaggacaaggaaattgatgcagaaataaaaattgaagaaatcgcagatcgttcaattgttaagactaacaaaatcagagctcggaggcgtggcgctaggcatcaagagaatagcgcaagggctaagtcaatcagtaatgcgaacccggcctcgatacaaaaacatgaagatgaaatcgttagtgcagataatgacgattgggatattgattatgtctgagaaatcgtcaaatgagtgaaacgcgtgaggctcgtatatcaagagctaaaagggcatttgtatccacaccgagcgttaggaaaatcttgagttacatggatagatgtagagatctatcagacctagagtctgagcctacatgcatgatggtctatggtgcttcgggtgtaggtaaaacgaccgtcatcaagaaatacttaaatcaaaacagaagagagtccgaagccgggggcgatataataccggttttgcatattgagttgccagacaatgcgaagccagtagatgcagcaagggaattgctggttgaaatgggtgacccgctagcactttatgaaactgacttagctagattgacgaaaagactgactgaattaatccctgcggtcggcgtgaagctgattattatcgatgagttccaacatttggtggaagaaaggtcaaatcgggttcttacccaagtaggtaattggctaaaaatgatacttaacaaaacgaaatgtccaattgttatatttggtatgccatactcaaaagttgtactgcaagcaaactcgcaacttcacgggcgattttccattcaggttgaactgcgcccctttagctaccagggaggtagaggtgtatttaaaacttttttggaataccttgataaagccctaccttttgaaaaacaggctggcttagccaacgaaagtttgcagaaaaaattgtatgcattctctcagggaaacatgcgttcgttgagaaaccttatttatcaagcatctatcgaagcaattgataatcagcatgagacgataaccgaagaagatttcgtttttgcatcgaagttgacatcgggcgataaacccaactcatggaaaaatccttttgaggagggtgttgaggtaacagaagatatgttacgaccgccaccaaaagatattggttgggaggactatttgagacattcaaccccgagagtgagtaaaccaggtagaaataaaaactttttcgaataacctaggctgctgcgctgctgccaccgctgagcaataactagcataaccccttggggcctctaaacgggtcttgaggggttttttgctgaaacctcaggcatttgttgttgatacaaccataaaatgataattacacccataaattgataattatcacacccataaattgatattgcctcttcatggtctaaacttcagtaagtttacgacattttcatgaagaggtcatttccgggtcatctctctgtcctcaaacagtgtcagggtcagcacgatatcttccagaatgtcctcgttttcctcattgtccaggaagtccttgtccttgataattttcagcagatcgtggtatgtgcccagggaggcgttgaaccgatcttccacgccggagatttccacggagtcgaagcactcgattttcttgaagtagtcctctttcagctgcttcacggtcactttccggttggtcttgaacagcaggtccacgatggcctttttctgctcgccgctcaggaaggcgggctttctcattccctcggtcacgtatttcactttggtcagctcgttatacacggtgaagtactcgtacagcaggctgtgcttgggcagcaccttctcgttgggcaggttcttatcgaagttggtcatccgctcgatgaagctctgggcggaagcgcccttgtccaccacttcctcgaagttccagggggtgatggtttcctcgctctttctggtcatccaggcgaatctgctgtttcccctggccagagggcccacgtagtaggggatgcggaaggtcaggatcttctcgatcttttcccggttgtccttcaggaatgggtaaaaatcttcctgccgccgcagaatggcgtgcagctctcccaggtggatctggtgggggatgctgccgttgtcgaaggtccgctgcttccgcagcaggtcctctctgttcagcttcacgagcagttcctcggtgccgtccatcttttccaggatgggcttgatgaacttgtagaactcttcctggctggctccgccgtcaatgtagccggcgtagccgttcttgctctggtcgaagaaaatctctttgtacttctcaggcagctgctgccgcacgagagctttcagcagggtcaggtcctggtggtgctcgtcgtatctcttgatcatagaggcgctcaggggggccttggtgatctcggtgttcactctcaggatgtcgctcagcaggatggcgtcggacaggttcttggcggccagaaacaggtcggcgtactggtcgccgatctgggccagcaggttgtccaggtcgtcgtcgtaggtgtccttgctcagctgcagtttggcatcctcggccaggtcgaagttgctcttgaagttgggggtcaggcccaggctcagggcaatcaggtttccgaacaggccattcttcttctcgccgggcagctgggcgatcagattttccagccgtctgctcttgctcagtctggcagacaggatggccttggcgtccacgccgctggcgttgatggggttttcctcgaacagctggttgtaggtctgcaccagctggatgaacagcttgtccacgtcgctgttgtcggggttcaggtcgccctcgatcaggaagtggccccggaacttgatcatgtgggccagggccagatagatcagccgcaggtcggccttgtcggtgctgtccaccagtttctttctcaggtggtagatggtggggtacttctcgtggtaggccacctcgtccacgatgttgccgaagatggggtgccgctcgtgcttcttatcctcttccaccaggaaggactcttccagtctgtggaagaagctgtcgtccaccttggccatctcgttgctgaagatctcttgcagatagcagatccggttcttccgtctggtgtatcttcttctggcggttctcttcagccgggtggcctcggctgtttcgccgctgtcgaacagcagggctccgatcaggttcttcttgatgctgtgccggtcggtgttgcccagcaccttgaatttcttgctgggcaccttgtactcgtcggtgatcacggcccagcccacagagttggtgccgatgtccaggccgatgctgtacttcttgtcggctgctgggactccgtggataccgaccttccgcttcttctttggggccatcttatcgtcatcgtctttgtaatcaatatcatgatccttgtagtctccgtcgtggtccagtccttactgcagtagttttgctgaaatactcgattcacaaaaatatcaacttatggttgttttgtgagatatcaatatatggttgttttgtggttaagttgctgattataaataattattaaatatcactttatggttgcatcaacaggtaccgagctcgaattcactggccgtcgttttacaacgtcgtgactgggaaaaccctggcgttacccaacttaatcgccttgcagcacatccccctttcgccagctggcgtaatagcgaagaggcccgcaccgatcgcccttcccaacagttgcgcagcctgaatggcgaatggcgcctgatgcggtattttctccttacgcatctgtgcggtatttcacaccgcatatggtgcactctcagtacaatctgctctgatgccgcatagttaagccagccccgacacccgccaacacccgctgacgcgccctgacgggcttgtctgctcccggcatccgcttacagacaagctgtgaccgtctccgggagctgcatgtgtcagaggttttcaccgtcatcaccgaaacgcgcgagacgaaagggcctcgtgatacgcctatttttataggttaatgtcatgataataatggtttctta

SEQ ID NO: 882 - DNA, 14266 bp, Synthetic construct
  source 1..14266: mol_type = other DNA
cgtcaggtggcacttttcggggaaatgtgcgcggaacccctatttgtttatttttctaaatacattcaaatatgtatccgctcatgagacaataaccctgataaatgcttcaataatattgaaaaaggaagagtatgagtattcaacatttccgtgtcgcccttattcccttttttgcggcattttgccttcctgtttttgctcacccagaaacgctggtgaaagtaaaagatgctgaagatcagttgggtgcacgagtgggttacatcgaactggatctcaacagcggtaagatccttgagagttttcgccccgaagaacgttttccaatgatgagcacttttaaagttctgctatgtggcgcggtattatcccgtattgacgccgggcaagagcaactcggtcgccgcatacactattctcagaatgacttggttgagtactcaccagtcacagaaaagcatcttacggatggcatgacagtaagagaattatgcagtgctgccataaccatgagtgataacactgcggccaacttacttctgacaacgatcggaggaccgaaggagctaaccgcttttttgcacaacatgggggatcatgtaactcgccttgatcgttgggaaccggagctgaatgaagccataccaaacgacgagcgtgacaccacgatgcctgtagcaatggcaacaacgttgcgcaaactattaactggcgaactacttactctagcttcccggcaacaattaatagactggatggaggcggataaagttgcaggaccacttctgcgctcggcccttccggctggctggtttattgctgataaatctggagccggtgagcgtgggtctcgcggtatcattgcagcactggggccagatggtaagccctcccgtatcgtagttatctacacgacggggagtcaggcaactatggatgaacgaaatagacagatcgctgagataggtgcctcactgattaagcattggtaactgtcagaccaagtttactcatatatactttagattgatttaaaacttcatttttaatttaaaaggatctaggtgaagatcctttttgataatctcatgaccaaaatcccttaacgtgagttttcgttccactgagcgtcagaccccgtagaaaagatcaaaggatcttcttgagatcctttttttctgcgcgtaatctgctgcttgcaaacaaaaaaaccaccgctaccagcggtggtttgtttgccggatcaagagctaccaactctttttccgaaggtaactggcttcagcagagcgcagataccaaatactgttcttctagtgtagccgtagttaggccaccacttcaagaactctgtagcaccgcctacatacctcgctctgctaatcctgttaccagtggctgctgccagtggcgataagtcgtgtcttaccgggttggactcaagacgatagttaccggataaggcgcagcggtcgggctgaacggggggttcgtgcacacagcccagcttggagcgaacgacctacaccgaactgagatacctacagcgtgagctatgagaaagcgccacgcttcccgaagggagaaaggcggacaggtatccggtaagcggcagggtcggaacaggagagcgcacgagggagcttccagggggaaacgcctggtatctttatagtcctgtcgggtttcgccacctctgacttgagcgtcgatttttgtgatgctcgtcaggggggcggagcctatggaaaaacgccagcaacgcggcctttttacggttcctggccttttgctggccttttgctcacatgttctttcctgcgttatcccctgattctgtggataaccgtattaccgcctttgagtgagctgataccgctcgccgcagccgaacgaccgagcgcagcgagtcagtgagcgaggagcgactcctgcattaggaaattaatacgactcactataggggaattgtgagcggataacaattcccctgtagaaataattttgtttaactttaataaggagatataccatgggtgaactgccgagtaggtagctgataacagtacagcgcggctgaaatcatcattaaagcggtgaactgccgagtaggtagctgataacggatccgaattcgagcgaaggagatatacatatgtttttgcaaagacctaaaccttacagcgatgaaagtttagaaagtttctttatccgagtggctaacaaaaatggctacggtgatgtccatcgcttcctagaagccactaaacgattccttcaagacattgaccataatggctatcaaacctttccgactgatataactcggataaacccatactcagctaaaaacagttccagcgcacgaactgcgtcattcctgaaacttgcacaattgacatttaatgaaccgccagagctacttgggttggcaattaacagaacaaacatgaaatactcgccgtcaactagcgcggttgttagaggtgcagaagtctttcctcgcagtttactacggacgcactccatcccctgctgtcctttgtgtctgcgagaaaatggctacgcctcctacctttggcactttcaggggtacgaatactgccacagccataacgtacctttaattaccacttgtagctgtggtaaggagtttgactaccgagtatctgggttaaagggcatttgctgcaaatgcaaggagcctatcaccttaaccagcagggagaacggtcatgaggcagcgtgtactgtttcaaactggcttgctggccatgaatctaaacctctgccaaatcttcctaaaagctaccgatggggtttagttcattggtggatgggtattaaagatagcgagttcgatcacttttcgttcgttcaatttttctcaaactggccaaggtcattccactcgataatcgaagatgaagtagagttcaaccttgagcatgctgttgtcagcacgtctgaattacgactaaaagatcttcttggtcgattgtttttcggttcaattcggttacctgagcggaatcttcaacacaatatcatccttggtgagcttctctgctatttagaaaatcgtttatggcaagacaagggattaatcgccaacctcaaaatgaacgcgttagaggcgactgtaatgttaaattgtagcctcgatcagattgcatcaatggttgaacaacgcatcttgaagccaaatcgaaaaagcaagcccaacagccctcttgatgttaccgattatctatttcatttcggcgatattttctgtctttggttagctgagttccaaagcgatgagtttaaccgttcgttttatgtgtcgaggtggtaaatgcaaactctgaaagaactaatcgcatccaatcctgacgacttaacaactgaacttaagagagcatttcgtccactcacaccgcatattgcaattgatggtaatgaacttgacgcactgacgatattagtcaatttaaccgataagactgatgatcagaaagacctgctcgatcgagccaaatgcaagcaaaaacttcgagatgaaaaatggtgggctagctgcataaattgcgttaattacagacaaagccataacccaaaattcccggatatacgttctgaaggcgtgattcgaacccaagccctgggtgaattaccgagtttcctactctcgtcctcaaaaatcccaccataccattggtcatatagccatgattcaaaatacgtcaacaaaagcgcattcctcaccaatgagttttgttgggatggtgagatctcatgtttgggtgagcttcttaaagatgcagatcacccactttggaatactttgaaaaagttaggttgttctcaaaaaacttgcaaagcaatggcaaaacaactagctgatattactctcacgactatcaatgtcacactcgcaccaaattacctgactcaaatatctctccccgatagtgatacatcctacatttcactctctcctgttgcatcgctatcgatgcaaagccactttcatcagaggctccaagatgaaaatcggcatagcgcgataacgcggtttagccgaactaccaacatgggggtcactgcgatgacatgtggcggcgcatttagaatgttaaagtctggcgctaagttttccagcccccctcatcaccgattaaacagtaaacgaagttggttgacgtcagagcatgttcagtcattaaaacagtaccagcgcctcaacaaaagcctcatacctgaaaactctcggattgcactccgtagaaaatacaaaatcgagcttcaaaatatggtcagatcttggtttgcaatgcaagaccatacccttgattcgaacatacttatccaacatttgaatcatgacctatcttacttaggagccacaaaacgttttgcatacgatccagcgatgaccaagctctttactgagcttttgaaacgagagttatcaaattcaatcaataatggtgagcaacacactaatggatcgtttttagtcctaccgaatatcagggtttgtggcgcaacagctttaagctccccggtaacggtggggattccatcacttacagctttctttggcttcgttcacgcatttgaacggaatataaatcgcaccacctcatcgtttcgtgttgaatcctttgcgatatgcgtccatcaactacatgtcgagaagcgaggtttgacagcagagtttgtggaaaaaggcgacgggactatatccgctcccgcgacccgggatgactggcagtgtgatgtcgtatttagccttattttgaacaccaactttgctcaacatattgaccaagatacgttagttacatcactaccaaagcgattggctcggggttcagcaaaaattgcgattgatgactttaaacatatcaactcattctcgacattagaaacagcgatcgaatctctgccaatagaagctggtaggtggttatcactttacgcacagtcaaacaataatctaagtgatctattagcagccatgacagaggaccatcagctcatggcaagctgcgtcggttaccacttgttagaagagcccaaagataaaccaaactccctcagaggttacaaacacgctatcgccgagtgcatcattggactcattaactcaatcacctttagctcagagactgatcccaacacaatcttttggtcgctaaagaactatcaaaactacctagtggtacagccaaggagtatcaacgatgaaactaccgacaaatctagcctatgagcgctctatcgacccatcagatgtctgtttttttgtcgtctggcccgatgatagaaaaacacctttaacctacaattctcgtactctgctcgggcaaatggaagcggcatcattagcctatgatgtctcaggtcaaccaataaaaagtgccaccgctgaggcgttagctcaagggaaccctcatcaagttgatttctgccacgttccatacggtgcgagtcatattgaatgcagtttctccgtctcgttttcttctgaactacgtcaaccatataagtgtaactcaagcaaagttaaacaaacgctagtgcaattagtcgagctctacgaaacgaaaatcggctggactgagctagcaacccgatatttgatgaacatttgcaacggtaaatggctgtggaaaaatacccgtaaagcctattgctggaacattgtacttacaccttggccttggaacggggaaaaggttggatttgaagatattcgtactaactacacctcacggcaagactttaaaaataataaaaattggtctgctatagttgaaatgatcaaaaccgcattttctagtactgatgggctggcgatatttgaagtcagggccaccttgcacttgccaacgaatgctatggtgcggccaagccaagttttcacagaaaaagaaagtggcagtaaaagtaaatctaaaactcaaaacagtcgagtttttcagagtacaactattgatggtgaacgatcgccaatactaggggcctttaaaacgggagcagctattgcaaccattgacgactggtatcctgaagccactgagccactaagggtcggacggtttggggttcatcgcgaagatgtcacttgctaccgtcatccgtctaccggaaaagattttttctcgatattacaacaagcagagcactatattgaagtgttgagcgccaacaaaactcccgctcaagaaactatcaacgacatgcactttttaatggctaacctgattaagggtgggatgttccagcataaaggagactgactgtgaaatggtattataagacaatcacctttctgccagagttgtgcaacaacgagtcactggctgcaaagtgtctccgcgttctgcatggatttaactatcagtatgagacacgaaatatcggcgtttcatttccgctttggtgtgatgcaacggttggaaaaaagatttcatttgtcagcaagaacaagatagaactcgacttactacttaaacaacactatttcgtccaaatggaacaacttcaatactttcatatatccaacactgttctcgtcccagaagattgtacatacgtttcctttagacgctgtcaatctatagataagctcacagcagcagggctggcaaggaaaatcagacgcctggagaaacgtgctctatctagaggcgagcaatttgacccatcatcttttgctcaaaaagagcatactgcaatagcgcactaccactcacttggggagtccagcaaacagacgaaccgcaactttcgactcaatatcaggatgctctcggagcaaccccgtgaggggaactcgatttttagtagctatggcttatcaaattcagaaaactcgtttcagcctgtacccttaatctgacctttaataaggagatataccatggcgacaagtttacctacgccctcagcaattacgacttcggcgttagagtatgcattccatactcccgctcgcaatctaacgaaatctcgcggaaaaaacattcatcgttatgtcagtgtaaagatgagtaagaggattacggtagaatctactctagagtgtgatgcctgctatcactttgattttgagccaagtattgttcgcttttgcgctcaaccgattcgatttttatattatctcaatggtcagtctcactcctatgttcctgactttctagttcaatttgataccaacgagtttgttctatatgaagtaaagtcagcttatgctaagaacaaacctgattttgatgttgaatgggaggcgaaagtaaaagcagcaactgaactagggctagaattggagcttgttgaagagagtgatattagggatacggttgtattaaataatcttaagcgcatgcatcgttatgcttcgaaagatgagctgaataacgtacataactctctcttaaaaataataaagtacaatggcgcccaatctgcaagatgcttgggagaacagttgggtttaaaaggccgaactgttttaccaattttgtgcgatttgctgtcaaggtgtttactcgatacacgtttggataagcctctatctcttgaatctcgatttgagttggccagttatggctaagaaagggttctcaagtttccatagaaaagcagtctcttcccaagatacgcttgaatcgatagagcttgtctctagcgctaattgtctagaaagtgttacgtatcaagatatatcagcatttcccgaaacaattgcggtagagattaatttccgattaagcattcttcgctttttagcgcgaaagtgcgaaaccattgtggccaaatcaattgaaccacatcgtgtagagctacagcaaaactatagtagaaaaatacccagtgcaataacgatatatcgatggtggcttgcttttcgaaaatcagactacaaccccattagcttagcacctaatatcaaggatagaggtaatagagagacaaaagtgtcaacagttgttgattctattatggaacaggcagttgaaagagttatatctggacgaaaagtcaatgttagctctgcatataaacgtgttcgacgaaaagttcgtcaatacaatctaactcatggaacgaaatacacgtatcctaagtacgaatctgtaagaaagcgagtaaaaaagaaaaccccatttgagttattagccgcagggaaaggggagagagtagctaagagagagtttcgccgaatgggaaaaaagatcctcacgtctagcgtgctagagagggttgaaatagatcacactgtcgttgacctttttgcagtacacgaagagtatcgaatcccattgggccgaccttggcttactcaattggttgattgttacagtaaagctgtaatcggtttttatttaggtttcgagcctcctagctatgtgtcggtttcccttgcacttaagaatgcaatacaacgcaaagatgacttaatctcctcgtatgaatcgatcgagaatgaatggctatgttatggcatcccagacctactcgtaactgataatggtaaagagtttttgtcgaaagcatttgatcaagcatgtgaatcactattgatcaatgtgcatcaaaataaagttgagacgcccgacaacaaacctcatgttgaacgtaactacgggactattaatacttctctgttagacgatttacctgggaaatccttcagccagtaccttcaaagagaagggtacgactctgtgggagaagctacccttacactcaatgagattagagaaatttacttaatttggttggtggatatttatcataaaaaacccaatcagagaggcactaattgtcctaatgttgcgtggaaaaagggttgtcaagaatgggaaccagaggagttctctggttctaaagacgaattagactttaaatttgctattgttgattacaaacaacttactaaagtagggataactgtctacaaagaactgagttatagcaatgaccgtttagctgaatatagagggaagaaaggaaaccataaagttcagttcaagtataaccctgagtgtatggcagttatttgggtgttggatgaggatatgaatgagtactttacagttaatgcgattgactacgaatatgcaagtagagtatcactttggcaacataaatataacatgaaatatcaagcagaactaaattcagcagaatatgatgaggacaaggaaattgatgcagaaataaaaattgaagaaatcgcagatcgttcaattgttaagactaacaaaatcagagctcggaggcgtggcgctaggcatcaagagaatagcgcaagggctaagtcaatcagtaatgcgaacccggcctcgatacaaaaacatgaagatgaaatcgttagtgcagataatgacgattgggatattgattatgtctgagaaatcgtcaaatgagtgaaacgcgtgaggctcgtatatcaagagctaaaagggcatttgtatccacaccgagcgttaggaaaatcttgagttacatggatagatgtagagatctatcagacctagagtctgagcctacatgcatgatggtctatggtgcttcgggtgtaggtaaaacgaccgtcatcaagaaatacttaaatcaaaacagaagagagtccgaagccgggggcgatataataccggttttgcatattgagttgccagacaatgcgaagccagtagatgcagcaagggaattgctggttgaaatgggtgacccgctagcactttatgaaactgacttagctagattgacgaaaagactgactgaattaatccctgcggtcggcgtgaagctgattattatcgatgagttccaacatttggtggaagaaaggtcaaatcgggttcttacccaagtaggtaattggctaaaaatgatacttaacaaaacgaaatgtccaattgttatatttggtatgccatactcaaaagttgtactgcaagcaaactcgcaacttcacgggcgattttccattcaggttgaactgcgcccctttagctaccagggaggtagaggtgtatttaaaacttttttggaataccttgataaagccctaccttttgaaaaacaggctggcttagccaacgaaagtttgcagaaaaaattgtatgcattctctcagggaaacatgcgttcgttgagaaaccttatttatcaagcatctatcgaagcaattgataatcagcatgagacgataaccgaagaagatttcgtttttgcatcgaagttgacatcgggcgataaacccaactcatggaaaaatccttttgaggagggtgttgaggtaacagaagatatgttacgaccgccaccaaaagatattggttgggaggactatttgagacattcaaccccgagagtgagtaaaccaggtagaaataaaaactttttcgaataacctaggctgctgcgctgctgccaccgctgagcaataactagcataaccccttggggcctctaaacgggtcttgaggggttttttgctgaaacctcaggcatttgttgttgatacaaccataaaatgataattacacccataaattgataattatcacacccataaattgatattgcctcttcatggtctaaacttcagtaagtttacgacattttcatgaagaggtcatttccggggtacagctcgtccatgccgagagtgatcccggcggcggtcacgaactccagcaggaccatgtgatcgcgcttctcgttggggtctttgctcagggcggactgggtgctcaggtagtggttgtcgggcagcagcacggggccgtcgccgatgggggtgttctgctggtagtggtcggcgagctgcacgctgccgtcctcgatgttgtggcggatcttgaagttcaccttgatgccgttcttctgcttgtcggccatgatatagacgttgtggctgttgtagttgtactccagcttgtgccccaggatgttgccgtcctccttgaagtcgatgcccttcagctcgatgcggttcaccagggtgtcgccctcgaacttcacctcggcgcgggtcttgtagttgccgtcgtccttgaagaagatggtgcgctcctggacgtagccttcgggcatggcggacttgaagaagtcgtgctgcttcatgtggtcggggtagcggctgaagcactgcacgccgtaggtcagggtggtcacgagggtgggccagggcacgggcagcttgccggtggtgcagatgaacttcagggtcagcttgccgtaggtggcatcgccctcgccctcgccggacacgctgaacttgtggccgtttacgtcgccgtccagctcgaccaggatgggcaccaccccggtgaacagctcctcgcccttgctcactgggccaggattctcctcgacgtcaccgcatgttagcagacttcctctgccctctccactgccgaattcctttttcttttttgcctggccggcctttttcgtggccgccggccttttgtcgcctcccagctgagacaggtcgatccgtgtctcgtacaggccggtgatgctctggtggatcagggtggcgtccagcacctctttggtgctggtgtacctcttccggtcgatggtggtgtcaaagtacttgaaggcggcaggggctcccagattggtcagggtaaacaggtggatgatattctcggcctgctctctgatgggcttatcccggtgcttgttgtaggcggacagcactttgtccagattagcgtcggccaggatcactctcttggagaactcgctgatctgctcgatgatctcgtccaggtagtgcttgtgctgttccacaaacagctgtttctgctcattatcctcgggggagcccttcagcttctcatagtggctggccaggtacaggaagttcacatatttggagggcagggccagttcgtttcccttctgcagttcgccggcagaggccagcattctcttccggccgttttccagctcgaacagggagtacttaggcagcttgatgatcaggtcctttttcacttctttgtagcccttggcttccagaaagtcgatgggattcttctcgaagctgcttctttccatgatggtgatccccagcagctctttcacactcttcagtttcttggacttgcccttttccactttggccaccaccagcacagaataggccacggtggggctgtcgaagccgccgtacttcttagggtcccagtccttctttctggcgatcagcttatcgctgttcctcttgggcaggatagactctttgctgaagccgcctgtctgcacctcggtctttttcacgatattcacttggggcatgctcagcactttccgcacggtggcaaaatcccggcccttatcccacacgatctccccggtttcgccgtttgtctcgatcagaggccgcttccggatctcgccgttggccagggtaatctcggtcttgaaaaagttcatgatgttgctgtagaagaagtacttggcggtagccttgccgatttcctgctcgctcttggcgatcatcttccgcacgtcgtacaccttgtagtcgccgtacacgaactcgctttccagcttagggtactttttgatcagggcggttcccacgacggcgttcaggtaggcgtcgtgggcgtggtggtagttgttgatctcgcgcactttgtaaaactggaaatccttccggaaatcggacaccagcttggacttcagggtgatcactttcacttcccggatcagcttgtcattctcgtcgtacttagtgttcatccgggagtccaggatctgtgccacgtgctttgtgatctgccgggtttccaccagctgtctcttgatgaagccggccttatccagttcgctcaggccgcctctctcggccttggtcagattgtcgaactttctctgggtaatcagcttggcgttcagatggggttttcctcgaacagctggttgtaggtctgcaccagctggatgaacagcttgtccacgtcgctgttgtcggggttcaggtcgccctcgatcaggaagtggccccggaacttgatcatgtgggccagggccagatagatcagccgcaggtcggccttgtcggtgctgtccaccagtttctttctcaggtggtagatggtggggtacttctcgtggtaggccacctcgtccacgatgttgccgaagatggggtgccgctcgtgcttcttatcctcttccaccaggaaggactcttccagtctgtggaagaagctgtcgtccaccttggccatctcgttgctgaagatctcttgcagatagcagatccggttcttccgtctggtgtatcttcttctggcggttctcttcagccgggtggcctcggctgtttcgccgctgtcgaacagcagggctccgatcaggttcttcttgatgctgtgccggtcggtgttgcccagcaccttgaatttcttgctgggcaccttgtactcgtcggtgatcacggcccagcccacagagttggtgccgatgtccaggccgatgctgtacttcttgtcggctgctgggactccgtggataccgaccttccgcttcttctttggggccatcttatcgtcatcgtctttgtaatcaatatcatgatccttgtagtctccgtcgtggtccagtccttactgcagtagttttgctgaaatactcgattcacaaaaatatcaacttatggttgttttgtgagatatcaatatatggttgttttgtggttaagttgctgattataaataattattaaatatcactttatggttgcatcaacaggtaccgagctcgaattcactggccgtcgttttacaacgtcgtgactgggaaaaccctggcgttacccaacttaatcgccttgcagcacatccccctttcgccagctggcgtaatagcgaagaggcccgcaccgatcgcccttcccaacagttgcgcagcctgaatggcgaatggcgcctgatgcggtattttctccttacgcatctgtgcggtatttcacaccgcatatggtgcactctcagtacaatctgctctgatgccgcatagttaagccagccccgacacccgccaacacccgctgacgcgccctgacgggcttgtctgctcccggcatccgcttacagacaagctgtgaccgtctccgggagctgcatgtgtcagaggttttcaccgtcatcaccgaaacgcgcgagacgaaagggcctcgtgatacgcctatttttataggttaatgtcatgataataatggtttcttaga

SEQ ID NO: 883 - DNA, 15248 bp, Synthetic construct
  source 1..15248: mol_type = other DNA
gcacttttcggggaaatgtgcgcggaacccctatttgtttatttttctaaatacattcaaatatgtatccgctcatgagacaataaccctgataaatgcttcaataatattgaaaaaggaagagtatgagtattcaacatttccgtgtcgcccttattcccttttttgcggcattttgccttcctgtttttgctcacccagaaacgctggtgaaagtaaaagatgctgaagatcagttgggtgcacgagtgggttacatcgaactggatctcaacagcggtaagatccttgagagttttcgccccgaagaacgttttccaatgatgagcacttttaaagttctgctatgtggcgcggtattatcccgtattgacgccgggcaagagcaactcggtcgccgcatacactattctcagaatgacttggttgagtactcaccagtcacagaaaagcatcttacggatggcatgacagtaagagaattatgcagtgctgccataaccatgagtgataacactgcggccaacttacttctgacaacgatcggaggaccgaaggagctaaccgcttttttgcacaacatgggggatcatgtaactcgccttgatcgttgggaaccggagctgaatgaagccataccaaacgacgagcgtgacaccacgatgcctgtagcaatggcaacaacgttgcgcaaactattaactggcgaactacttactctagcttcccggcaacaattaatagactggatggaggcggataaagttgcaggaccacttctgcgctcggcccttccggctggctggtttattgctgataaatctggagccggtgagcgtgggtctcgcggtatcattgcagcactggggccagatggtaagccctcccgtatcgtagttatctacacgacggggagtcaggcaactatggatgaacgaaatagacagatcgctgagataggtgcctcactgattaagcattggtaactgtcagaccaagtttactcatatatactttagattgatttaaaacttcatttttaatttaaaaggatctaggtgaagatcctttttgataatctcatgaccaaaatcccttaacgtgagttttcgttccactgagcgtcagaccccgtagaaaagatcaaaggatcttcttgagatcctttttttctgcgcgtaatctgctgcttgcaaacaaaaaaaccaccgctaccagcggtggtttgtttgccggatcaagagctaccaactctttttccgaaggtaactggcttcagcagagcgcagataccaaatactgttcttctagtgtagccgtagttaggccaccacttcaagaactctgtagcaccgcctacatacctcgctctgctaatcctgttaccagtggctgctgccagtggcgataagtcgtgtcttaccgggttggactcaagacgatagttaccggataaggcgcagcggtcgggctgaacggggggttcgtgcacacagcccagcttggagcgaacgacctacaccgaactgagatacctacagcgtgagctatgagaaagcgccacgcttcccgaagggagaaaggcggacaggtatccggtaagcggcagggtcggaacaggagagcgcacgagggagcttccagggggaaacgcctggtatctttatagtcctgtcgggtttcgccacctctgacttgagcgtcgatttttgtgatgctcgtcaggggggcggagcctatggaaaaacgccagcaacgcggcctttttacggttcctggccttttgctggccttttgctcacatgttctttcctgcgttatcccctgattctgtggataaccgtattaccgcctttgagtgagctgataccgctcgccgcagccgaacgaccgagcgcagcgagtcagtgagcgaggagcgactcctgcattaggaaattaatacgactcactataggggaattgtgagcggataacaattcccctgtagaaataattttgtttaactttaataaggagatataccatgggtgaactgccgagtaggtagctgataacagtacagcgcggctgaaatcatcattaaagcggtgaactgccgagtaggtagctgataacggatccgaattcgagcgaaggagatatacatatgtttttgcaaagacctaaaccttacagcgatgaaagtttagaaagtttctttatccgagtggctaacaaaaatggctacggtgatgtccatcgcttcctagaagccactaaacgattccttcaagacattgaccataatggctatcaaacctttccgactgatataactcggataaacccatactcagctaaaaacagttccagcgcacgaactgcgtcattcctgaaacttgcacaattgacatttaatgaaccgccagagctacttgggttggcaattaacagaacaaacatgaaatactcgccgtcaactagcgcggttgttagaggtgcagaagtctttcctcgcagtttactacggacgcactccatcccctgctgtcctttgtgtctgcgagaaaatggctacgcctcctacctttggcactttcaggggtacgaatactgccacagccataacgtacctttaattaccacttgtagctgtggtaaggagtttgactaccgagtatctgggttaaagggcatttgctgcaaatgcaaggagcctatcaccttaaccagcagggagaacggtcatgaggcagcgtgtactgtttcaaactggcttgctggccatgaatctaaacctctgccaaatcttcctaaaagctaccgatggggtttagttcattggtggatgggtattaaagatagcgagttcgatcacttttcgttcgttcaatttttctcaaactggccaaggtcattccactcgataatcgaagatgaagtagagttcaaccttgagcatgctgttgtcagcacgtctgaattacgactaaaagatcttcttggtcgattgtttttcggttcaattcggttacctgagcggaatcttcaacacaatatcatccttggtgagcttctctgctatttagaaaatcgtttatggcaagacaagggattaatcgccaacctcaaaatgaacgcgttagaggcgactgtaatgttaaattgtagcctcgatcagattgcatcaatggttgaacaacgcatcttgaagccaaatcgaaaaagcaagcccaacagccctcttgatgttaccgattatctatttcatttcggcgatattttctgtctttggttagctgagttccaaagcgatgagtttaaccgttcgttttatgtgtcgaggtggtaaatgcaaactctgaaagaactaatcgcatccaatcctgacgacttaacaactgaacttaagagagcatttcgtccactcacaccgcatattgcaattgatggtaatgaacttgacgcactgacgatattagtcaatttaaccgataagactgatgatcagaaagacctgctcgatcgagccaaatgcaagcaaaaacttcgagatgaaaaatggtgggctagctgcataaattgcgttaattacagacaaagccataacccaaaattcccggatatacgttctgaaggcgtgattcgaacccaagccctgggtgaattaccgagtttcctactctcgtcctcaaaaatcccaccataccattggtcatatagccatgattcaaaatacgtcaacaaaagcgcattcctcaccaatgagttttgttgggatggtgagatctcatgtttgggtgagcttcttaaagatgcagatcacccactttggaatactttgaaaaagttaggttgttctcaaaaaacttgcaaagcaatggcaaaacaactagctgatattactctcacgactatcaatgtcacactcgcaccaaattacctgactcaaatatctctccccgatagtgatacatcctacatttcactctctcctgttgcatcgctatcgatgcaaagccactttcatcagaggctccaagatgaaaatcggcatagcgcgataacgcggtttagccgaactaccaacatgggggtcactgcgatgacatgtggcggcgcatttagaatgttaaagtctggcgctaagttttccagcccccctcatcaccgattaaacagtaaacgaagttggttgacgtcagagcatgttcagtcattaaaacagtaccagcgcctcaacaaaagcctcatacctgaaaactctcggattgcactccgtagaaaatacaaaatcgagcttcaaaatatggtcagatcttggtttgcaatgcaagaccatacccttgattcgaacatacttatccaacatttgaatcatgacctatcttacttaggagccacaaaacgttttgcatacgatccagcgatgaccaagctctttactgagcttttgaaacgagagttatcaaattcaatcaataatggtgagcaacacactaatggatcgtttttagtcctaccgaatatcagggtttgtggcgcaacagctttaagctccccggtaacggtggggattccatcacttacagctttctttggcttcgttcacgcatttgaacggaatataaatcgcaccacctcatcgtttcgtgttgaatcctttgcgatatgcgtccatcaactacatgtcgagaagcgaggtttgacagcagagtttgtggaaaaaggcgacgggactatatccgctcccgcgacccgggatgactggcagtgtgatgtcgtatttagccttattttgaacaccaactttgctcaacatattgaccaagatacgttagttacatcactaccaaagcgattggctcggggttcagcaaaaattgcgattgatgactttaaacatatcaactcattctcgacattagaaacagcgatcgaatctctgccaatagaagctggtaggtggttatcactttacgcacagtcaaacaataatctaagtgatctattagcagccatgacagaggaccatcagctcatggcaagctgcgtcggttaccacttgttagaagagcccaaagataaaccaaactccctcagaggttacaaacacgctatcgccgagtgcatcattggactcattaactcaatcacctttagctcagagactgatcccaacacaatcttttggtcgctaaagaactatcaaaactacctagtggtacagccaaggagtatcaacgatgaaactaccgacaaatctagcctatgagcgctctatcgacccatcagatgtctgtttttttgtcgtctggcccgatgatagaaaaacacctttaacctacaattctcgtactctgctcgggcaaatggaagcggcatcattagcctatgatgtctcaggtcaaccaataaaaagtgccaccgctgaggcgttagctcaagggaaccctcatcaagttgatttctgccacgttccatacggtgcgagtcatattgaatgcagtttctccgtctcgttttcttctgaactacgtcaaccatataagtgtaactcaagcaaagttaaacaaacgctagtgcaattagtcgagctctacgaaacgaaaatcggctggactgagctagcaacccgatatttgatgaacatttgcaacggtaaatggctgtggaaaaatacccgtaaagcctattgctggaacattgtacttacaccttggccttggaacggggaaaaggttggatttgaagatattcgtactaactacacctcacggcaagactttaaaaataataaaaattggtctgctatagttgaaatgatcaaaaccgcattttctagtactgatgggctggcgatatttgaagtcagggccaccttgcacttgccaacgaatgctatggtgcggccaagccaagttttcacagaaaaagaaagtggcagtaaaagtaaatctaaaactcaaaacagtcgagtttttcagagtacaactattgatggtgaacgatcgccaatactaggggcctttaaaacgggagcagctattgcaaccattgacgactggtatcctgaagccactgagccactaagggtcggacggtttggggttcatcgcgaagatgtcacttgctaccgtcatccgtctaccggaaaagattttttctcgatattacaacaagcagagcactatattgaagtgttgagcgccaacaaaactcccgctcaagaaactatcaacgacatgcactttttaatggctaacctgattaagggtgggatgttccagcataaaggagactgactgtgaaatggtattataagacaatcacctttctgccagagttgtgcaacaacgagtcactggctgcaaagtgtctccgcgttctgcatggatttaactatcagtatgagacacgaaatatcggcgtttcatttccgctttggtgtgatgcaacggttggaaaaaagatttcatttgtcagcaagaacaagatagaactcgacttactacttaaacaacactatttcgtccaaatggaacaacttcaatactttcatatatccaacactgttctcgtcccagaagattgtacatacgtttcctttagacgctgtcaatctatagataagctcacagcagcagggctggcaaggaaaatcagacgcctggagaaacgtgctctatctagaggcgagcaatttgacccatcatcttttgctcaaaaagagcatactgcaatagcgcactaccactcacttggggagtccagcaaacagacgaaccgcaactttcgactcaatatcaggatgctctcggagcaaccccgtgaggggaactcgatttttagtagctatggcttatcaaattcagaaaactcgtttcagcctgtacccttaatctgacctttaataaggagatataccatggcgacaagtttacctacgccctcagcaattacgacttcggcgttagagtatgcattccatactcccgctcgcaatctaacgaaatctcgcggaaaaaacattcatcgttatgtcagtgtaaagatgagtaagaggattacggtagaatctactctagagtgtgatgcctgctatcactttgattttgagccaagtattgttcgcttttgcgctcaaccgattcgatttttatattatctcaatggtcagtctcactcctatgttcctgactttctagttcaatttgataccaacgagtttgttctatatgaagtaaagtcagcttatgctaagaacaaacctgattttgatgttgaatgggaggcgaaagtaaaagcagcaactgaactagggctagaattggagcttgttgaagagagtgatattagggatacggttgtattaaataatcttaagcgcatgcatcgttatgcttcgaaagatgagctgaataacgtacataactctctcttaaaaataataaagtacaatggcgcccaatctgcaagatgcttgggagaacagttgggtttaaaaggccgaactgttttaccaattttgtgcgatttgctgtcaaggtgtttactcgatacacgtttggataagcctctatctcttgaatctcgatttgagttggccagttatggctaagaaagggttctcaagtttccatagaaaagcagtctcttcccaagatacgcttgaatcgatagagcttgtctctagcgctaattgtctagaaagtgttacgtatcaagatatatcagcatttcccgaaacaattgcggtagagattaatttccgattaagcattcttcgctttttagcgcgaaagtgcgaaaccattgtggccaaatcaattgaaccacatcgtgtagagctacagcaaaactatagtagaaaaatacccagtgcaataacgatatatcgatggtggcttgcttttcgaaaatcagactacaaccccattagcttagcacctaatatcaaggatagaggtaatagagagacaaaagtgtcaacagttgttgattctattatggaacaggcagttgaaagagttatatctggacgaaaagtcaatgttagctctgcatataaacgtgttcgacgaaaagttcgtcaatacaatctaactcatggaacgaaatacacgtatcctaagtacgaatctgtaagaaagcgagtaaaaaagaaaaccccatttgagttattagccgcagggaaaggggagagagtagctaagagagagtttcgccgaatgggaaaaaagatcctcacgtctagcgtgctagagagggttgaaatagatcacactgtcgttgacctttttgcagtacacgaagagtatcgaatcccattgggccgaccttggcttactcaattggttgattgttacagtaaagctgtaatcggtttttatttaggtttcgagcctcctagctatgtgtcggtttcccttgcacttaagaatgcaatacaacgcaaagatgacttaatctcctcgtatgaatcgatcgagaatgaatggctatgttatggcatcccagacctactcgtaactgataatggtaaagagtttttgtcgaaagcatttgatcaagcatgtgaatcactattgatcaatgtgcatcaaaataaagttgagacgcccgacaacaaacctcatgttgaacgtaactacgggactattaatacttctctgttagacgatttacctgggaaatccttcagccagtaccttcaaagagaagggtacgactctgtgggagaagctacccttacactcaatgagattagagaaatttacttaatttggttggtggatatttatcataaaaaacccaatcagagaggcactaattgtcctaatgttgcgtggaaaaagggttgtcaagaatgggaaccagaggagttctctggttctaaagacgaattagactttaaatttgctattgttgattacaaacaacttactaaagtagggataactgtctacaaagaactgagttatagcaatgaccgtttagctgaatatagagggaagaaaggaaaccataaagttcagttcaagtataaccctgagtgtatggcagttatttgggtgttggatgaggatatgaatgagtactttacagttaatgcgattgactacgaatatgcaagtagagtatcactttggcaacataaatataacatgaaatatcaagcagaactaaattcagcagaatatgatgaggacaaggaaattgatgcagaaataaaaattgaagaaatcgcagatcgttcaattgttaagactaacaaaatcagagctcggaggcgtggcgctaggcatcaagagaatagcgcaagggctaagtcaatcagtaatgcgaacccggcctcgatacaaaaacatgaagatgaaatcgttagtgcagataatgacgattgggatattgattatgtctgagaaatcgtcaaatgagtgaaacgcgtgaggctcgtatatcaagagctaaaagggcatttgtatccacaccgagcgttaggaaaatcttgagttacatggatagatgtagagatctatcagacctagagtctgagcctacatgcatgatggtctatggtgcttcgggtgtaggtaaaacgaccgtcatcaagaaatacttaaatcaaaacagaagagagtccgaagccgggggcgatataataccggttttgcatattgagttgccagacaatgcgaagccagtagatgcagcaagggaattgctggttgaaatgggtgacccgctagcactttatgaaactgacttagctagattgacgaaaagactgactgaattaatccctgcggtcggcgtgaagctgattattatcgatgagttccaacatttggtggaagaaaggtcaaatcgggttcttacccaagtaggtaattggctaaaaatgatacttaacaaaacgaaatgtccaattgttatatttggtatgccatactcaaaagttgtactgcaagcaaactcgcaacttcacgggcgattttccattcaggttgaactgcgcccctttagctaccagggaggtagaggtgtatttaaaacttttttggaataccttgataaagccctaccttttgaaaaacaggctggcttagccaacgaaagtttgcagaaaaaattgtatgcattctctcagggaaacatgcgttcgttgagaaaccttatttatcaagcatctatcgaagcaattgataatcagcatgagacgataaccgaagaagatttcgtttttgcatcgaagttgacatcgggcgataaacccaactcatggaaaaatccttttgaggagggtgttgaggtaacagaagatatgttacgaccgccaccaaaagatattggttgggaggactatttgagacattcaaccccgagagtgagtaaaccaggtagaaataaaaactttttcgaataacctaggctgctgcgctgctgccaccgctgagcaataactagcataaccccttggggcctctaaacgggtcttgaggggttttttgctgaaacctcaggcatttgttgttgatacaaccataaaatgataattacacccataaattgataattatcacacccataaattgatattgcctcttcatggtctaaacttcagtaagtttacgacattttcatgaagaggtcatttccggggtacagctcgtccatgccgagagtgatcccggcggcggtcacgaactccagcaggaccatgtgatcgcgcttctcgttggggtctttgctcagggcggactgggtgctcaggtagtggttgtcgggcagcagcacggggccgtcgccgatgggggtgttctgctggtagtggtcggcgagctgcacgctgccgtcctcgatgttgtggcggatcttgaagttcaccttgatgccgttcttctgcttgtcggccatgatatagacgttgtggctgttgtagttgtactccagcttgtgccccaggatgttgccgtcctccttgaagtcgatgcccttcagctcgatgcggttcaccagggtgtcgccctcgaacttcacctcggcgcgggtcttgtagttgccgtcgtccttgaagaagatggtgcgctcctggacgtagccttcgggcatggcggacttgaagaagtcgtgctgcttcatgtggtcggggtagcggctgaagcactgcacgccgtaggtcagggtggtcacgagggtgggccagggcacgggcagcttgccggtggtgcagatgaacttcagggtcagcttgccgtaggtggcatcgccctcgccctcgccggacacgctgaacttgtggccgtttacgtcgccgtccagctcgaccaggatgggcaccaccccggtgaacagctcctcgcccttgctcactgggccaggattctcctcgacgtcaccgcatgttagcagacttcctctgccctctccactgccgaattcctttttcttttttgcctggccggcctttttcgtggccgccggccttttgtcgcctcccagctgagacaggtcgatccgtgtctcgtacaggccggtgatgctctggtggatcagggtggcgtccagcacctctttggtgctggtgtacctcttccggtcgatggtggtgtcaaagtacttgaaggcggcaggggctcccagattggtcagggtaaacaggtggatgatattctcggcctgctctctgatgggcttatcccggtgcttgttgtaggcggacagcactttgtccagattagcgtcggccaggatcactctcttggagaactcgctgatctgctcgatgatctcgtccaggtagtgcttgtgctgttccacaaacagctgtttctgctcattatcctcgggggagcccttcagcttctcatagtggctggccaggtacaggaagttcacatatttggagggcagggccagttcgtttcccttctgcagttcgccggcagaggccagcattctcttccggccgttttccagctcgaacagggagtacttaggcagcttgatgatcaggtcctttttcacttctttgtagcccttggcttccagaaagtcgatgggattcttctcgaagctgcttctttccatgatggtgatccccagcagctctttcacactcttcagtttcttggacttgcccttttccactttggccaccaccagcacagaataggccacggtggggctgtcgaagccgccgtacttcttagggtcccagtccttctttctggcgatcagcttatcgctgttcctcttgggcaggatagactctttgctgaagccgcctgtctgcacctcggtctttttcacgatattcacttggggcatgctcagcactttccgcacggtggcaaaatcccggcccttatcccacacgatctccccggtttcgccgtttgtctcgatcagaggccgcttccggatctcgccgttggccagggtaatctcggtcttgaaaaagttcatgatgttgctgtagaagaagtacttggcggtagccttgccgatttcctgctcgctcttggcgatcatcttccgcacgtcgtacaccttgtagtcgccgtacacgaactcgctttccagcttagggtactttttgatcagggcggttcccacgacggcgttcaggtaggcgtcgtgggcgtggtggtagttgttgatctcgcgcactttgtaaaactggaaatccttccggaaatcggacaccagcttggacttcagggtgatcactttcacttcccggatcagcttgtcattctcgtcgtacttagtgttcatccgggagtccaggatctgtgccacgtgctttgtgatctgccgggtttccaccagctgtctcttgatgaagccggccttatccagttcgctcaggccgcctctctcggccttggtcagattgtcgaactttctctgggtaatcagcttggcgttcaatttcactttggtcagctcgttatacacggtgaagtactcgtacagcaggctgtgcttgggcagcaccttctcgttgggcaggttcttatcgaagttggtcatccgctcgatgaagctctgggcggaagcgcccttgtccaccacttcctcgaagttccagggggtgatggtttcctcgctctttctggtcatccaggcgaatctgctgtttcccctggccagagggcccacgtagtaggggatgcggaaggtcaggatcttctcgatcttttcccggttgtccttcaggaatgggtaaaaatcttcctgccgccgcagaatggcgtgcagctctcccaggtggatctggtgggggatgctgccgttgtcgaaggtccgctgcttccgcagcaggtcctctctgttcagcttcacgagcagttcctcggtgccgtccatcttttccaggatgggcttgatgaacttgtagaactcttcctggctggctccgccgtcaatgtagccggcgtagccgttcttgctctggtcgaagaaaatctctttgtacttctcaggcagctgctgccgcacgagagctttcagcagggtcaggtcctggtggtgctcgtcgtatctcttgatcatagaggcgctcaggggggccttggtgatctcggtgttcactctcaggatgtcgctcagcaggatggcgtcggacaggttcttggcggccagaaacaggtcggcgtactggtcgccgatctgggccagcaggttgtccaggtcgtcgtcgtaggtgtccttgctcagctgcagtttggcatcctcggccaggtcgaagttgctcttgaagttgggggtcaggcccaggctcagggcaatcaggtttccgaacaggccattcttcttctcgccgggcagctgggcgatcagattttccagccgtctgctcttgctcagtctggcagacaggatggccttggcgtccacgccgctggcgttgatggggttttcctcgaacagctggttgtaggtctgcaccagctggatgaacagcttgtccacgtcgctgttgtcggggttcaggtcgccctcgatcaggaagtggccccggaacttgatcatgtgggccagggccagatagatcagccgcaggtcggccttgtcggtgctgtccaccagtttctttctcaggtggtagatggtggggtacttctcgtggtaggccacctcgtccacgatgttgccgaagatggggtgccgctcgtgcttcttatcctcttccaccaggaaggactcttccagtctgtggaagaagctgtcgtccaccttggccatctcgttgctgaagatctcttgcagatagcagatccggttcttccgtctggtgtatcttcttctggcggttctcttcagccgggtggcctcggctgtttcgccgctgtcgaacagcagggctccgatcaggttcttcttgatgctgtgccggtcggtgttgcccagcaccttgaatttcttgctgggcaccttgtactcgtcggtgatcacggcccagcccacagagttggtgccgatgtccaggccgatgctgtacttcttgtcggctgctgggactccgtggataccgaccttccgcttcttctttggggccatcttatcgtcatcgtctttgtaatcaatatcatgatccttgtagtctccgtcgtggtccagtccttactgcagtagttttgctgaaatactcgattcacaaaaatatcaacttatggttgttttgtgagatatcaatatatggttgttttgtggttaagttgctgattataaataattattaaatatcactttatggttgcatcaacaggtaccgagctcgaattcactggccgtcgttttacaacgtcgtgactgggaaaaccctggcgttacccaacttaatcgccttgcagcacatccccctttcgccagctggcgtaatagcgaagaggcccgcaccgatcgcccttcccaacagttgcgcagcctgaatggcgaatggcgcctgatgcggtattttctccttacgcatctgtgcggtatttcacaccgcatatggtgcactctcagtacaatctgctctgatgccgcatagttaagccagccccgacacccgccaacacccgctgacgcgccctgacgggcttgtctgctcccggcatccgcttacagacaagctgtgaccgtctccgggagctgcatgtgtcagaggttttcaccgtcatcaccgaaacgcgcgagacgaaagggcctcgtgatacgcctatttttataggttaatgtcatgataataatggtttcttagacgtcaggtg

SEQ ID NO: 884 - DNA, 16322 bp, Synthetic construct
  source 1..16322: mol_type = other DNA
aggtggcacttttcggggaaatgtgcgcggaacccctatttgtttatttttctaaatacattcaaatatgtatccgctcatgagacaataaccctgataaatgcttcaataatattgaaaaaggaagagtatgagtattcaacatttccgtgtcgcccttattcccttttttgcggcattttgccttcctgtttttgctcacccagaaacgctggtgaaagtaaaagatgctgaagatcagttgggtgcacgagtgggttacatcgaactggatctcaacagcggtaagatccttgagagttttcgccccgaagaacgttttccaatgatgagcacttttaaagttctgctatgtggcgcggtattatcccgtattgacgccgggcaagagcaactcggtcgccgcatacactattctcagaatgacttggttgagtactcaccagtcacagaaaagcatcttacggatggcatgacagtaagagaattatgcagtgctgccataaccatgagtgataacactgcggccaacttacttctgacaacgatcggaggaccgaaggagctaaccgcttttttgcacaacatgggggatcatgtaactcgccttgatcgttgggaaccggagctgaatgaagccataccaaacgacgagcgtgacaccacgatgcctgtagcaatggcaacaacgttgcgcaaactattaactggcgaactacttactctagcttcccggcaacaattaatagactggatggaggcggataaagttgcaggaccacttctgcgctcggcccttccggctggctggtttattgctgataaatctggagccggtgagcgtgggtctcgcggtatcattgcagcactggggccagatggtaagccctcccgtatcgtagttatctacacgacggggagtcaggcaactatggatgaacgaaatagacagatcgctgagataggtgcctcactgattaagcattggtaactgtcagaccaagtttactcatatatactttagattgatttaaaacttcatttttaatttaaaaggatctaggtgaagatcctttttgataatctcatgaccaaaatcccttaacgtgagttttcgttccactgagcgtcagaccccgtagaaaagatcaaaggatcttcttgagatcctttttttctgcgcgtaatctgctgcttgcaaacaaaaaaaccaccgctaccagcggtggtttgtttgccggatcaagagctaccaactctttttccgaaggtaactggcttcagcagagcgcagataccaaatactgttcttctagtgtagccgtagttaggccaccacttcaagaactctgtagcaccgcctacatacctcgctctgctaatcctgttaccagtggctgctgccagtggcgataagtcgtgtcttaccgggttggactcaagacgatagttaccggataaggcgcagcggtcgggctgaacggggggttcgtgcacacagcccagcttggagcgaacgacctacaccgaactgagatacctacagcgtgagctatgagaaagcgccacgcttcccgaagggagaaaggcggacaggtatccggtaagcggcagggtcggaacaggagagcgcacgagggagcttccagggggaaacgcctggtatctttatagtcctgtcgggtttcgccacctctgacttgagcgtcgatttttgtgatgctcgtcaggggggcggagcctatggaaaaacgccagcaacgcggcctttttacggttcctggccttttgctggccttttgctcacatgttctttcctgcgttatcccctgattctgtggataaccgtattaccgcctttgagtgagctgataccgctcgccgcagccgaacgaccgagcgcagcgagtcagtgagcgaggagcgactcctgcattaggaaattaatacgactcactataggggaattgtgagcggataacaattcccctgtagaaataattttgtttaactttaataaggagatataccatgggtgaactgccgagtaggtagctgataacagtacagcgcggctgaaatcatcattaaagcggtgaactgccgagtaggtagctgataacggatccgaattcgagcgaaggagatatacatatgtttttgcaaagacctaaaccttacagcgatgaaagtttagaaagtttctttatccgagtggctaacaaaaatggctacggtgatgtccatcgcttcctagaagccactaaacgattccttcaagacattgaccataatggctatcaaacctttccgactgatataactcggataaacccatactcagctaaaaacagttccagcgcacgaactgcgtcattcctgaaacttgcacaattgacatttaatgaaccgccagagctacttgggttggcaattaacagaacaaacatgaaatactcgccgtcaactagcgcggttgttagaggtgcagaagtctttcctcgcagtttactacggacgcactccatcccctgctgtcctttgtgtctgcgagaaaatggctacgcctcctacctttggcactttcaggggtacgaatactgccacagccataacgtacctttaattaccacttgtagctgtggtaaggagtttgactaccgagtatctgggttaaagggcatttgctgcaaatgcaaggagcctatcaccttaaccagcagggagaacggtcatgaggcagcgtgtactgtttcaaactggcttgctggccatgaatctaaacctctgccaaatcttcctaaaagctaccgatggggtttagttcattggtggatgggtattaaagatagcgagttcgatcacttttcgttcgttcaatttttctcaaactggccaaggtcattccactcgataatcgaagatgaagtagagttcaaccttgagcatgctgttgtcagcacgtctgaattacgactaaaagatcttcttggtcgattgtttttcggttcaattcggttacctgagcggaatcttcaacacaatatcatccttggtgagcttctctgctatttagaaaatcgtttatggcaagacaagggattaatcgccaacctcaaaatgaacgcgttagaggcgactgtaatgttaaattgtagcctcgatcagattgcatcaatggttgaacaacgcatcttgaagccaaatcgaaaaagcaagcccaacagccctcttgatgttaccgattatctatttcatttcggcgatattttctgtctttggttagctgagttccaaagcgatgagtttaaccgttcgttttatgtgtcgaggtggtaaatgcaaactctgaaagaactaatcgcatccaatcctgacgacttaacaactgaacttaagagagcatttcgtccactcacaccgcatattgcaattgatggtaatgaacttgacgcactgacgatattagtcaatttaaccgataagactgatgatcagaaagacctgctcgatcgagccaaatgcaagcaaaaacttcgagatgaaaaatggtgggctagctgcataaattgcgttaattacagacaaagccataacccaaaattcccggatatacgttctgaaggcgtgattcgaacccaagccctgggtgaattaccgagtttcctactctcgtcctcaaaaatcccaccataccattggtcatatagccatgattcaaaatacgtcaacaaaagcgcattcctcaccaatgagttttgttgggatggtgagatctcatgtttgggtgagcttcttaaagatgcagatcacccactttggaatactttgaaaaagttaggttgttctcaaaaaacttgcaaagcaatggcaaaacaactagctgatattactctcacgactatcaatgtcacactcgcaccaaattacctgactcaaatatctctccccgatagtgatacatcctacatttcactctctcctgttgcatcgctatcgatgcaaagccactttcatcagaggctccaagatgaaaatcggcatagcgcgataacgcggtttagccgaactaccaacatgggggtcactgcgatgacatgtggcggcgcatttagaatgttaaagtctggcgctaagttttccagcccccctcatcaccgattaaacagtaaacgaagttggttgacgtcagagcatgttcagtcattaaaacagtaccagcgcctcaacaaaagcctcatacctgaaaactctcggattgcactccgtagaaaatacaaaatcgagcttcaaaatatggtcagatcttggtttgcaatgcaagaccatacccttgattcgaacatacttatccaacatttgaatcatgacctatcttacttaggagccacaaaacgttttgcatacgatccagcgatgaccaagctctttactgagcttttgaaacgagagttatcaaattcaatcaataatggtgagcaacacactaatggatcgtttttagtcctaccgaatatcagggtttgtggcgcaacagctttaagctccccggtaacggtggggattccatcacttacagctttctttggcttcgttcacgcatttgaacggaatataaatcgcaccacctcatcgtttcgtgttgaatcctttgcgatatgcgtccatcaactacatgtcgagaagcgaggtttgacagcagagtttgtggaaaaaggcgacgggactatatccgctcccgcgacccgggatgactggcagtgtgatgtcgtatttagccttattttgaacaccaactttgctcaacatattgaccaagatacgttagttacatcactaccaaagcgattggctcggggttcagcaaaaattgcgattgatgactttaaacatatcaactcattctcgacattagaaacagcgatcgaatctctgccaatagaagctggtaggtggttatcactttacgcacagtcaaacaataatctaagtgatctattagcagccatgacagaggaccatcagctcatggcaagctgcgtcggttaccacttgttagaagagcccaaagataaaccaaactccctcagaggttacaaacacgctatcgccgagtgcatcattggactcattaactcaatcacctttagctcagagactgatcccaacacaatcttttggtcgctaaagaactatcaaaactacctagtggtacagccaaggagtatcaacgatgaaactaccgacaaatctagcctatgagcgctctatcgacccatcagatgtctgtttttttgtcgtctggcccgatgatagaaaaacacctttaacctacaattctcgtactctgctcgggcaaatggaagcggcatcattagcctatgatgtctcaggtcaaccaataaaaagtgccaccgctgaggcgttagctcaagggaaccctcatcaagttgatttctgccacgttccatacggtgcgagtcatattgaatgcagtttctccgtctcgttttcttctgaactacgtcaaccatataagtgtaactcaagcaaagttaaacaaacgctagtgcaattagtcgagctctacgaaacgaaaatcggctggactgagctagcaacccgatatttgatgaacatttgcaacggtaaatggctgtggaaaaatacccgtaaagcctattgctggaacattgtacttacaccttggccttggaacggggaaaaggttggatttgaagatattcgtactaactacacctcacggcaagactttaaaaataataaaaattggtctgctatagttgaaatgatcaaaaccgcattttctagtactgatgggctggcgatatttgaagtcagggccaccttgcacttgccaacgaatgctatggtgcggccaagccaagttttcacagaaaaagaaagtggcagtaaaagtaaatctaaaactcaaaacagtcgagtttttcagagtacaactattgatggtgaacgatcgccaatactaggggcctttaaaacgggagcagctattgcaaccattgacgactggtatcctgaagccactgagccactaagggtcggacggtttggggttcatcgcgaagatgtcacttgctaccgtcatccgtctaccggaaaagattttttctcgatattacaacaagcagagcactatattgaagtgttgagcgccaacaaaactcccgctcaagaaactatcaacgacatgcactttttaatggctaacctgattaagggtgggatgttccagcataaaggagactgactgtgaaatggtattataagacaatcacctttctgccagagttgtgcaacaacgagtcactggctgcaaagtgtctccgcgttctgcatggatttaactatcagtatgagacacgaaatatcggcgtttcatttccgctttggtgtgatgcaacggttggaaaaaagatttcatttgtcagcaagaacaagatagaactcgacttactacttaaacaacactatttcgtccaaatggaacaacttcaatactttcatatatccaacactgttctcgtcccagaagattgtacatacgtttcctttagacgctgtcaatctatagataagctcacagcagcagggctggcaaggaaaatcagacgcctggagaaacgtgctctatctagaggcgagcaatttgacccatcatcttttgctcaaaaagagcatactgcaatagcgcactaccactcacttggggagtccagcaaacagacgaaccgcaactttcgactcaatatcaggatgctctcggagcaaccccgtgaggggaactcgatttttagtagctatggcttatcaaattcagaaaactcgtttcagcctgtacccttaatctgacctttaataaggagatataccatggcgacaagtttacctacgccctcagcaattacgacttcggcgttagagtatgcattccatactcccgctcgcaatctaacgaaatctcgcggaaaaaacattcatcgttatgtcagtgtaaagatgagtaagaggattacggtagaatctactctagagtgtgatgcctgctatcactttgattttgagccaagtattgttcgcttttgcgctcaaccgattcgatttttatattatctcaatggtcagtctcactcctatgttcctgactttctagttcaatttgataccaacgagtttgttctatatgaagtaaagtcagcttatgctaagaacaaacctgattttgatgttgaatgggaggcgaaagtaaaagcagcaactgaactagggctagaattggagcttgttgaagagagtgatattagggatacggttgtattaaataatcttaagcgcatgcatcgttatgcttcgaaagatgagctgaataacgtacataactctctcttaaaaataataaagtacaatggcgcccaatctgcaagatgcttgggagaacagttgggtttaaaaggccgaactgttttaccaattttgtgcgatttgctgtcaaggtgtttactcgatacacgtttggataagcctctatctcttgaatctcgatttgagttggccagttatggctaagaaagggttctcaagtttccatagaaaagcagtctcttcccaagatacgcttgaatcgatagagcttgtctctagcgctaattgtctagaaagtgttacgtatcaagatatatcagcatttcccgaaacaattgcggtagagattaatttccgattaagcattcttcgctttttagcgcgaaagtgcgaaaccattgtggccaaatcaattgaaccacatcgtgtagagctacagcaaaactatagtagaaaaatacccagtgcaataacgatatatcgatggtggcttgcttttcgaaaatcagactacaaccccattagcttagcacctaatatcaaggatagaggtaatagagagacaaaagtgtcaacagttgttgattctattatggaacaggcagttgaaagagttatatctggacgaaaagtcaatgttagctctgcatataaacgtgttcgacgaaaagttcgtcaatacaatctaactcatggaacgaaatacacgtatcctaagtacgaatctgtaagaaagcgagtaaaaaagaaaaccccatttgagttattagccgcagggaaaggggagagagtagctaagagagagtttcgccgaatgggaaaaaagatcctcacgtctagcgtgctagagagggttgaaatagatcacactgtcgttgacctttttgcagtacacgaagagtatcgaatcccattgggccgaccttggcttactcaattggttgattgttacagtaaagctgtaatcggtttttatttaggtttcgagcctcctagctatgtgtcggtttcccttgcacttaagaatgcaatacaacgcaaagatgacttaatctcctcgtatgaatcgatcgagaatgaatggctatgttatggcatcccagacctactcgtaactgataatggtaaagagtttttgtcgaaagcatttgatcaagcatgtgaatcactattgatcaatgtgcatcaaaataaagttgagacgcccgacaacaaacctcatgttgaacgtaactacgggactattaatacttctctgttagacgatttacctgggaaatccttcagccagtaccttcaaagagaagggtacgactctgtgggagaagctacccttacactcaatgagattagagaaatttacttaatttggttggtggatatttatcataaaaaacccaatcagagaggcactaattgtcctaatgttgcgtggaaaaagggttgtcaagaatgggaaccagaggagttctctggttctaaagacgaattagactttaaatttgctattgttgattacaaacaacttactaaagtagggataactgtctacaaagaactgagttatagcaatgaccgtttagctgaatatagagggaagaaaggaaaccataaagttcagttcaagtataaccctgagtgtatggcagttatttgggtgttggatgaggatatgaatgagtactttacagttaatgcgattgactacgaatatgcaagtagagtatcactttggcaacataaatataacatgaaatatcaagcagaactaaattcagcagaatatgatgaggacaaggaaattgatgcagaaataaaaattgaagaaatcgcagatcgttcaattgttaagactaacaaaatcagagctcggaggcgtggcgctaggcatcaagagaatagcgcaagggctaagtcaatcagtaatgcgaacccggcctcgatacaaaaacatgaagatgaaatcgttagtgcagataatgacgattgggatattgattatgtctgagaaatcgtcaaatgagtgaaacgcgtgaggctcgtatatcaagagctaaaagggcatttgtatccacaccgagcgttaggaaaatcttgagttacatggatagatgtagagatctatcagacctagagtctgagcctacatgcatgatggtctatggtgcttcgggtgtaggtaaaacgaccgtcatcaagaaatacttaaatcaaaacagaagagagtccgaagccgggggcgatataataccggttttgcatattgagttgccagacaatgcgaagccagtagatgcagcaagggaattgctggttgaaatgggtgacccgctagcactttatgaaactgacttagctagattgacgaaaagactgactgaattaatccctgcggtcggcgtgaagctgattattatcgatgagttccaacatttggtggaagaaaggtcaaatcgggttcttacccaagtaggtaattggctaaaaatgatacttaacaaaacgaaatgtccaattgttatatttggtatgccatactcaaaagttgtactgcaagcaaactcgcaacttcacgggcgattttccattcaggttgaactgcgcccctttagctaccagggaggtagaggtgtatttaaaacttttttggaataccttgataaagccctaccttttgaaaaacaggctggcttagccaacgaaagtttgcagaaaaaattgtatgcattctctcagggaaacatgcgttcgttgagaaaccttatttatcaagcatctatcgaagcaattgataatcagcatgagacgataaccgaagaagatttcgtttttgcatcgaagttgacatcgggcgataaacccaactcatggaaaaatccttttgaggagggtgttgaggtaacagaagatatgttacgaccgccaccaaaagatattggttgggaggactatttgagacattcaaccccgagagtgagtaaaccaggtagaaataaaaactttttcgaataacctaggctgctgcgctgctgccaccgctgagcaataactagcataaccccttggggcctctaaacgggtcttgaggggttttttgctgaaacctcaggcatttgttgttgatacaaccataaaatgataattacacccataaattgataattatcacacccataaattgatattgcctcttcatggtctaaacttcagtaagtttacgacattttcatgaagaggtcatttccggggtacagctcgtccatgccgagagtgatcccggcggcggtcacgaactccagcaggaccatgtgatcgcgcttctcgttggggtctttgctcagggcggactgggtgctcaggtagtggttgtcgggcagcagcacggggccgtcgccgatgggggtgttctgctggtagtggtcggcgagctgcacgctgccgtcctcgatgttgtggcggatcttgaagttcaccttgatgccgttcttctgcttgtcggccatgatatagacgttgtggctgttgtagttgtactccagcttgtgccccaggatgttgccgtcctccttgaagtcgatgcccttcagctcgatgcggttcaccagggtgtcgccctcgaacttcacctcggcgcgggtcttgtagttgccgtcgtccttgaagaagatggtgcgctcctggacgtagccttcgggcatggcggacttgaagaagtcgtgctgcttcatgtggtcggggtagcggctgaagcactgcacgccgtaggtcagggtggtcacgagggtgggccagggcacgggcagcttgccggtggtgcagatgaacttcagggtcagcttgccgtaggtggcatcgccctcgccctcgccggacacgctgaacttgtggccgtttacgtcgccgtccagctcgaccaggatgggcaccaccccggtgaacagctcctcgcccttgctcactgggccaggattctcctcgacgtcaccgcatgttagcagacttcctctgccctctccactgccgaattcctttttcttttttgcctggccggcctttttcgtggccgccggccttttgtcgcctcccagctgagacaggtcgatccgtgtctcgtacaggccggtgatgctctggtggatcagggtggcgtccagcacctctttggtgctggtgtacctcttccggtcgatggtggtgtcaaagtacttgaaggcggcaggggctcccagattggtcagggtaaacaggtggatgatattctcggcctgctctctgatgggcttatcccggtgcttgttgtaggcggacagcactttgtccagattagcgtcggccaggatcactctcttggagaactcgctgatctgctcgatgatctcgtccaggtagtgcttgtgctgttccacaaacagctgtttctgctcattatcctcgggggagcccttcagcttctcatagtggctggccaggtacaggaagttcacatatttggagggcagggccagttcgtttcccttctgcagttcgccggcagaggccagcattctcttccggccgttttccagctcgaacagggagtacttaggcagcttgatgatcaggtcctttttcacttctttgtagcccttggcttccagaaagtcgatgggattcttctcgaagctgcttctttccatgatggtgatccccagcagctctttcacactcttcagtttcttggacttgcccttttccactttggccaccaccagcacagaataggccacggtggggctgtcgaagccgccgtacttcttagggtcccagtccttctttctggcgatcagcttatcgctgttcctcttgggcaggatagactctttgctgaagccgcctgtctgcacctcggtctttttcacgatattcacttggggcatgctcagcactttccgcacggtggcaaaatcccggcccttatcccacacgatctccccggtttcgccgtttgtctcgatcagaggccgcttccggatctcgccgttggccagggtaatctcggtcttgaaaaagttcatgatgttgctgtagaagaagtacttggcggtagccttgccgatttcctgctcgctcttggcgatcatcttccgcacgtcgtacaccttgtagtcgccgtacacgaactcgctttccagcttagggtactttttgatcagggcggttcccacgacggcgttcaggtaggcgtcgtgggcgtggtggtagttgttgatctcgcgcactttgtaaaactggaaatccttccggaaatcggacaccagcttggacttcagggtgatcactttcacttcccggatcagcttgtcattctcgtcgtacttagtgttcatccgggagtccaggatctgtgccacgtgctttgtgatctgccgggtttccaccagctgtctcttgatgaagccggccttatccagttcgctcaggccgcctctctcggccttggtcagattgtcgaactttctctgggtaatcagcttggcgttcagcagctgccgccagtagttcttcatcttcttcacgacctcttcggagggcacgttgtcgctcttgccccggttcttgtcgcttctggtcagcaccttgttgtcgatggagtcgtccttcagaaagctctgaggcacgatatggtccacatcgtagtcggacagccggttgatgtccagttcctggtccacgtacatatcccgcccattctgcaggtagtacaggtacagcttctcgttctgcagctgggtgttttccacggggtgttctttcaggatctggctgcccagctctttgatgccctcttcgatccgcttcattctctcgcggctgttcttctgtcccttctgggtggtctggttctctctggccatttcgatcacgatgttctcgggcttgtgccggcccatcactttcacgagctcgtccaccaccttcactgtctgcaggatgcccttcttaatggcggggctgccggccagattggcaatgtgctcgtgcaggctatcgccctggccggacacctgggctttctggatgtcctctttaaaggtcaggctgtcgtcgtggatcagctgcatgaagtttctgttggcgaagccgtcggacttcaggaaatccaggattgtcttgccggactgcttgtcccggatgccgttgatcagcttccggctcagcctgccccagccggtgtatctccgccgcttcagctgcttcatcactttgtcgtcgaacaggtgggcataggttttcagccgttcctcgatcatctctctgtcctcaaacagtgtcagggtcagcacgatatcttccagaatgtcctcgttttcctcattgtccaggaagtccttgtccttgataattttcagcagatcgtggtatgtgcccagggaggcgttgaaccgatcttccacgccggagatttccacggagtcgaagcactcgattttcttgaagtagtcctctttcagctgcttcacggtcactttccggttggtcttgaacagcaggtccacgatggcctttttctgctcgccgctcaggaaggcgggctttctcattccctcggtcacgtatttcactttggtcagctcgttatacacggtgaagtactcgtacagcaggctgtgcttgggcagcaccttctcgttgggcaggttcttatcgaagttggtcatccgctcgatgaagctctgggcggaagcgcccttgtccaccacttcctcgaagttccagggggtgatggtttcctcgctctttctggtcatccaggcgaatctgctgtttcccctggccagagggcccacgtagtaggggatgcggaaggtcaggatcttctcgatcttttcccggttgtccttcaggaatgggtaaaaatcttcctgccgccgcagaatggcgtgcagctctcccaggtggatctggtgggggatgctgccgttgtcgaaggtccgctgcttccgcagcaggtcctctctgttcagcttcacgagcagttcctcggtgccgtccatcttttccaggatgggcttgatgaacttgtagaactcttcctggctggctccgccgtcaatgtagccggcgtagccgttcttgctctggtcgaagaaaatctctttgtacttctcaggcagctgctgccgcacgagagctttcagcagggtcaggtcctggtggtgctcgtcgtatctcttgatcatagaggcgctcaggggggccttggtgatctcggtgttcactctcaggatgtcgctcagcaggatggcgtcggacaggttcttggcggccagaaacaggtcggcgtactggtcgccgatctgggccagcaggttgtccaggtcgtcgtcgtaggtgtccttgctcagctgcagtttggcatcctcggccaggtcgaagttgctcttgaagttgggggtcaggcccaggctcagggcaatcaggtttccgaacaggccattcttcttctcgccgggcagctgggcgatcagattttccagccgtctgctcttgctcagtctggcagacaggatggccttggcgtccacgccgctggcgttgatggggttttcctcgaacagctggttgtaggtctgcaccagctggatgaacagcttgtccacgtcgctgttgtcggggttcaggtcgccctcgatcaggaagtggccccggaacttgatcatgtgggccagggccagatagatcagccgcaggtcggccttgtcggtgctgtccaccagtttctttctcaggtggtagatggtggggtacttctcgtggtaggccacctcgtccacgatgttgccgaagatggggtgccgctcgtgcttcttatcctcttccaccaggaaggactcttccagtctgtggaagaagctgtcgtccaccttggccatctcgttgctgaagatctcttgcagatagcagatccggttcttccgtctggtgtatcttcttctggcggttctcttcagccgggtggcctcggctgtttcgccgctgtcgaacagcagggctccgatcaggttcttcttgatgctgtgccggtcggtgttgcccagcaccttgaatttcttgctgggcaccttgtactcgtcggtgatcacggcccagcccacagagttggtgccgatgtccaggccgatgctgtacttcttgtcggctgctgggactccgtggataccgaccttccgcttcttctttggggccatcttatcgtcatcgtctttgtaatcaatatcatgatccttgtagtctccgtcgtggtccagtccttactgcagtagttttgctgaaatactcgattcacaaaaatatcaacttatggttgttttgtgagatatcaatatatggttgttttgtggttaagttgctgattataaataattattaaatatcactttatggttgcatcaacaggtaccgagctcgaattcactggccgtcgttttacaacgtcgtgactgggaaaaccctggcgttacccaacttaatcgccttgcagcacatccccctttcgccagctggcgtaatagcgaagaggcccgcaccgatcgcccttcccaacagttgcgcagcctgaatggcgaatggcgcctgatgcggtattttctccttacgcatctgtgcggtatttcacaccgcatatggtgcactctcagtacaatctgctctgatgccgcatagttaagccagccccgacacccgccaacacccgctgacgcgccctgacgggcttgtctgctcccggcatccgcttacagacaagctgtgaccgtctccgggagctgcatgtgtcagaggttttcaccgtcatcaccgaaacgcgcgagacgaaagggcctcgtgatacgcctatttttataggttaatgtcatgataataatggtttcttagacgtc

SEQ ID NO: 885 - DNA, 21140 bp, Synthetic construct
  source 1..21140: mol_type = other DNA
caggtggcacttttcggggaaatgtgcgcggaacccctatttgtttatttttctaaatacattcaaatatgtatccgctcatgagacaataaccctgataaatgcttcaataatattgaaaaaggaagagtatgagtattcaacatttccgtgtcgcccttattcccttttttgcggcattttgccttcctgtttttgctcacccagaaacgctggtgaaagtaaaagatgctgaagatcagttgggtgcacgagtgggttacatcgaactggatctcaacagcggtaagatccttgagagttttcgccccgaagaacgttttccaatgatgagcacttttaaagttctgctatgtggcgcggtattatcccgtattgacgccgggcaagagcaactcggtcgccgcatacactattctcagaatgacttggttgagtactcaccagtcacagaaaagcatcttacggatggcatgacagtaagagaattatgcagtgctgccataaccatgagtgataacactgcggccaacttacttctgacaacgatcggaggaccgaaggagctaaccgcttttttgcacaacatgggggatcatgtaactcgccttgatcgttgggaaccggagctgaatgaagccataccaaacgacgagcgtgacaccacgatgcctgtagcaatggcaacaacgttgcgcaaactattaactggcgaactacttactctagcttcccggcaacaattaatagactggatggaggcggataaagttgcaggaccacttctgcgctcggcccttccggctggctggtttattgctgataaatctggagccggtgagcgtgggtctcgcggtatcattgcagcactggggccagatggtaagccctcccgtatcgtagttatctacacgacggggagtcaggcaactatggatgaacgaaatagacagatcgctgagataggtgcctcactgattaagcattggtaactgtcagaccaagtttactcatatatactttagattgatttaaaacttcatttttaatttaaaaggatctaggtgaagatcctttttgataatctcatgaccaaaatcccttaacgtgagttttcgttccactgagcgtcagaccccgtagaaaagatcaaaggatcttcttgagatcctttttttctgcgcgtaatctgctgcttgcaaacaaaaaaaccaccgctaccagcggtggtttgtttgccggatcaagagctaccaactctttttccgaaggtaactggcttcagcagagcgcagataccaaatactgttcttctagtgtagccgtagttaggccaccacttcaagaactctgtagcaccgcctacatacctcgctctgctaatcctgttaccagtggctgctgccagtggcgataagtcgtgtcttaccgggttggactcaagacgatagttaccggataaggcgcagcggtcgggctgaacggggggttcgtgcacacagcccagcttggagcgaacgacctacaccgaactgagatacctacagcgtgagctatgagaaagcgccacgcttcccgaagggagaaaggcggacaggtatccggtaagcggcagggtcggaacaggagagcgcacgagggagcttccagggggaaacgcctggtatctttatagtcctgtcgggtttcgccacctctgacttgagcgtcgatttttgtgatgctcgtcaggggggcggagcctatggaaaaacgccagcaacgcggcctttttacggttcctggccttttgctggccttttgctcacatgttctttcctgcgttatcccctgattctgtggataaccgtattaccgcctttgagtgagctgataccgctcgccgcagccgaacgaccgagcgcagcgagtcagtgagcgaggagcgactcctgcattaggaaattaatacgactcactataggggaattgtgagcggataacaattcccctgtagaaataattttgtttaactttaataaggagatataccatgggtgaactgccgagtaggtagctgataacagtacagcgcggctgaaatcatcattaaagcggtgaactgccgagtaggtagctgataacggatccgaattcgagcgaaggagatatacatatgtttttgcaaagacctaaaccttacagcgatgaaagtttagaaagtttctttatccgagtggctaacaaaaatggctacggtgatgtccatcgcttcctagaagccactaaacgattccttcaagacattgaccataatggctatcaaacctttccgactgatataactcggataaacccatactcagctaaaaacagttccagcgcacgaactgcgtcattcctgaaacttgcacaattgacatttaatgaaccgccagagctacttgggttggcaattaacagaacaaacatgaaatactcgccgtcaactagcgcggttgttagaggtgcagaagtctttcctcgcagtttactacggacgcactccatcccctgctgtcctttgtgtctgcgagaaaatggctacgcctcctacctttggcactttcaggggtacgaatactgccacagccataacgtacctttaattaccacttgtagctgtggtaaggagtttgactaccgagtatctgggttaaagggcatttgctgcaaatgcaaggagcctatcaccttaaccagcagggagaacggtcatgaggcagcgtgtactgtttcaaactggcttgctggccatgaatctaaacctctgccaaatcttcctaaaagctaccgatggggtttagttcattggtggatgggtattaaagatagcgagttcgatcacttttcgttcgttcaatttttctcaaactggccaaggtcattccactcgataatcgaagatgaagtagagttcaaccttgagcatgctgttgtcagcacgtctgaattacgactaaaagatcttcttggtcgattgtttttcggttcaattcggttacctgagcggaatcttcaacacaatatcatccttggtgagcttctctgctatttagaaaatcgtttatggcaagacaagggattaatcgccaacctcaaaatgaacgcgttagaggcgactgtaatgttaaattgtagcctcgatcagattgcatcaatggttgaacaacgcatcttgaagccaaatcgaaaaagcaagcccaacagccctcttgatgttaccgattatctatttcatttcggcgatattttctgtctttggttagctgagttccaaagcgatgagtttaaccgttcgttttatgtgtcgaggtggtaaatgcaaactctgaaagaactaatcgcatccaatcctgacgacttaacaactgaacttaagagagcatttcgtccactcacaccgcatattgcaattgatggtaatgaacttgacgcactgacgatattagtcaatttaaccgataagactgatgatcagaaagacctgctcgatcgagccaaatgcaagcaaaaacttcgagatgaaaaatggtgggctagctgcataaattgcgttaattacagacaaagccataacccaaaattcccggatatacgttctgaaggcgtgattcgaacccaagccctgggtgaattaccgagtttcctactctcgtcctcaaaaatcccaccataccattggtcatatagccatgattcaaaatacgtcaacaaaagcgcattcctcaccaatgagttttgttgggatggtgagatctcatgtttgggtgagcttcttaaagatgcagatcacccactttggaatactttgaaaaagttaggttgttctcaaaaaacttgcaaagcaatggcaaaacaactagctgatattactctcacgactatcaatgtcacactcgcaccaaattacctgactcaaatatctctccccgatagtgatacatcctacatttcactctctcctgttgcatcgctatcgatgcaaagccactttcatcagaggctccaagatgaaaatcggcatagcgcgataacgcggtttagccgaactaccaacatgggggtcactgcgatgacatgtggcggcgcatttagaatgttaaagtctggcgctaagttttccagcccccctcatcaccgattaaacagtaaacgaagttggttgacgtcagagcatgttcagtcattaaaacagtaccagcgcctcaacaaaagcctcatacctgaaaactctcggattgcactccgtagaaaatacaaaatcgagcttcaaaatatggtcagatcttggtttgcaatgcaagaccatacccttgattcgaacatacttatccaacatttgaatcatgacctatcttacttaggagccacaaaacgttttgcatacgatccagcgatgaccaagctctttactgagcttttgaaacgagagttatcaaattcaatcaataatggtgagcaacacactaatggatcgtttttagtcctaccgaatatcagggtttgtggcgcaacagctttaagctccccggtaacggtggggattccatcacttacagctttctttggcttcgttcacgcatttgaacggaatataaatcgcaccacctcatcgtttcgtgttgaatcctttgcgatatgcgtccatcaactacatgtcgagaagcgaggtttgacagcagagtttgtggaaaaaggcgacgggactatatccgctcccgcgacccgggatgactggcagtgtgatgtcgtatttagccttattttgaacaccaactttgctcaacatattgaccaagatacgttagttacatcactaccaaagcgattggctcggggttcagcaaaaattgcgattgatgactttaaacatatcaactcattctcgacattagaaacagcgatcgaatctctgccaatagaagctggtaggtggttatcactttacgcacagtcaaacaataatctaagtgatctattagcagccatgacagaggaccatcagctcatggcaagctgcgtcggttaccacttgttagaagagcccaaagataaaccaaactccctcagaggttacaaacacgctatcgccgagtgcatcattggactcattaactcaatcacctttagctcagagactgatcccaacacaatcttttggtcgctaaagaactatcaaaactacctagtggtacagccaaggagtatcaacgatgaaactaccgacaaatctagcctatgagcgctctatcgacccatcagatgtctgtttttttgtcgtctggcccgatgatagaaaaacacctttaacctacaattctcgtactctgctcgggcaaatggaagcggcatcattagcctatgatgtctcaggtcaaccaataaaaagtgccaccgctgaggcgttagctcaagggaaccctcatcaagttgatttctgccacgttccatacggtgcgagtcatattgaatgcagtttctccgtctcgttttcttctgaactacgtcaaccatataagtgtaactcaagcaaagttaaacaaacgctagtgcaattagtcgagctctacgaaacgaaaatcggctggactgagctagcaacccgatatttgatgaacatttgcaacggtaaatggctgtggaaaaatacccgtaaagcctattgctggaacattgtacttacaccttggccttggaacggggaaaaggttggatttgaagatattcgtactaactacacctcacggcaagactttaaaaataataaaaattggtctgctatagttgaaatgatcaaaaccgcattttctagtactgatgggctggcgatatttgaagtcagggccaccttgcacttgccaacgaatgctatggtgcggccaagccaagttttcacagaaaaagaaagtggcagtaaaagtaaatctaaaactcaaaacagtcgagtttttcagagtacaactattgatggtgaacgatcgccaatactaggggcctttaaaacgggagcagctattgcaaccattgacgactggtatcctgaagccactgagccactaagggtcggacggtttggggttcatcgcgaagatgtcacttgctaccgtcatccgtctaccggaaaagattttttctcgatattacaacaagcagagcactatattgaagtgttgagcgccaacaaaactcccgctcaagaaactatcaacgacatgcactttttaatggctaacctgattaagggtgggatgttccagcataaaggagactgactgtgaaatggtattataagacaatcacctttctgccagagttgtgcaacaacgagtcactggctgcaaagtgtctccgcgttctgcatggatttaactatcagtatgagacacgaaatatcggcgtttcatttccgctttggtgtgatgcaacggttggaaaaaagatttcatttgtcagcaagaacaagatagaactcgacttactacttaaacaacactatttcgtccaaatggaacaacttcaatactttcatatatccaacactgttctcgtcccagaagattgtacatacgtttcctttagacgctgtcaatctatagataagctcacagcagcagggctggcaaggaaaatcagacgcctggagaaacgtgctctatctagaggcgagcaatttgacccatcatcttttgctcaaaaagagcatactgcaatagcgcactaccactcacttggggagtccagcaaacagacgaaccgcaactttcgactcaatatcaggatgctctcggagcaaccccgtgaggggaactcgatttttagtagctatggcttatcaaattcagaaaactcgtttcagcctgtacccttaatctgacctttaataaggagatataccatggcgacaagtttacctacgccctcagcaattacgacttcggcgttagagtatgcattccatactcccgctcgcaatctaacgaaatctcgcggaaaaaacattcatcgttatgtcagtgtaaagatgagtaagaggattacggtagaatctactctagagtgtgatgcctgctatcactttgattttgagccaagtattgttcgcttttgcgctcaaccgattcgatttttatattatctcaatggtcagtctcactcctatgttcctgactttctagttcaatttgataccaacgagtttgttctatatgaagtaaagtcagcttatgctaagaacaaacctgattttgatgttgaatgggaggcgaaagtaaaagcagcaactgaactagggctagaattggagcttgttgaagagagtgatattagggatacggttgtattaaataatcttaagcgcatgcatcgttatgcttcgaaagatgagctgaataacgtacataactctctcttaaaaataataaagtacaatggcgcccaatctgcaagatgcttgggagaacagttgggtttaaaaggccgaactgttttaccaattttgtgcgatttgctgtcaaggtgtttactcgatacacgtttggataagcctctatctcttgaatctcgatttgagttggccagttatggctaagaaagggttctcaagtttccatagaaaagcagtctcttcccaagatacgcttgaatcgatagagcttgtctctagcgctaattgtctagaaagtgttacgtatcaagatatatcagcatttcccgaaacaattgcggtagagattaatttccgattaagcattcttcgctttttagcgcgaaagtgcgaaaccattgtggccaaatcaattgaaccacatcgtgtagagctacagcaaaactatagtagaaaaatacccagtgcaataacgatatatcgatggtggcttgcttttcgaaaatcagactacaaccccattagcttagcacctaatatcaaggatagaggtaatagagagacaaaagtgtcaacagttgttgattctattatggaacaggcagttgaaagagttatatctggacgaaaagtcaatgttagctctgcatataaacgtgttcgacgaaaagttcgtcaatacaatctaactcatggaacgaaatacacgtatcctaagtacgaatctgtaagaaagcgagtaaaaaagaaaaccccatttgagttattagccgcagggaaaggggagagagtagctaagagagagtttcgccgaatgggaaaaaagatcctcacgtctagcgtgctagagagggttgaaatagatcacactgtcgttgacctttttgcagtacacgaagagtatcgaatcccattgggccgaccttggcttactcaattggttgattgttacagtaaagctgtaatcggtttttatttaggtttcgagcctcctagctatgtgtcggtttcccttgcacttaagaatgcaatacaacgcaaagatgacttaatctcctcgtatgaatcgatcgagaatgaatggctatgttatggcatcccagacctactcgtaactgataatggtaaagagtttttgtcgaaagcatttgatcaagcatgtgaatcactattgatcaatgtgcatcaaaataaagttgagacgcccgacaacaaacctcatgttgaacgtaactacgggactattaatacttctctgttagacgatttacctgggaaatccttcagccagtaccttcaaagagaagggtacgactctgtgggagaagctacccttacactcaatgagattagagaaatttacttaatttggttggtggatatttatcataaaaaacccaatcagagaggcactaattgtcctaatgttgcgtggaaaaagggttgtcaagaatgggaaccagaggagttctctggttctaaagacgaattagactttaaatttgctattgttgattacaaacaacttactaaagtagggataactgtctacaaagaactgagttatagcaatgaccgtttagctgaatatagagggaagaaaggaaaccataaagttcagttcaagtataaccctgagtgtatggcagttatttgggtgttggatgaggatatgaatgagtactttacagttaatgcgattgactacgaatatgcaagtagagtatcactttggcaacataaatataacatgaaatatcaagcagaactaaattcagcagaatatgatgaggacaaggaaattgatgcagaaataaaaattgaagaaatcgcagatcgttcaattgttaagactaacaaaatcagagctcggaggcgtggcgctaggcatcaagagaatagcgcaagggctaagtcaatcagtaatgcgaacccggcctcgatacaaaaacatgaagatgaaatcgttagtgcagataatgacgattgggatattgattatgtctgagaaatcgtcaaatgagtgaaacgcgtgaggctcgtatatcaagagctaaaagggcatttgtatccacaccgagcgttaggaaaatcttgagttacatggatagatgtagagatctatcagacctagagtctgagcctacatgcatgatggtctatggtgcttcgggtgtaggtaaaacgaccgtcatcaagaaatacttaaatcaaaacagaagagagtccgaagccgggggcgatataataccggttttgcatattgagttgccagacaatgcgaagccagtagatgcagcaagggaattgctggttgaaatgggtgacccgctagcactttatgaaactgacttagctagattgacgaaaagactgactgaattaatccctgcggtcggcgtgaagctgattattatcgatgagttccaacatttggtggaagaaaggtcaaatcgggttcttacccaagtaggtaattggctaaaaatgatacttaacaaaacgaaatgtccaattgttatatttggtatgccatactcaaaagttgtactgcaagcaaactcgcaacttcacgggcgattttccattcaggttgaactgcgcccctttagctaccagggaggtagaggtgtatttaaaacttttttggaataccttgataaagccctaccttttgaaaaacaggctggcttagccaacgaaagtttgcagaaaaaattgtatgcattctctcagggaaacatgcgttcgttgagaaaccttatttatcaagcatctatcgaagcaattgataatcagcatgagacgataaccgaagaagatttcgtttttgcatcgaagttgacatcgggcgataaacccaactcatggaaaaatccttttgaggagggtgttgaggtaacagaagatatgttacgaccgccaccaaaagatattggttgggaggactatttgagacattcaaccccgagagtgagtaaaccaggtagaaataaaaactttttcgaataacctaggctgctgcgctgctgccaccgctgagcaataactagcataaccccttggggcctctaaacgggtcttgaggggttttttgctgaaacctcaggcatttgttgttgatacaaccataaaatgataattacacccataaattgataattatcacacccataaattgatattgcctcttcatggtctaaacttcagtaagtttacgacattttcatgaagaggtcatttccggggtacagctcgtccatgccgagagtgatcccggcggcggtcacgaactccagcaggaccatgtgatcgcgcttctcgttggggtctttgctcagggcggactgggtgctcaggtagtggttgtcgggcagcagcacggggccgtcgccgatgggggtgttctgctggtagtggtcggcgagctgcacgctgccgtcctcgatgttgtggcggatcttgaagttcaccttgatgccgttcttctgcttgtcggccatgatatagacgttgtggctgttgtagttgtactccagcttgtgccccaggatgttgccgtcctccttgaagtcgatgcccttcagctcgatgcggttcaccagggtgtcgccctcgaacttcacctcggcgcgggtcttgtagttgccgtcgtccttgaagaagatggtgcgctcctggacgtagccttcgggcatggcggacttgaagaagtcgtgctgcttcatgtggtcggggtagcggctgaagcactgcacgccgtaggtcagggtggtcacgagggtgggccagggcacgggcagcttgccggtggtgcagatgaacttcagggtcagcttgccgtaggtggcatcgccctcgccctcgccggacacgctgaacttgtggccgtttacgtcgccgtccagctcgaccaggatgggcaccaccccggtgaacagctcctcgcccttgctcactgggccaggattctcctcgacgtcaccgcatgttagcagacttcctctgccctctccactgccgaattcctttttcttttttgcctggccggcctttttcgtggccgccggccttttgtcgcctcccagctgagacaggtcgatccgtgtctcgtacaggccggtgatgctctggtggatcagggtggcgtccagcacctctttggtgctggtgtacctcttccggtcgatggtggtgtcaaagtacttgaaggcggcaggggctcccagattggtcagggtaaacaggtggatgatattctcggcctgctctctgatgggcttatcccggtgcttgttgtaggcggacagcactttgtccagattagcgtcggccaggatcactctcttggagaactcgctgatctgctcgatgatctcgtccaggtagtgcttgtgctgttccacaaacagctgtttctgctcattatcctcgggggagcccttcagcttctcatagtggctggccaggtacaggaagttcacatatttggagggcagggccagttcgtttcccttctgcagttcgccggcagaggccagcattctcttccggccgttttccagctcgaacagggagtacttaggcagcttgatgatcaggtcctttttcacttctttgtagcccttggcttccagaaagtcgatgggattcttctcgaagctgcttctttccatgatggtgatccccagcagctctttcacactcttcagtttcttggacttgcccttttccactttggccaccaccagcacagaataggccacggtggggctgtcgaagccgccgtacttcttagggtcccagtccttctttctggcgatcagcttatcgctgttcctcttgggcaggatagactctttgctgaagccgcctgtctgcacctcggtctttttcacgatattcacttggggcatgctcagcactttccgcacggtggcaaaatcccggcccttatcccacacgatctccccggtttcgccgtttgtctcgatcagaggccgcttccggatctcgccgttggccagggtaatctcggtcttgaaaaagttcatgatgttgctgtagaagaagtacttggcggtagccttgccgatttcctgctcgctcttggcgatcatcttccgcacgtcgtacaccttgtagtcgccgtacacgaactcgctttccagcttagggtactttttgatcagggcggttcccacgacggcgttcaggtaggcgtcgtgggcgtggtggtagttgttgatctcgcgcactttgtaaaactggaaatccttccggaaatcggacaccagcttggacttcagggtgatcactttcacttcccggatcagcttgtcattctcgtcgtacttagtgttcatccgggagtccaggatctgtgccacagccctcccacacataaccagagggcagcaattcacgaatcccaactgccgtcggctgtccatcactgtccttcactatggctttgatcccaggatgcagatcgagaagcacctgtcggcaccgtccgcaggggctcaagatgcccctgttctcatttccgatcgcgacgatacaagtcaggttgccagctgccgcagcagcagcagtgcccagcaccacgagttctgcacaaggtcccccagtaaaatgatatacattgacaccagtgaagatgcggccgtcgctagagagagctgcgctggcgacgctgtagtcttcagagatggggatgctgttgattgtagccgttgctctttcaatgagggtggattcttcttgagacaaaggcttggccatcggtccaggattctcttcgacatctccggcttgtttcagcagagagaagtttgttgcgccggatccggcatagtcggggacatcatatgggtatgcataatcaggcacgtcgtagggataagcgtaatctggaacatcgtatgggtatttcttcttcttagcctgtccagccttctttgtggcggcaggtcgcttggatcccttgtacagctcatccataccgagagtgatgcctgcggcagtcacaaattccagaaggaccatgtgatctctcttttcgtttgggtccttggaaagctttgattgcgtggagagataatgattgtcaggcaagagtacaggtccatctccgatgggcgtattttgttggtaatgatcagccagttgaacactaccatcttcgacattatgtcggatcttaaagttggcctttatcccatttttctgcttatcagcggtaatatacacattatggctgttaaagttgtactccaacttgtgccccagtatgttaccgtcctccttaaaatcaatacctttcagttcaattcgattaaccagagtgtccccttcaaatttaacctcggctcgggttttatatgtaccatcatccttaaagctgatggtcctttcttgaacataaccttcaggcattgcagacttgaaaaagtcatgctgtttcatgtggtcgggatatcgagaaaagcattgcacgccgtaggtgagggtcgttacgagtgtaggccatgggacgggcagtttgcccgtcgtacagatgaatttcagagtcagcttaccattcgtggcgtccccttcgccttcgcccctgacggagaatttatgtccatttacatctccatcaagctctaccagaatgggcactactccagtgaagagttcttcacctttactcacgctacctcctcctccgcttcctcctcctccgcttccacctcctccttccagggccttgtactcgaacatgactttcacgagttcgcacagttcctcgctgttccggtcggtcatcagtttctttttcttcagattcttcaggtgcacgatcttctctgattccagggtctggatttcgatcttcttgtcagcgccgatcttgaaggtggccacgaagccgtattctttcagaatgtccacgatggacttcatgatggcgttcttcagcttccggtcgtaggacagcagcttccgcaggttttccagcacttccagcaggctaatctcggcgtgggggatgtagttgaagtgggcaatgtagttccggatgtacaggtcctttttttcctgcttcagtttcttcactttcttgtcggagtagatgctccgcttttccacattgtccttgtacagttctttgtagaagttgatatacttttccacgatctggccgcttttgtacttcacattcttggagttgtcgaaattgaaaatttcctcgatgtagtggttctcgggaaactcgcccttcagccggaatctcaggtcccgctcccagatgctggtgtagcccacgagccggtgcaggatcttcagcagcaggccctgcagcaggttcagctcattgaattccaccttgttcttcaggtgggtgtacttctggatgttgccgatggccttctcatactctttgtagtcctcgtcgttgaacttttcgtccttcttgggtctggcgtacttccggtgcaggttctgctgcatggtgtagttcttttcaatctcattcttcttgttgctgtactctttcagttctttcaggctgatcttatacttggccttatcggcgatcttttccagcagattcagcatgccgtatttcttgatattgtagaaggcccggtgcttgatgatgttctcgccgtcgaaatagatcttgttggtgtcgaactttttcagctctttccggtccttgattttgttttcgttgaagtccaggaacttgccgatctcgttggcttccagctcgaagtcctcggtcactctgttgttgtccaggttcagcaggttgatcagttccaactcgtcgctgaaggtttcttctttgttggcggactggtacttttccaggctgcccttcaggttggtcagctctttgtggttcagcagcttcaggatcaggtaaaacatgttcagattctcggtgtacttcagaatcttccccagcttgatctcgcgcacgaactcattgatctcgtgagggatttctttgttccgattgtgcttctcatagttcttcaggatcttgtcgtacttctctttgttatcctttttgatcttgatcttggagaagatgtcgttgttgtcattgttgttgttgctctcgatatacttcagattgttcttgttcaggtagtcgatgaagcccttcaggaaaatctgctgaataaagtcgatgtaggtattcttttcctctttgtcctggttgttgatcatctctctgctctggatgatggccaggtattccacgggcacggttttctcgatgttctcgaacttctgatacttgtagtggccggttttctggttccgctgcttgttaatcttgatcacttcattggtgatcttaaagaacaccttggagtttttcacgaacttgttcaggaactcgccgtagtagatattcttcagcaggtagatctgggcgtccttctcttctttgtccttgggcacgctccaaaaaaacttcagggtattccgcaggtcctcaatcttgttgtacagcttggtgaagctgggcacgaaggggatgtttttgttcacgaagttgaacttggtattcttcaggtacttgatgatcacatccttctcgtagtagttgaacacgttggcgctgttcagctgcttgaagattttcagcttcagcttcttttcgttgatttcgttctgaaacatcttcttggagatctcgctgggggcgatattcttgaaggcgaagatgtccttgccttccagttccaggttgaagtgcacgatgccgtgtctgatgctgctgatggcctcgtcgatgttggcgaagaagtcctcgatctcgttcttgttgtccatgttgaagtcgtagctgtagaacatcttcagattttctttcacttcgttctgcttgttctcattgtagatcttgtccacctcgccggacacgtatttctcttcgcccttgttgttcttcacggtcttgccccgcatccggccggtgataccgttctcgttctcggtttccaggatgttcctcaggctgaagtaggccacgctggacacgccgatgatgtttctcaggaaggcctcgttctgccggttccgggcgataaagtcggaggtggcgatctcgcccacttgcagatagtagttgtacttgccgcagttccgcacgtaggtgtccagcttgttcagcagtttgttttcgatcagctttttcagattctggtactcgaagatccgcttgatcttatcgttgctgatgttgctcagccgcttgtacacgtagtttttcagcagctgggacatctcgatttccacgaagtggcagaaggcgtacttaatattcttgtcgttcagttcctctttgtccaggtagtacttgtagaacacctggcttttcttcagctcagacatgtcggggatcttctcaatcagctctttgatgttgttcacgttctggatctcttcgtagataatcttggcgaagttctctttgtcgttcttccggccgatgatcttgtgatagtactcgcggatcttgtacttctcgtgcttcttgctgttctcgatcaggaaaaacagtttctcgatatcctctttcttatacagcttgtcgaaggcttcctgcacgttgttgatgtagtcgttgcgcttggcgctctctctgtagtagtcgtagatgatgttccgcttgctcttgccgcccactttttccacgttgttctcgttgatcttctggtagttggccttgttctcttcgaagctgtacttcaggctgttgatcttgttcagcttggcttccacgtccttccgaaagatttccagttcctcagagttcacgtcctcgttcagcaggatcttcttcagcacggagaagctgttcttgtttttcaggtcgtactcgctgatgtcctcttcgctatagttcttgtcctgcacggcgttcttttctttccggttcttcagatacagcacgctgtccttcaggtgcagcaccttgttgctaaagaacttcttcaggttctctcttctgatccggttctcttcctcggaggcgttgtcggggttcttgatgtagatgtccagccggatgctcagcagctcgctcagtctctcgctggtccggttttcctcgctggtggacttcacgagcttgccctcttcgatgtacttcttgtggctgatgccgtcgaccttggtcactttcatggatcgtgctttgtgatctgccgggtttccaccagctgtctcttgatgaagccggccttatccagttcgctcaggccgcctctctcggccttggtcagattgtcgaactttctctgggtaatcagcttggcgttcagcagctgccgccagtagttcttcatcttcttcacgacctcttcggagggcacgttgtcgctcttgccccggttcttgtcgcttctggtcagcaccttgttgtcgatggagtcgtccttcagaaagctctgaggcacgatatggtccacatcgtagtcggacagccggttgatgtccagttcctggtccacgtacatatcccgcccattctgcaggtagtacaggtacagcttctcgttctgcagctgggtgttttccacggggtgttctttcaggatctggctgcccagctctttgatgccctcttcgatccgcttcattctctcgcggctgttcttctgtcccttctgggtggtctggttctctctggccatttcgatcacgatgttctcgggcttgtgccggcccatcactttcacgagctcgtccaccaccttcactgtctgcaggatgcccttcttaatggcggggctgccggccagattggcaatgtgctcgtgcaggctatcgccctggccggacacctgggctttctggatgtcctctttaaaggtcaggctgtcgtcgtggatcagctgcatgaagtttctgttggcgaagccgtcggacttcaggaaatccaggattgtcttgccggactgcttgtcccggatgccgttgatcagcttccggctcagcctgccccagccggtgtatctccgccgcttcagctgcttcatcactttgtcgtcgaacaggtgggcataggttttcagccgttcctcgatcatctctctgtcctcaaacagtgtcagggtcagcacgatatcttccagaatgtcctcgttttcctcattgtccaggaagtccttgtccttgataattttcagcagatcgtggtatgtgcccagggaggcgttgaaccgatcttccacgccggagatttccacggagtcgaagcactcgattttcttgaagtagtcctctttcagctgcttcacggtcactttccggttggtcttgaacagcaggtccacgatggcctttttctgctcgccgctcaggaaggcgggctttctcattccctcggtcacgtatttcactttggtcagctcgttatacacggtgaagtactcgtacagcaggctgtgcttgggcagcaccttctcgttgggcaggttcttatcgaagttggtcatccgctcgatgaagctctgggcggaagcgcccttgtccaccacttcctcgaagttccagggggtgatggtttcctcgctctttctggtcatccaggcgaatctgctgtttcccctggccagagggcccacgtagtaggggatgcggaaggtcaggatcttctcgatcttttcccggttgtccttcaggaatgggtaaaaatcttcctgccgccgcagaatggcgtgcagctctcccaggtggatctggtgggggatgctgccgttgtcgaaggtccgctgcttccgcagcaggtcctctctgttcagcttcacgagcagttcctcggtgccgtccatcttttccaggatgggcttgatgaacttgtagaactcttcctggctggctccgccgtcaatgtagccggcgtagccgttcttgctctggtcgaagaaaatctctttgtacttctcaggcagctgctgccgcacgagagctttcagcagggtcaggtcctggtggtgctcgtcgtatctcttgatcatagaggcgctcaggggggccttggtgatctcggtgttcactctcaggatgtcgctcagcaggatggcgtcggacaggttcttggcggccagaaacaggtcggcgtactggtcgccgatctgggccagcaggttgtccaggtcgtcgtcgtaggtgtccttgctcagctgcagtttggcatcctcggccaggtcgaagttgctcttgaagttgggggtcaggcccaggctcagggcaatcaggtttccgaacaggccattcttcttctcgccgggcagctgggcgatcagattttccagccgtctgctcttgctcagtctggcagacaggatggccttggcgtccacgccgctggcgttgatggggttttcctcgaacagctggttgtaggtctgcaccagctggatgaacagcttgtccacgtcgctgttgtcggggttcaggtcgccctcgatcaggaagtggccccggaacttgatcatgtgggccagggccagatagatcagccgcaggtcggccttgtcggtgctgtccaccagtttctttctcaggtggtagatggtggggtacttctcgtggtaggccacctcgtccacgatgttgccgaagatggggtgccgctcgtgcttcttatcctcttccaccaggaaggactcttccagtctgtggaagaagctgtcgtccaccttggccatctcgttgctgaagatctcttgcagatagcagatccggttcttccgtctggtgtatcttcttctggcggttctcttcagccgggtggcctcggctgtttcgccgctgtcgaacagcagggctccgatcaggttcttcttgatgctgtgccggtcggtgttgcccagcaccttgaatttcttgctgggcaccttgtactcgtcggtgatcacggcccagcccacagagttggtgccgatgtccaggccgatgctgtacttcttgtcggctgctgggactccgtggataccgaccttccgcttcttctttggggccatcttatcgtcatcgtctttgtaatcaatatcatgatccttgtagtctccgtcgtggtccagtccttactgcagtagttttgctgaaatactcgattcacaaaaatatcaacttatggttgttttgtgagatatcaatatatggttgttttgtggttaagttgctgattataaataattattaaatatcactttatggttgcatcaacaggtaccgagctcgaattcactggccgtcgttttacaacgtcgtgactgggaaaaccctggcgttacccaacttaatcgccttgcagcacatccccctttcgccagctggcgtaatagcgaagaggcccgcaccgatcgcccttcccaacagttgcgcagcctgaatggcgaatggcgcctgatgcggtattttctccttacgcatctgtgcggtatttcacaccgcatatggtgcactctcagtacaatctgctctgatgccgcatagttaagccagccccgacacccgccaacacccgctgacgcgccctgacgggcttgtctgctcccggcatccgcttacagacaagctgtgaccgtctccgggagctgcatgtgtcagaggttttcaccgtcatcaccgaaacgcgcgagacgaaagggcctcgtgatacgcctatttttataggttaatgtcatgataataatggtttcttagacgt

SEQ ID NO: 886 - DNA, 44 bp, Synthetic construct
  source 1..44: mol_type = other DNA
taatacgactcactataggggaattgtgagcggataacaattcc

SEQ ID NO: 887 - DNA, 35 bp, Synthetic construct
  source 1..35: mol_type = other DNA
ttgacagctagctcagtcctaggtataatactagc

SEQ ID NO: 888 - DNA, 35 bp, Synthetic construct
  source 1..35: mol_type = other DNA
tttacagctagctcagtcctaggtattatgctagc

SEQ ID NO: 889 - DNA, 35 bp, Synthetic construct
  source 1..35: mol_type = other DNA
tttacggctagctcagtcctaggtactatgctagc

SEQ ID NO: 890 - DNA, 35 bp, Synthetic construct
  source 1..35: mol_type = other DNA
tttatggctagctcagtcctaggtacaatgctagc

SEQ ID NO: 891 - DNA, 165 bp, Synthetic construct
  source 1..165: mol_type = other DNA
attgggggcgacggtcaattaagtccagtcatagtgggactggtgtcctaataatttaagcattcttttctagaaatactttgtctttccttgactttcatcagggtggttgttatattagtaattgtgttagcactccattaagttaagtgctaaaaagaggtg

SEQ ID NO: 892 - DNA, 163 bp, Synthetic construct
  source 1..163: mol_type = other DNA
gattgcattaggttttagtttcttgtataatgcttaatgttggtcactgacaggctacgatacggaaggttgctcacgcccggcccctttgccatggctagtgtgtggaaatttccgaggagcaagtctatttccaaaaatgggcgaaaaaggaggtaataca

SEQ ID NO: 893 - DNA, 30 bp, Synthetic construct
  source 1..30: mol_type = other DNA
ttgacaattaatcatccggctcgtataatg

SEQ ID NO: 894 - DNA, 56 bp, Synthetic construct
  source 1..56: mol_type = other DNA
attttacatttttagaaatgggcgtgaaaaaaagcgcgcgattatgtaaaatataa

SEQ ID NO: 895 - DNA, 47 bp, Synthetic construct
  source 1..47: mol_type = other DNA
tgtctcttatgacaaaaagagcaaaattttgataaaatagtattaga

SEQ ID NO: 896 - DNA, 46 bp, Synthetic construct
  source 1..46: mol_type = other DNA
tgagctgtttacaattaatcatcgtgtggtaccatgtgtggaattg

SEQ ID NO: 897 - DNA, 124 bp, Synthetic construct
  source 1..124: mol_type = other DNA
tggcgggatcgttgtatatttcttgacaccttttcggcaccgccctaaaattctgcgtcctcataatatatgaggcgatttattacgtgtttacgaagcaaaagctaaaaccaggagctattta

SEQ ID NO: 898 - DNA, 1229 bp, Synthetic construct
  source 1..1229: mol_type = other DNA
acatttccccgaaaagtgccacctgcatcgatttattatgacaacttgacggctacatcattcactttttcttcacaaccggcacggaactcgctcgggctggccccggtgcattttttaaatacccgcgagaaatagagttgatcgtcaaaaccaacattgcgaccgacggtggcgataggcatccgggtggtgctcaaaagcagcttcgcctggctgatacgttggtcctcgcgccagcttaagacgctaatccctaactgctggcggaaaagatgtgacagacgcgacggcgacaagcaaacatgctgtgcgacgctggcgatatcaaaattgctgtctgccaggtgatcgctgatgtactgacaagcctcgcgtacccgattatccatcggtggatggagcgactcgttaatcgcttccatgcgccgcagtaacaattgctcaagcagatttatcgccagcagctccgaatagcgcccttccccttgcccggcgttaatgatttgcccaaacaggtcgctgaaatgcggctggtgcgcttcatccgggcgaaagaaccccgtattggcaaatattgacggccagttaagccattcatgccagtaggcgcgcggacgaaagtaaacccactggtgataccattcgcgagcctccggatgacgaccgtagtgatgaatctctcctggcgggaacagcaaaatatcacccggtcggcaaacaaattctcgtccctgatttttcaccaccccctgaccgcgaatggtgagattgagaatataacctttcattcccagcggtcggtcgataaaaaaatcgagataaccgttggcctcaatcggcgttaaacccgccaccagatgggcattaaacgagtatcccggcagcaggggatcattttgcgcttcagccatacttttcatactcccgccattcagagaagaaaccaattgtccatattgcatcagacattgccgtcactgcgtcttttactggctcttctcgctaaccaaaccggtaaccccgcttattaaaagcattctgtaacaaagcgggaccaaagccatgacaaaaacgcgtaacaaaagtgtctataatcacggcagaaaagtccacattgattatttgcacggcgtcacactttgctatgccatagcatttttatccataagattagcggatcctacctgacgctttttatcgcaactctctactgtttctccataccc

SEQ ID NO: 899 - DNA, 41 bp, Synthetic construct
  source 1..41: mol_type = other DNA
ggctttacactttatgcttccggctcgtatgttgtgtggaa

SEQ ID NO: 900 - DNA, 15170 bp, Synthetic construct
  source 1..15170: mol_type = other DNA
tccgttaagtcatagcgactaatcgctagttcatttgctttgaaaacaactaattcagacatacatctcaattggtctaggtgattttaatcactataccaattgagatgggctagtcaatgataattactagtccttttcctttgagttgtgggtatctgtaaattctgctagacctttgctggaaaacttgtaaattctgctagaccctctgtaaattccgctagacctttgtgtgttttttttgtttatattcaagtggttataatttatagaataaagaaagaataaaaaaagataaaaagaatagatcccagccctgtgtataactcactactttagtcagttccgcagtattacaaaaggatgtcgcaaacgctgtttgctcctctacaaaacagaccttaaaaccctaaaggcttaagtagcaccctcgcaagctcgggcaaatcgctgaatattccttttgtctccgaccatcaggcacctgagtcgctgtctttttcgtgacattcagttcgctgcgctcacggctctggcagtgaatgggggtaaatggcactacaggcgccttttatggattcatgcaaggaaactacccataatacaagaaaagcccgtcacgggcttctcagggcgttttatggcgggtctgctatgtggtgctatctgactttttgctgttcagcagttcctgccctctgattttccagtctgaccacttcggattatcccgtgacaggtcattcagactggctaatgcacccagtaaggcagcggtatcatcaaggtctgacgctcagtggaacgaaaactcacgttaagggattttggtcatgagattatcaaaaaggatcttcacctagatcctttacgctccgggacgccaacaacaagacccatcatagtttgcccccgcgacattgaccataaattcatcgcacaaaatatcgaacggggtttatgccgcttttagtgggtgcgaagaatagtctgctcattacccgcgaacaccgccgcattcagatcacgcttagtagcgtccccatgagtaggcagaaccgcgtccaagtccacatcatccataacgatcatgcacggggtggaatccacacccagacttgccagcacctcattagcgacacgttgcgcagcggccacgtccttagccttatccacgcaatcgagaacgtactgcctaaccgcgaaatcagactgaatcagtttccaatcatcgggcttcaccaaagcaacagcaacgcgggttgattcgacccgttccggtgcttccagaccggcgagcttgtacagttcttcttccatttcacgacgtacatcagcgtctatgtaatcaatgcccaaagcacgcttagccccacgtgaccaggacgaacgcaggtttttagaaccaacctcatactcacgccaccgagccaccaaaacagcgtccatatcctcgccggcgtcgctttgatcggccaacatatccaacatctgaaacggcgtgtacgaccccttagacgcggttttagtagcggagccagtcagttcctgagacatgcccttagcgaggtaggttgccattttcgcagcgtctccaccccaggtagacacctgatcaagtttgaccccgtgctcacgcagtggcgcgtccataccggccttaaccacaccagcagaccagcgggaaaacatggaatcctcaaacgccttgagttcatcgtcagacagtggacgatccaagaacaacagcatgttgcggtgcaagtgccaaccgttcgcccaagagtctgtgacctcatagtcactataggtgtgctccaccccgtaccgtgcacgttctttcttccactgagatgttttcaccatcgaagagtacgcagtcttaatacccgcttcaacctgcgcaaatgactgtgagcggttgtgtcgaacagtgcccacaaacatcatgagcgcgccacccgccgccaagtgattcttagtagcaatagccagctcaatgcggcgttcgcccatgacttccaattcagccagagatgacccccagcgagagtgagagttttgcagaccctcaaactgcgaagcaccgttagacgaccaggacaccgcaacagcttcgtccctgcgccacctatggcaccccgccagagccttactattggtgatcttgtacatgacgttttgcctacgccacgccctagcgcgagtgaccttagaaccctcattgacctgcggttccttagaggtgttcacttctatttcagtgttacctagacccgatgttgtgcggggttgcgcagtgcgagtttgtgcgggtgttgtgcccgttgtcttagctagtgctatggttgtcaattgaaaccccttcgggttatgtggcccccgtgcatatgagttggtagctcgcacgggggtttgtcttgtctagggactattaatttttagtggtgtttggtggccgcctagcttggctatgcgtgccagcttacccgtactcaatgttaaagatttgcatcgacatgggagggttacgtgtccgatacctagggggggtatccgcgactaggtgccccggtgctcactgtctgtaccggcggggcaagccccacaccccgcatggacagggtggctccgccccctgcacccccagcaatctgcatgtacatgttttacacattagcacgacatgactgcatgtgcatgcactgcatgcagactaggtaaatatgagtatgtacgactagtaacaggagcactgcacataatgaatgagttgcaggacaatgtttgctacgcatgcgcatgacatatcgcaggaaagctactagagtcttaaagcatggcaaccaaggcacagctagaacagcaactacaagaagctcaacaggcactacaggcgcagcaagcgcaggcacaagccaccatcgaagcactagaagcgcaggcaaaggctaagcccgtcgtggtcaccgcacgcgttcctttggcactacgtgaggacatgaagcgcgcaggcatgcagaacggtgaaaacctccaagagttcatgatcgccgcgtttaccgagcggctagaaaagctcaccaccaccgacaacgaggaaaacaatgtctaacccactagttctctttgcccaccgtgacccggtaaatgacgtgacgttcgagtgcattgagcacgccacctacgacacactttcacacgctaaagaccagatcaccgcccaaatgcaagccctagacgaagaagccgccctactgccctaatgggtgtttcatgggtgtttccctagtgtttcatggtgttttcacctaagctagggaattgcgcgagaagtctcgcaaaaatcagcaacccccggaaccacacagttcacgggggttcttctatgccagaaatcagaaaggggaaccagtgaacgaccccgaatggctggatgatcctccttgggccacgcccacccggcgatcatcgaggcggtcaccggaagcggaacacgtagaaagccagtccgcagaaacggtgctgaccccggatgaatgtcagctactgggctatctggacaagggaaaacgcaagcgcaaagagaaagcaggtagcttgcagtgggcttacatggcgatagctagactgggcggttttatggacagcaagcgaaccggaattgccagctggggcgccctctggtaaggttgggaagccctgcaaagtaaactggatggctttcttgccgccaaggatctgatggcgcaggggatcaagatctgatcaagagacaggatgaggatcgtttcgcatgattgaacaagatggattgcacgcaggttctccggccgcttgggtggagaggctattcggctatgactgggcacaacagacaatcggctgctctgatgccgccgtgttccggctgtcagcgcaggggcgcccggttctttttgtcaagaccgacctgtccggtgccctgaatgaactccaagacgaggcagcgcggctatcgtggctggccacgacgggcgttccttgcgcagctgtgctcgacgttgtcactgaagcgggaagggactggctgctattgggcgaagtgccggggcaggatctcctgtcatctcaccttgctcctgccgagaaagtatccatcatggctgatgcaatgcggcggctgcatacgcttgatccggctacctgcccattcgaccaccaagcgaaacatcgcatcgagcgagcacgtactcggatggaagccggtcttgtcgatcaggatgatctggacgaagagcatcaggggctcgcgccagccgaactgttcgccaggctcaaggcgcggatgcccgacggcgaggatctcgtcgtgacccatggcgatgcctgcttgccgaatatcatggtggaaaatggccgcttttctggattcatcgactgtggccggctgggtgtggcggaccgctatcaggacatagcgttggctacccgtgatattgctgaagagcttggcggcgaatgggctgaccgcttcctcgtgctttacggtatcgccgctcccgattcgcagcgcatcgccttctatcgccttcttgacgagttcttctgagcgggactctggggttcgcggaatcatgacctgagctgtttacaattaatcatcgtgtggtaccatgtgtggaattggaaaggacttgaacgacacgtggagatataccatgggtgaactgccgagtaggtagctgataacgagacctctgtcttgtcagctagggtggtctcgtgaactgccgagtaggtagctgataacggatccgaattcgagcgaaggagatatacatatgtttttgcaaagacctaaaccttacagcgatgaaagtttagaaagtttctttatccgagtggctaacaaaaatggctacggtgatgtccatcgcttcctagaagccactaaacgattccttcaagacattgaccataatggctatcaaacctttccgactgatataactcggataaacccatactcagctaaaaacagttccagcgcacgaactgcgtcattcctgaaacttgcacaattgacatttaatgaaccgccagagctacttgggttggcaattaacagaacaaacatgaaatactcgccgtcaactagcgcggttgttagaggtgcagaagtctttcctcgcagtttactacggacgcactccatcccctgctgtcctttgtgtctgcgagaaaatggctacgcctcctacctttggcactttcaggggtacgaatactgccacagccataacgtacctttaattaccacttgtagctgtggtaaggagtttgactaccgagtatctgggttaaagggcatttgctgcaaatgcaaggagcctatcaccttaaccagcagggagaacggtcatgaggcagcgtgtactgtttcaaactggcttgctggccatgaatctaaacctctgccaaatcttcctaaaagctaccgatggggtttagttcattggtggatgggtattaaagatagcgagttcgatcacttttcgttcgttcaatttttctcaaactggccaaggtcattccactcgataatcgaagatgaagtagagttcaaccttgagcatgctgttgtcagcacgtctgaattacgactaaaagatcttcttggtcgattgtttttcggttcaattcggttacctgagcggaatcttcaacacaatatcatccttggtgagcttctctgctatttagaaaatcgtttatggcaagacaagggattaatcgccaacctcaaaatgaacgcgttagaggcgactgtaatgttaaattgtagcctcgatcagattgcatcaatggttgaacaacgcatcttgaagccaaatcgaaaaagcaagcccaacagccctcttgatgttaccgattatctatttcatttcggcgatattttctgtctttggttagctgagttccaaagcgatgagtttaaccgttcgttttatgtgtcgaggtggtaaatgcaaactctgaaagaactaatcgcatccaatcctgacgacttaacaactgaacttaagagagcatttcgtccactcacaccgcatattgcaattgatggtaatgaacttgacgcactgacgatattagtcaatttaaccgataagactgatgatcagaaagacctgctcgatcgagccaaatgcaagcaaaaacttcgagatgaaaaatggtgggctagctgcataaattgcgttaattacagacaaagccataacccaaaattcccggatatacgttctgaaggcgtgattcgaacccaagccctgggtgaattaccgagtttcctactctcgtcctcaaaaatcccaccataccattggtcatatagccatgattcaaaatacgtcaacaaaagcgcattcctcaccaatgagttttgttgggatggtgagatctcatgtttgggtgagcttcttaaagatgcagatcacccactttggaatactttgaaaaagttaggttgttctcaaaaaacttgcaaagcaatggcaaaacaactagctgatattactctcacgactatcaatgtcacactcgcaccaaattacctgactcaaatatctctccccgatagtgatacatcctacatttcactctctcctgttgcatcgctatcgatgcaaagccactttcatcagaggctccaagatgaaaatcggcatagcgcgataacgcggtttagccgaactaccaacatgggggtcactgcgatgacatgtggcggcgcatttagaatgttaaagtctggcgctaagttttccagcccccctcatcaccgattaaacagtaaacgaagttggttgacgtcagagcatgttcagtcattaaaacagtaccagcgcctcaacaaaagcctcatacctgaaaactctcggattgcactccgtagaaaatacaaaatcgagcttcaaaatatggtcagatcttggtttgcaatgcaagaccatacccttgattcgaacatacttatccaacatttgaatcatgacctatcttacttaggagccacaaaacgttttgcatacgatccagcgatgaccaagctctttactgagcttttgaaacgagagttatcaaattcaatcaataatggtgagcaacacactaatggatcgtttttagtcctaccgaatatcagggtttgtggcgcaacagctttaagctccccggtaacggtggggattccatcacttacagctttctttggcttcgttcacgcatttgaacggaatataaatcgcaccacctcatcgtttcgtgttgaatcctttgcgatatgcgtccatcaactacatgtcgagaagcgaggtttgacagcagagtttgtggaaaaaggcgacgggactatatccgctcccgcgacccgggatgactggcagtgtgatgtcgtatttagccttattttgaacaccaactttgctcaacatattgaccaagatacgttagttacatcactaccaaagcgattggctcggggttcagcaaaaattgcgattgatgactttaaacatatcaactcattctcgacattagaaacagcgatcgaatctctgccaatagaagctggtaggtggttatcactttacgcacagtcaaacaataatctaagtgatctattagcagccatgacagaggaccatcagctcatggcaagctgcgtcggttaccacttgttagaagagcccaaagataaaccaaactccctcagaggttacaaacacgctatcgccgagtgcatcattggactcattaactcaatcacctttagctcagagactgatcccaacacaatcttttggtcgctaaagaactatcaaaactacctagtggtacagccaaggagtatcaacgatgaaactaccgacaaatctagcctatgagcgctctatcgacccatcagatgtctgtttttttgtcgtctggcccgatgatagaaaaacacctttaacctacaattctcgtactctgctcgggcaaatggaagcggcatcattagcctatgatgtctcaggtcaaccaataaaaagtgccaccgctgaggcgttagctcaagggaaccctcatcaagttgatttctgccacgttccatacggtgcgagtcatattgaatgcagtttctccgtctcgttttcttctgaactacgtcaaccatataagtgtaactcaagcaaagttaaacaaacgctagtgcaattagtcgagctctacgaaacgaaaatcggctggactgagctagcaacccgatatttgatgaacatttgcaacggtaaatggctgtggaaaaatacccgtaaagcctattgctggaacattgtacttacaccttggccttggaacggggaaaaggttggatttgaagatattcgtactaactacacctcacggcaagactttaaaaataataaaaattggtctgctatagttgaaatgatcaaaaccgcattttctagtactgatgggctggcgatatttgaagtcagggccaccttgcacttgccaacgaatgctatggtgcggccaagccaagttttcacagaaaaagaaagtggcagtaaaagtaaatctaaaactcaaaacagtcgagtttttcagagtacaactattgatggtgaacgatcgccaatactaggggcctttaaaacgggagcagctattgcaaccattgacgactggtatcctgaagccactgagccactaagggtcggacggtttggggttcatcgcgaagatgtcacttgctaccgtcatccgtctaccggaaaagattttttctcgatattacaacaagcagagcactatattgaagtgttgagcgccaacaaaactcccgctcaagaaactatcaacgacatgcactttttaatggctaacctgattaagggtgggatgttccagcataaaggagactgactgtgaaatggtattataagacaatcacctttctgccagagttgtgcaacaacgagtcactggctgcaaagtgtctccgcgttctgcatggatttaactatcagtatgagacacgaaatatcggcgtttcatttccgctttggtgtgatgcaacggttggaaaaaagatttcatttgtcagcaagaacaagatagaactcgacttactacttaaacaacactatttcgtccaaatggaacaacttcaatactttcatatatccaacactgttctcgtcccagaagattgtacatacgtttcctttagacgctgtcaatctatagataagctcacagcagcagggctggcaaggaaaatcagacgcctggagaaacgtgctctatctagaggcgagcaatttgacccatcatcttttgctcaaaaagagcatactgcaatagcgcactaccactcacttggggagtccagcaaacagacgaaccgcaactttcgactcaatatcaggatgctctcggagcaaccccgtgaggggaactcgatttttagtagctatggcttatcaaattcagaaaactcgtttcagcctgtacccttaatctgacctttaataaggagatataccatggcgacaagtttacctacgccctcagcaattacgacttcggcgttagagtatgcattccatactcccgctcgcaatctaacgaaatctcgcggaaaaaacattcatcgttatgtcagtgtaaagatgagtaagaggattacggtagaatctactctagagtgtgatgcctgctatcactttgattttgagccaagtattgttcgcttttgcgctcaaccgattcgatttttatattatctcaatggtcagtctcactcctatgttcctgactttctagttcaatttgataccaacgagtttgttctatatgaagtaaagtcagcttatgctaagaacaaacctgattttgatgttgaatgggaggcgaaagtaaaagcagcaactgaactagggctagaattggagcttgttgaagagagtgatattagggatacggttgtattaaataatcttaagcgcatgcatcgttatgcttcgaaagatgagctgaataacgtacataactctctcttaaaaataataaagtacaatggcgcccaatctgcaagatgcttgggagaacagttgggtttaaaaggccgaactgttttaccaattttgtgcgatttgctgtcaaggtgtttactcgatacacgtttggataagcctctatctcttgaatctcgatttgagttggccagttatggctaagaaagggttctcaagtttccatagaaaagcagtctcttcccaagatacgcttgaatcgatagagcttgtctctagcgctaattgtctagaaagtgttacgtatcaagatatatcagcatttcccgaaacaattgcggtagagattaatttccgattaagcattcttcgctttttagcgcgaaagtgcgaaaccattgtggccaaatcaattgaaccacatcgtgtagagctacagcaaaactatagtagaaaaatacccagtgcaataacgatatatcgatggtggcttgcttttcgaaaatcagactacaaccccattagcttagcacctaatatcaaggatagaggtaatagagagacaaaagtgtcaacagttgttgattctattatggaacaggcagttgaaagagttatatctggacgaaaagtcaatgttagctctgcatataaacgtgttcgacgaaaagttcgtcaatacaatctaactcatggaacgaaatacacgtatcctaagtacgaatctgtaagaaagcgagtaaaaaagaaaaccccatttgagttattagccgcagggaaaggggagagagtagctaagagagagtttcgccgaatgggaaaaaagatcctcacgtctagcgtgctagagagggttgaaatagatcacactgtcgttgacctttttgcagtacacgaagagtatcgaatcccattgggccgaccttggcttactcaattggttgattgttacagtaaagctgtaatcggtttttatttaggtttcgagcctcctagctatgtgtcggtttcccttgcacttaagaatgcaatacaacgcaaagatgacttaatctcctcgtatgaatcgatcgagaatgaatggctatgttatggcatcccagacctactcgtaactgataatggtaaagagtttttgtcgaaagcatttgatcaagcatgtgaatcactattgatcaatgtgcatcaaaataaagttgagacgcccgacaacaaacctcatgttgaacgtaactacgggactattaatacttctctgttagacgatttacctgggaaatccttcagccagtaccttcaaagagaagggtacgactctgtgggagaagctacccttacactcaatgagattagagaaatttacttaatttggttggtggatatttatcataaaaaacccaatcagagaggcactaattgtcctaatgttgcgtggaaaaagggttgtcaagaatgggaaccagaggagttctctggttctaaagacgaattagactttaaatttgctattgttgattacaaacaacttactaaagtagggataactgtctacaaagaactgagttatagcaatgaccgtttagctgaatatagagggaagaaaggaaaccataaagttcagttcaagtataaccctgagtgtatggcagttatttgggtgttggatgaggatatgaatgagtactttacagttaatgcgattgactacgaatatgcaagtagagtatcactttggcaacataaatataacatgaaatatcaagcagaactaaattcagcagaatatgatgaggacaaggaaattgatgcagaaataaaaattgaagaaatcgcagatcgttcaattgttaagactaacaaaatcagagctcggaggcgtggcgctaggcatcaagagaatagcgcaagggctaagtcaatcagtaatgcgaacccggcctcgatacaaaaacatgaagatgaaatcgttagtgcagataatgacgattgggatattgattatgtctgagaaatcgtcaaatgagtgaaacgcgtgaggctcgtatatcaagagctaaaagggcatttgtatccacaccgagcgttaggaaaatcttgagttacatggatagatgtagagatctatcagacctagagtctgagcctacatgcatgatggtctatggtgcttcgggtgtaggtaaaacgaccgtcatcaagaaatacttaaatcaaaacagaagagagtccgaagccgggggcgatataataccggttttgcatattgagttgccagacaatgcgaagccagtagatgcagcaagggaattgctggttgaaatgggtgacccgctagcactttatgaaactgacttagctagattgacgaaaagactgactgaattaatccctgcggtcggcgtgaagctgattattatcgatgagttccaacatttggtggaagaaaggtcaaatcgggttcttacccaagtaggtaattggctaaaaatgatacttaacaaaacgaaatgtccaattgttatatttggtatgccatactcaaaagttgtactgcaagcaaactcgcaacttcacgggcgattttccattcaggttgaactgcgcccctttagctaccagggaggtagaggtgtatttaaaacttttttggaataccttgataaagccctaccttttgaaaaacaggctggcttagccaacgaaagtttgcagaaaaaattgtatgcattctctcagggaaacatgcgttcgttgagaaaccttatttatcaagcatctatcgaagcaattgataatcagcatgagacgataaccgaagaagatttcgtttttgcatcgaagttgacatcgggcgataaacccaactcatggaaaaatccttttgaggagggtgttgaggtaacagaagatatgttacgaccgccaccaaaagatattggttgggaggactatttgagacattcaaccccgagagtgagtaaaccaggtagaaataaaaactttttcgaataacctaggctgctgcgctgctgccaccgctgagcaataactagcataaccccttggggcctctaaacgggtcttgaggggttttttgctgaaacctcaggcatttgttgttgatacaaccataaaatgataattacacccataaattgataattatcacacccataaattgatattgcctcttcatggtctaaacttcagtaagtttacgacattttcctcgaggtcatttccggggatccatggagaaaaaaatcactggatataccaccgttgatatatcccaatggcatcgtaaagaacattttgaggcatttcagtcagttgctcaatgtacctataaccagaccgttcagctggatattacggcctttttaaagaccgtaaagaaaaataagcacaagttttatccggcctttattcacattcttgcccgcctgatgaatgctcatccggagttccgtatggcaatgaaagacggtgagctggtgatatgggatagtgttcacccttgttacaccgttttccatgagcaaactgaaacgttttcatcgctctggagtgaataccacgacgatttccggcagtttctacacatatattcgcaagatgtggcgtgttacggtgaaaacctggcctatttccctaaagggtttattgagaatatgtttttcgtctcagccaatccctgggtgagtttcaccagttttgatttaaacgtggccaatatggacaacttcttcgcccccgttttcactatgggcaaatattatacgcaaggcgacaaggtgctgatgccgctggcgattcaggttcatcatgccgtttgtgatggcttccatgtcggcagaatgcttaatgaattacaacagtactgcgatgagtggcagggcggggcgtaatttttttaaggcagttattggtgcccttctagagtccttactgcagtagttttgctgaaatactcgattcacaaaaatatcaacttatggttgttttgtgagatatcaatatatggttgttttgtggttaagttgctgattataaataattattaaatatcactttatggttgcatcaacaggtaccgagctcgaattcactggccgtcgttttacaacgtcgtgactgggaaaaccctggcgttacccaacttaatcgccttgccactgatagatacaagagccataagaacctcagatccttccgtatttagccagtatgttctctagtgtggttcgttgtttttgcgtgagccatgagaacgaaccattgagatcatgcttactttgcatgtcactcaaaaattttgcctcaaaactggtgagctgaatttttgcagttaaagcatcgtgtagtgtttttcttagtccgttatgtaggtaggaatctgatgtaatggttgttggtattttgtcaccattcatttttatctggttgttctcaagttcggttacgagatccatttgtctatctagttcaacttggaaaatcaacgtatcagtcgggcggcctcgcttatcaaccaccaatttcatattgctgtaagtgtttaaatctttacttattggtttcaaaacccattggttaagccttttaaactcatggtagttattttcaagcattaacatgaacttaaattcatcaaggctaatctctatatttgccttgtgagttttcttttgtgttagttcttttaataaccactcataaatcctcatagagtatttgttttcaaaagacttaacatgttccagattatattttatgaatttttttaactggaaaagataaggcaatatctcttcactaaaaactaattctaatttttcgcttgagaacttggcatagtttgtccactggaaaatctcaaagcctttaaccaaaggattcctgatttccacagttctcgtcatcagctctctggttgctttagctaatacaccataagcattttccctactgatgttcatcatctgagcgtattggttataagtgaacgataccgtccgttctttccttgtagggttttcaatcgtggggttgagtagtgccacacagcataaaattagcttggtttcatgc

SEQ ID NO: 901 - DNA, 14431 bp, Synthetic construct
  source 1..14431: mol_type = other DNA
accttcgggagcgcctgaagcccgttctggacgccctggggccgttgaatcgggatatgcaggccaaggccgccgcgatcatcaaggccgtgggcgaaaagctgctgacggaacagcgggaagtccagcgccagaaacaggcccagcgccagcaggaacgcgggcgcgcacatttccccgaaaagtgccacctgggatgaatgtcagctactgggctatctggacaagggaaaacgcaagcgcaaagagaaagcaggtagcttgcagtgggcttacatggcgatagctagactgggcggttttatggacagcaagcgaaccggaattgccagctggggcgccctctggtaaggttgggaagccctgcaaagtaaactggatggctttcttgccgccaaggatctgatggcgcaggggatcaagatctgatcaagagacaggatgaggatcgtttcgcatgattgaacaagatggattgcacgcaggttctccggccgcttgggtggagaggctattcggctatgactgggcacaacagacaatcggctgctctgatgccgccgtgttccggctgtcagcgcaggggcgcccggttctttttgtcaagaccgacctgtccggtgccctgaatgaactgcaagacgaggcagcgcggctatcgtggctggccacgacgggcgttccttgcgcagctgtgctcgacgttgtcactgaagcgggaagggactggctgctattgggcgaagtgccggggcaggatctcctgtcatctcaccttgctcctgccgagaaagtatccatcatggctgatgcaatgcggcggctgcatacgcttgatccggctacctgcccattcgaccaccaagcgaaacatcgcatcgagcgagcacgtactcggatggaagccggtcttgtcgatcaggatgatctggacgaagagcatcaggggctcgcgccagccgaactgttcgccaggctcaaggcgcgcatgcccgacggcgaggatctcgtcgtgacccatggcgatgcctgcttgccgaatatcatggtggaaaatggccgcttttctggattcatcgactgtggccggctgggtgtggcggaccgctatcaggacatagcgttggctacccgtgatattgctgaagagcttggcggcgaatgggctgaccgcttcctcgtgctttacggtatcgccgctcccgattcgcagcgcatcgccttctatcgccttcttgacgagttcttctgagcgggactctggggttcgaaatgaccgaccaagcgacgcccaacctgccatcacgagatttcgattccaccgccgccttctatgaaaggttgggcttcggaatcgttttccgggacgccggctggatgatcctccagcgcggggatctcatgctggagttcttcgcccacccccatgggcaaatattatacgcaaggcgacaaggtgctgatgccgctggcgattcaggttcatcatgccgtttgtgatggcttccatgtcggcagaatgcttaatgaattacaacagtttttatgcatgcgcccaatacgcaaaccgcctctccccgcgcgttggccgattcattaatgcagctggcacgacaggtttcccgactggtggataaccgtattaccgcctttgagtgagctgataccgctcgccgcagccgaactaccgagcgcagcgagtcagtgagcgaggacacagggcatccagctcattgggggcgacggtcaattaagtccagtcatagtgggactggtgtcctaataatttaagcattcttttctagaaatactttgtctttccttgactttcatcagggtggttgttatattagtaattgtgttagcactccattaagttaagtgctaaaaagaggtgagcggtggagatataccatgggtgaactgccgagtaggtagctgataacgagacctctgtcttgtcagctagggtggtctcgtgaactgccgagtaggtagctgataacggatccgaattcgagcgaaggagatatacatatgtttttgcaaagacctaaaccttacagcgatgaaagtttagaaagtttctttatccgagtggctaacaaaaatggctacggtgatgtccatcgcttcctagaagccactaaacgattccttcaagacattgaccataatggctatcaaacctttccgactgatataactcggataaacccatactcagctaaaaacagttccagcgcacgaactgcgtcattcctgaaacttgcacaattgacatttaatgaaccgccagagctacttgggttggcaattaacagaacaaacatgaaatactcgccgtcaactagcgcggttgttagaggtgcagaagtctttcctcgcagtttactacggacgcactccatcccctgctgtcctttgtgtctgcgagaaaatggctacgcctcctacctttggcactttcaggggtacgaatactgccacagccataacgtacctttaattaccacttgtagctgtggtaaggagtttgactaccgagtatctgggttaaagggcatttgctgcaaatgcaaggagcctatcaccttaaccagcagggagaacggtcatgaggcagcgtgtactgtttcaaactggcttgctggccatgaatctaaacctctgccaaatcttcctaaaagctaccgatggggtttagttcattggtggatgggtattaaagatagcgagttcgatcacttttcgttcgttcaatttttctcaaactggccaaggtcattccactcgataatcgaagatgaagtagagttcaaccttgagcatgctgttgtcagcacgtctgaattacgactaaaagatcttcttggtcgattgtttttcggttcaattcggttacctgagcggaatcttcaacacaatatcatccttggtgagcttctctgctatttagaaaatcgtttatggcaagacaagggattaatcgccaacctcaaaatgaacgcgttagaggcgactgtaatgttaaattgtagcctcgatcagattgcatcaatggttgaacaacgcatcttgaagccaaatcgaaaaagcaagcccaacagccctcttgatgttaccgattatctatttcatttcggcgatattttctgtctttggttagctgagttccaaagcgatgagtttaaccgttcgttttatgtgtcgaggtggtaaatgcaaactctgaaagaactaatcgcatccaatcctgacgacttaacaactgaacttaagagagcatttcgtccactcacaccgcatattgcaattgatggtaatgaacttgacgcactgacgatattagtcaatttaaccgataagactgatgatcagaaagacctgctcgatcgagccaaatgcaagcaaaaacttcgagatgaaaaatggtgggctagctgcataaattgcgttaattacagacaaagccataacccaaaattcccggatatacgttctgaaggcgtgattcgaacccaagccctgggtgaattaccgagtttcctactctcgtcctcaaaaatcccaccataccattggtcatatagccatgattcaaaatacgtcaacaaaagcgcattcctcaccaatgagttttgttgggatggtgagatctcatgtttgggtgagcttcttaaagatgcagatcacccactttggaatactttgaaaaagttaggttgttctcaaaaaacttgcaaagcaatggcaaaacaactagctgatattactctcacgactatcaatgtcacactcgcaccaaattacctgactcaaatatctctccccgatagtgatacatcctacatttcactctctcctgttgcatcgctatcgatgcaaagccactttcatcagaggctccaagatgaaaatcggcatagcgcgataacgcggtttagccgaactaccaacatgggggtcactgcgatgacatgtggcggcgcatttagaatgttaaagtctggcgctaagttttccagcccccctcatcaccgattaaacagtaaacgaagttggttgacgtcagagcatgttcagtcattaaaacagtaccagcgcctcaacaaaagcctcatacctgaaaactctcggattgcactccgtagaaaatacaaaatcgagcttcaaaatatggtcagatcttggtttgcaatgcaagaccatacccttgattcgaacatacttatccaacatttgaatcatgacctatcttacttaggagccacaaaacgttttgcatacgatccagcgatgaccaagctctttactgagcttttgaaacgagagttatcaaattcaatcaataatggtgagcaacacactaatggatcgtttttagtcctaccgaatatcagggtttgtggcgcaacagctttaagctccccggtaacggtggggattccatcacttacagctttctttggcttcgttcacgcatttgaacggaatataaatcgcaccacctcatcgtttcgtgttgaatcctttgcgatatgcgtccatcaactacatgtcgagaagcgaggtttgacagcagagtttgtggaaaaaggcgacgggactatatccgctcccgcgacccgggatgactggcagtgtgatgtcgtatttagccttattttgaacaccaactttgctcaacatattgaccaagatacgttagttacatcactaccaaagcgattggctcggggttcagcaaaaattgcgattgatgactttaaacatatcaactcattctcgacattagaaacagcgatcgaatctctgccaatagaagctggtaggtggttatcactttacgcacagtcaaacaataatctaagtgatctattagcagccatgacagaggaccatcagctcatggcaagctgcgtcggttaccacttgttagaagagcccaaagataaaccaaactccctcagaggttacaaacacgctatcgccgagtgcatcattggactcattaactcaatcacctttagctcagagactgatcccaacacaatcttttggtcgctaaagaactatcaaaactacctagtggtacagccaaggagtatcaacgatgaaactaccgacaaatctagcctatgagcgctctatcgacccatcagatgtctgtttttttgtcgtctggcccgatgatagaaaaacacctttaacctacaattctcgtactctgctcgggcaaatggaagcggcatcattagcctatgatgtctcaggtcaaccaataaaaagtgccaccgctgaggcgttagctcaagggaaccctcatcaagttgatttctgccacgttccatacggtgcgagtcatattgaatgcagtttctccgtctcgttttcttctgaactacgtcaaccatataagtgtaactcaagcaaagttaaacaaacgctagtgcaattagtcgagctctacgaaacgaaaatcggctggactgagctagcaacccgatatttgatgaacatttgcaacggtaaatggctgtggaaaaatacccgtaaagcctattgctggaacattgtacttacaccttggccttggaacggggaaaaggttggatttgaagatattcgtactaactacacctcacggcaagactttaaaaataataaaaattggtctgctatagttgaaatgatcaaaaccgcattttctagtactgatgggctggcgatatttgaagtcagggccaccttgcacttgccaacgaatgctatggtgcggccaagccaagttttcacagaaaaagaaagtggcagtaaaagtaaatctaaaactcaaaacagtcgagtttttcagagtacaactattgatggtgaacgatcgccaatactaggggcctttaaaacgggagcagctattgcaaccattgacgactggtatcctgaagccactgagccactaagggtcggacggtttggggttcatcgcgaagatgtcacttgctaccgtcatccgtctaccggaaaagattttttctcgatattacaacaagcagagcactatattgaagtgttgagcgccaacaaaactcccgctcaagaaactatcaacgacatgcactttttaatggctaacctgattaagggtgggatgttccagcataaaggagactgactgtgaaatggtattataagacaatcacctttctgccagagttgtgcaacaacgagtcactggctgcaaagtgtctccgcgttctgcatggatttaactatcagtatgagacacgaaatatcggcgtttcatttccgctttggtgtgatgcaacggttggaaaaaagatttcatttgtcagcaagaacaagatagaactcgacttactacttaaacaacactatttcgtccaaatggaacaacttcaatactttcatatatccaacactgttctcgtcccagaagattgtacatacgtttcctttagacgctgtcaatctatagataagctcacagcagcagggctggcaaggaaaatcagacgcctggagaaacgtgctctatctagaggcgagcaatttgacccatcatcttttgctcaaaaagagcatactgcaatagcgcactaccactcacttggggagtccagcaaacagacgaaccgcaactttcgactcaatatcaggatgctctcggagcaaccccgtgaggggaactcgatttttagtagctatggcttatcaaattcagaaaactcgtttcagcctgtacccttaatctgacctttaataaggagatataccatggcgacaagtttacctacgccctcagcaattacgacttcggcgttagagtatgcattccatactcccgctcgcaatctaacgaaatctcgcggaaaaaacattcatcgttatgtcagtgtaaagatgagtaagaggattacggtagaatctactctagagtgtgatgcctgctatcactttgattttgagccaagtattgttcgcttttgcgctcaaccgattcgatttttatattatctcaatggtcagtctcactcctatgttcctgactttctagttcaatttgataccaacgagtttgttctatatgaagtaaagtcagcttatgctaagaacaaacctgattttgatgttgaatgggaggcgaaagtaaaagcagcaactgaactagggctagaattggagcttgttgaagagagtgatattagggatacggttgtattaaataatcttaagcgcatgcatcgttatgcttcgaaagatgagctgaataacgtacataactctctcttaaaaataataaagtacaatggcgcccaatctgcaagatgcttgggagaacagttgggtttaaaaggccgaactgttttaccaattttgtgcgatttgctgtcaaggtgtttactcgatacacgtttggataagcctctatctcttgaatctcgatttgagttggccagttatggctaagaaagggttctcaagtttccatagaaaagcagtctcttcccaagatacgcttgaatcgatagagcttgtctctagcgctaattgtctagaaagtgttacgtatcaagatatatcagcatttcccgaaacaattgcggtagagattaatttccgattaagcattcttcgctttttagcgcgaaagtgcgaaaccattgtggccaaatcaattgaaccacatcgtgtagagctacagcaaaactatagtagaaaaatacccagtgcaataacgatatatcgatggtggcttgcttttcgaaaatcagactacaaccccattagcttagcacctaatatcaaggatagaggtaatagagagacaaaagtgtcaacagttgttgattctattatggaacaggcagttgaaagagttatatctggacgaaaagtcaatgttagctctgcatataaacgtgttcgacgaaaagttcgtcaatacaatctaactcatggaacgaaatacacgtatcctaagtacgaatctgtaagaaagcgagtaaaaaagaaaaccccatttgagttattagccgcagggaaaggggagagagtagctaagagagagtttcgccgaatgggaaaaaagatcctcacgtctagcgtgctagagagggttgaaatagatcacactgtcgttgacctttttgcagtacacgaagagtatcgaatcccattgggccgaccttggcttactcaattggttgattgttacagtaaagctgtaatcggtttttatttaggtttcgagcctcctagctatgtgtcggtttcccttgcacttaagaatgcaatacaacgcaaagatgacttaatctcctcgtatgaatcgatcgagaatgaatggctatgttatggcatcccagacctactcgtaactgataatggtaaagagtttttgtcgaaagcatttgatcaagcatgtgaatcactattgatcaatgtgcatcaaaataaagttgagacgcccgacaacaaacctcatgttgaacgtaactacgggactattaatacttctctgttagacgatttacctgggaaatccttcagccagtaccttcaaagagaagggtacgactctgtgggagaagctacccttacactcaatgagattagagaaatttacttaatttggttggtggatatttatcataaaaaacccaatcagagaggcactaattgtcctaatgttgcgtggaaaaagggttgtcaagaatgggaaccagaggagttctctggttctaaagacgaattagactttaaatttgctattgttgattacaaacaacttactaaagtagggataactgtctacaaagaactgagttatagcaatgaccgtttagctgaatatagagggaagaaaggaaaccataaagttcagttcaagtataaccctgagtgtatggcagttatttgggtgttggatgaggatatgaatgagtactttacagttaatgcgattgactacgaatatgcaagtagagtatcactttggcaacataaatataacatgaaatatcaagcagaactaaattcagcagaatatgatgaggacaaggaaattgatgcagaaataaaaattgaagaaatcgcagatcgttcaattgttaagactaacaaaatcagagctcggaggcgtggcgctaggcatcaagagaatagcgcaagggctaagtcaatcagtaatgcgaacccggcctcgatacaaaaacatgaagatgaaatcgttagtgcagataatgacgattgggatattgattatgtctgagaaatcgtcaaatgagtgaaacgcgtgaggctcgtatatcaagagctaaaagggcatttgtatccacaccgagcgttaggaaaatcttgagttacatggatagatgtagagatctatcagacctagagtctgagcctacatgcatgatggtctatggtgcttcgggtgtaggtaaaacgaccgtcatcaagaaatacttaaatcaaaacagaagagagtccgaagccgggggcgatataataccggttttgcatattgagttgccagacaatgcgaagccagtagatgcagcaagggaattgctggttgaaatgggtgacccgctagcactttatgaaactgacttagctagattgacgaaaagactgactgaattaatccctgcggtcggcgtgaagctgattattatcgatgagttccaacatttggtggaagaaaggtcaaatcgggttcttacccaagtaggtaattggctaaaaatgatacttaacaaaacgaaatgtccaattgttatatttggtatgccatactcaaaagttgtactgcaagcaaactcgcaacttcacgggcgattttccattcaggttgaactgcgcccctttagctaccagggaggtagaggtgtatttaaaacttttttggaataccttgataaagccctaccttttgaaaaacaggctggcttagccaacgaaagtttgcagaaaaaattgtatgcattctctcagggaaacatgcgttcgttgagaaaccttatttatcaagcatctatcgaagcaattgataatcagcatgagacgataaccgaagaagatttcgtttttgcatcgaagttgacatcgggcgataaacccaactcatggaaaaatccttttgaggagggtgttgaggtaacagaagatatgttacgaccgccaccaaaagatattggttgggaggactatttgagacattcaaccccgagagtgagtaaaccaggtagaaataaaaactttttcgaataacctaggctgctgcgctgctgccaccgctgagcaataactagcataaccccttggggcctctaaacgggtcttgaggggttttttgctgaaacctcaggcatttgttgttgatacaaccataaaatgataattacacccataaattgataattatcacacccataaattgatattgcctcttcatggtctaaacttcagtaagtttacgacattttcctcgaggtcatttccggggatccatggagaaaaaaatcactggatataccaccgttgatatatcccaatggcatcgtaaagaacattttgaggcatttcagtcagttgctcaatgtacctataaccagaccgttcagctggatattacggcctttttaaagaccgtaaagaaaaataagcacaagttttatccggcctttattcacattcttgcccgcctgatgaatgctcatccggagttccgtatggcaatgaaagacggtgagctggtgatatgggatagtgttcacccttgttacaccgttttccatgagcaaactgaaacgttttcatcgctctggagtgaataccacgacgatttccggcagtttctacacatatattcgcaagatgtggcgtgttacggtgaaaacctggcctatttccctaaagggtttattgagaatatgtttttcgtctcagccaatccctgggtgagtttcaccagttttgatttaaacgtggccaatatggacaacttcttcgcccccgttttcactatgggcaaatattatacgcaaggcgacaaggtgctgatgccgctggcgattcaggttcatcatgccgtttgtgatggcttccatgtcggcagaatgcttaatgaattacaacagtactgcgatgagtggcagggcggggcgtaatttttttaaggcagttattggtgcccttctagagtccttactgcagtagttttgctgaaatactcgattcacaaaaatatcaacttatggttgttttgtgagatatcaatatatggttgttttgtggttaagttgctgattataaataattattaaatatcactttatggttgcatcaacaggtaccgagctcgaattcactggccgtcgttttacaacgtcgtgactgggaaaaccctggcgttacccaacttaatcgccttgccattttttaaccaataggccgtactgcgatgagtggcagggcggggcgtaatttttttaaggcagttattggtgcccttaaacgcctggttgctacgcctgaataagtgataataagcggatgaatggcagaaattcgaaagcaaattcgacccggtcgtcggttcagggcagggtcgttaaatagccgcttatgtctattgctggtttaccggtttattgactaccggaagcagtgtgaccgtgtgcttctcaaatgcctgaggccagtttgctcaggctctccccgtggaggtaataattgacgatatgatcatttattctgcctcccagagcctgataaaaacggtgaatccgttagcgaggtgccgccggcttccattcaggtcgaggtggcccggctccatgcaccgcgacgcaacgcggggaggcagacaaggtatagggcggcgaggcggctacagccgatagtctggaacagcgcacttacgggttgctgcgcaacccaagtgctaccggcgcggcagcgtgacccgtgtcggcggctccaacggctcgccatcgtccagaaaacacggctcatcgggcatcggcaggcgctgctgcccgcgccgttcccattcctccgtttcggtcaaggctggcaggtctggttccatgcccggaatgccgggctggctgggcggctcctcgccggggccggtcggtagttgctgctcgcccggatacagggtcgggatgcggcgcaggtcgccatgccccaacagcgattcgtcctggtcgtcgtgatcaaccaccacggcggcactgaacaccgacaggcgcaactggtcgcggggctggccccacgccacgcggtcattgaccacgtaggccgacacggtgccggggccgttgagcttcacgacggagatccagcgctcggccaccaagtccttgactgcgtattggaccgtccgcaaagaacgtccgatgagcttggaaagtgtcttctggctgaccaccacggcgttctggtggcccatctgcgccacgaggtgatgcagcagcattgccgccgtgggtttcctcgcaataagcccggcccacgcctcatgcgctttgcgttccgtttgcacccagtgaccgggcttgttcttggcttgaatgccgatttctctggactgcgtggccatgcttatctccatgcggtaggggtgccgcacggttgcggcaccatgcgcaatcagctgcaacttttcggcagcgcgacaacaattatgcgttgcgtaaaagtggcagtcaattacagattttctttaacctacgcaatgagctattgcggggggtgccgcaatgagctgttgcgtaccccccttttttaagttgttgatttttaagtctttcgcatttcgccctatatctagttctttggtgcccaaagaagggcacccctgcggggttcccccacgccttcggcgcggctccccctccggcaaaaagtggcccctccggggcttgttgatcgactgcgcggccttcggccttgcccaaggtggcgctgcccccttggaacccccgcactcgccgccgtgaggctcggggggcaggcgggcgggcttcgcccttcgactgcccccactcgcataggcttgggtcgttccaggcgcgtcaaggccaagccgctgcgcggtcgctgcgcgagccttgacccgccttccacttggtgtccaaccggcaagcgaagcgcgcaggccgcaggccggaggcttttccccagagaaaattaaaaaaattgatggggcaaggccgcaggccgcgcagttggagccggtgggtatgtggtcgaaggctgggtagccggtgggcaatccctgtggtcaagctcgtgggcaggcgcagcctgtccatcagcttgtccagcagggttgtccacgggccgagcgaagcgagccagccggtggccgctcgcggccatcgtccacatatccacgggctggcaagggagcgcagcgaccgcgcagggcgaagcccggagagcaagcccgtagggcgccgcagccgccgtaggcggtcacgactttgcgaagcaaagtctagtgagtatactcaagcattgagtggcccgccggaggcaccgccttgcgctgcccccgtcgagccggttggacaccaaaagggaggggcaggcatggcggcatacgcgatcatgcgatgcaagaagctggcgaaaatgggcaacgtggcggccagtctcaagcacgcctaccgcgagcgcgagacgcccaacgctgacgccagcaggacgccagagaacgagcactgggcggccagcagcaccgatgaagcgatgggccgactgcgcgagttgctgccagagaagcggcgcaaggacgctgtgttggcggtcgagtacgtcatgacggccagcccggaatggtggaagtcggccagccaagaacagcaggcggcgttcttcgagaaggcgcacaagtggctggcggacaagtacggggcggatcgcatcgtgacggccagcatccaccgtgacgaaaccagcccgcacatgaccgcgttcgtggtgccgctgacgcaggacggcaggctgtcggccaaggagttcatcggcaacaaagcgcagatgacccgcgaccagaccacgtttgcggccgctgtggccgatctagggctgcaacggggcatcgagggcagcaaggcacgtcacacgcgcattcaggcgttctacgaggccctggagcggccaccagtgggccacgtcaccatcagcccgcaagcggtcgagccacgcgcctatgcaccgcagggattggccgaaaagctgggaatctcaaagcgcgttgagacgccggaagccgtggccgaccggctgacaaaagcggttcggcaggggtatgagcctgccctacaggccgccgcaggagcgcgtgagatgcgcaagaaggccgatcaagcccaagagacggcccgag

SEQ ID NO: 902 - DNA, 14415 bp, Synthetic construct
  source 1..14415: mol_type = other DNA
accttcgggagcgcctgaagcccgttctggacgccctggggccgttgaatcgggatatgcaggccaaggccgccgcgatcatcaaggccgtgggcgaaaagctgctgacggaacagcgggaagtccagcgccagaaacaggcccagcgccagcaggaacgcgggcgcgcacatttccccgaaaagtgccacctgggatgaatgtcagctactgggctatctggacaagggaaaacgcaagcgcaaagagaaagcaggtagcttgcagtgggcttacatggcgatagctagactgggcggttttatggacagcaagcgaaccggaattgccagctggggcgccctctggtaaggttgggaagccctgcaaagtaaactggatggctttcttgccgccaaggatctgatggcgcaggggatcaagatctgatcaagagacaggatgaggatcgtttcgcatgattgaacaagatggattgcacgcaggttctccggccgcttgggtggagaggctattcggctatgactgggcacaacagacaatcggctgctctgatgccgccgtgttccggctgtcagcgcaggggcgcccggttctttttgtcaagaccgacctgtccggtgccctgaatgaactgcaagacgaggcagcgcggctatcgtggctggccacgacgggcgttccttgcgcagctgtgctcgacgttgtcactgaagcgggaagggactggctgctattgggcgaagtgccggggcaggatctcctgtcatctcaccttgctcctgccgagaaagtatccatcatggctgatgcaatgcggcggctgcatacgcttgatccggctacctgcccattcgaccaccaagcgaaacatcgcatcgagcgagcacgtactcggatggaagccggtcttgtcgatcaggatgatctggacgaagagcatcaggggctcgcgccagccgaactgttcgccaggctcaaggcgcgcatgcccgacggcgaggatctcgtcgtgacccatggcgatgcctgcttgccgaatatcatggtggaaaatggccgcttttctggattcatcgactgtggccggctgggtgtggcggaccgctatcaggacatagcgttggctacccgtgatattgctgaagagcttggcggcgaatgggctgaccgcttcctcgtgctttacggtatcgccgctcccgattcgcagcgcatcgccttctatcgccttcttgacgagttcttctgagcgggactctggggttcgaaatgaccgaccaagcgacgcccaacctgccatcacgagatttcgattccaccgccgccttctatgaaaggttgggcttcggaatcgttttccgggacgccggctggatgatcctccagcgcggggatctcatgctggagttcttcgcccacccccatgggcaaatattatacgcaaggcgacaaggtgctgatgccgctggcgattcaggttcatcatgccgtttgtgatggcttccatgtcggcagaatgcttaatgaattacaacagtttttatgcatgcgcccaatacgcaaaccgcctctccccgcgcgttggccgattcattaatgcagctggcacgacaggtttcccgactggtggataaccgtattaccgcctttgagtgagctgataccgctcgccgcagccgaactaccgagcgcagcgagtcagtgagcgaggacacagcggattgcattaggttttagtttcttgtataatgcttaatgttggtcactgacaggctacgatacggaaggttgctcacgcccggcccctttgccatggctagtgtgtggaaatttccgaggagcaagtctatttccaaaaatgggcgaaaaaggaggtaatacagtggagatataccatgggtgaactgccgagtaggtagctgataacgagacctctgtcttgtcagctagggtggtctcgtgaactgccgagtaggtagctgataacggatccgaattcgagcgaaggagatatacatatgtttttgcaaagacctaaaccttacagcgatgaaagtttagaaagtttctttatccgagtggctaacaaaaatggctacggtgatgtccatcgcttcctagaagccactaaacgattccttcaagacattgaccataatggctatcaaacctttccgactgatataactcggataaacccatactcagctaaaaacagttccagcgcacgaactgcgtcattcctgaaacttgcacaattgacatttaatgaaccgccagagctacttgggttggcaattaacagaacaaacatgaaatactcgccgtcaactagcgcggttgttagaggtgcagaagtctttcctcgcagtttactacggacgcactccatcccctgctgtcctttgtgtctgcgagaaaatggctacgcctcctacctttggcactttcaggggtacgaatactgccacagccataacgtacctttaattaccacttgtagctgtggtaaggagtttgactaccgagtatctgggttaaagggcatttgctgcaaatgcaaggagcctatcaccttaaccagcagggagaacggtcatgaggcagcgtgtactgtttcaaactggcttgctggccatgaatctaaacctctgccaaatcttcctaaaagctaccgatggggtttagttcattggtggatgggtattaaagatagcgagttcgatcacttttcgttcgttcaatttttctcaaactggccaaggtcattccactcgataatcgaagatgaagtagagttcaaccttgagcatgctgttgtcagcacgtctgaattacgactaaaagatcttcttggtcgattgtttttcggttcaattcggttacctgagcggaatcttcaacacaatatcatccttggtgagcttctctgctatttagaaaatcgtttatggcaagacaagggattaatcgccaacctcaaaatgaacgcgttagaggcgactgtaatgttaaattgtagcctcgatcagattgcatcaatggttgaacaacgcatcttgaagccaaatcgaaaaagcaagcccaacagccctcttgatgttaccgattatctatttcatttcggcgatattttctgtctttggttagctgagttccaaagcgatgagtttaaccgttcgttttatgtgtcgaggtggtaaatgcaaactctgaaagaactaatcgcatccaatcctgacgacttaacaactgaacttaagagagcatttcgtccactcacaccgcatattgcaattgatggtaatgaacttgacgcactgacgatattagtcaatttaaccgataagactgatgatcagaaagacctgctcgatcgagccaaatgcaagcaaaaacttcgagatgaaaaatggtgggctagctgcataaattgcgttaattacagacaaagccataacccaaaattcccggatatacgttctgaaggcgtgattcgaacccaagccctgggtgaattaccgagtttcctactctcgtcctcaaaaatcccaccataccattggtcatatagccatgattcaaaatacgtcaacaaaagcgcattcctcaccaatgagttttgttgggatggtgagatctcatgtttgggtgagcttcttaaagatgcagatcacccactttggaatactttgaaaaagttaggttgttctcaaaaaacttgcaaagcaatggcaaaacaactagctgatattactctcacgactatcaatgtcacactcgcaccaaattacctgactcaaatatctctccccgatagtgatacatcctacatttcactctctcctgttgcatcgctatcgatgcaaagccactttcatcagaggctccaagatgaaaatcggcatagcgcgataacgcggtttagccgaactaccaacatgggggtcactgcgatgacatgtggcggcgcatttagaatgttaaagtctggcgctaagttttccagcccccctcatcaccgattaaacagtaaacgaagttggttgacgtcagagcatgttcagtcattaaaacagtaccagcgcctcaacaaaagcctcatacctgaaaactctcggattgcactccgtagaaaatacaaaatcgagcttcaaaatatggtcagatcttggtttgcaatgcaagaccatacccttgattcgaacatacttatccaacatttgaatcatgacctatcttacttaggagccacaaaacgttttgcatacgatccagcgatgaccaagctctttactgagcttttgaaacgagagttatcaaattcaatcaataatggtgagcaacacactaatggatcgtttttagtcctaccgaatatcagggtttgtggcgcaacagctttaagctccccggtaacggtggggattccatcacttacagctttctttggcttcgttcacgcatttgaacggaatataaatcgcaccacctcatcgtttcgtgttgaatcctttgcgatatgcgtccatcaactacatgtcgagaagcgaggtttgacagcagagtttgtggaaaaaggcgacgggactatatccgctcccgcgacccgggatgactggcagtgtgatgtcgtatttagccttattttgaacaccaactttgctcaacatattgaccaagatacgttagttacatcactaccaaagcgattggctcggggttcagcaaaaattgcgattgatgactttaaacatatcaactcattctcgacattagaaacagcgatcgaatctctgccaatagaagctggtaggtggttatcactttacgcacagtcaaacaataatctaagtgatctattagcagccatgacagaggaccatcagctcatggcaagctgcgtcggttaccacttgttagaagagcccaaagataaaccaaactccctcagaggttacaaacacgctatcgccgagtgcatcattggactcattaactcaatcacctttagctcagagactgatcccaacacaatcttttggtcgctaaagaactatcaaaactacctagtggtacagccaaggagtatcaacgatgaaactaccgacaaatctagcctatgagcgctctatcgacccatcagatgtctgtttttttgtcgtctggcccgatgatagaaaaacacctttaacctacaattctcgtactctgctcgggcaaatggaagcggcatcattagcctatgatgtctcaggtcaaccaataaaaagtgccaccgctgaggcgttagctcaagggaaccctcatcaagttgatttctgccacgttccatacggtgcgagtcatattgaatgcagtttctccgtctcgttttcttctgaactacgtcaaccatataagtgtaactcaagcaaagttaaacaaacgctagtgcaattagtcgagctctacgaaacgaaaatcggctggactgagctagcaacccgatatttgatgaacatttgcaacggtaaatggctgtggaaaaatacccgtaaagcctattgctggaacattgtacttacaccttggccttggaacggggaaaaggttggatttgaagatattcgtactaactacacctcacggcaagactttaaaaataataaaaattggtctgctatagttgaaatgatcaaaaccgcattttctagtactgatgggctggcgatatttgaagtcagggccaccttgcacttgccaacgaatgctatggtgcggccaagccaagttttcacagaaaaagaaagtggcagtaaaagtaaatctaaaactcaaaacagtcgagtttttcagagtacaactattgatggtgaacgatcgccaatactaggggcctttaaaacgggagcagctattgcaaccattgacgactggtatcctgaagccactgagccactaagggtcggacggtttggggttcatcgcgaagatgtcacttgctaccgtcatccgtctaccggaaaagattttttctcgatattacaacaagcagagcactatattgaagtgttgagcgccaacaaaactcccgctcaagaaactatcaacgacatgcactttttaatggctaacctgattaagggtgggatgttccagcataaaggagactgactgtgaaatggtattataagacaatcacctttctgccagagttgtgcaacaacgagtcactggctgcaaagtgtctccgcgttctgcatggatttaactatcagtatgagacacgaaatatcggcgtttcatttccgctttggtgtgatgcaacggttggaaaaaagatttcatttgtcagcaagaacaagatagaactcgacttactacttaaacaacactatttcgtccaaatggaacaacttcaatactttcatatatccaacactgttctcgtcccagaagattgtacatacgtttcctttagacgctgtcaatctatagataagctcacagcagcagggctggcaaggaaaatcagacgcctggagaaacgtgctctatctagaggcgagcaatttgacccatcatcttttgctcaaaaagagcatactgcaatagcgcactaccactcacttggggagtccagcaaacagacgaaccgcaactttcgactcaatatcaggatgctctcggagcaaccccgtgaggggaactcgatttttagtagctatggcttatcaaattcagaaaactcgtttcagcctgtacccttaatctgacctttaataaggagatataccatggcgacaagtttacctacgccctcagcaattacgacttcggcgttagagtatgcattccatactcccgctcgcaatctaacgaaatctcgcggaaaaaacattcatcgttatgtcagtgtaaagatgagtaagaggattacggtagaatctactctagagtgtgatgcctgctatcactttgattttgagccaagtattgttcgcttttgcgctcaaccgattcgatttttatattatctcaatggtcagtctcactcctatgttcctgactttctagttcaatttgataccaacgagtttgttctatatgaagtaaagtcagcttatgctaagaacaaacctgattttgatgttgaatgggaggcgaaagtaaaagcagcaactgaactagggctagaattggagcttgttgaagagagtgatattagggatacggttgtattaaataatcttaagcgcatgcatcgttatgcttcgaaagatgagctgaataacgtacataactctctcttaaaaataataaagtacaatggcgcccaatctgcaagatgcttgggagaacagttgggtttaaaaggccgaactgttttaccaattttgtgcgatttgctgtcaaggtgtttactcgatacacgtttggataagcctctatctcttgaatctcgatttgagttggccagttatggctaagaaagggttctcaagtttccatagaaaagcagtctcttcccaagatacgcttgaatcgatagagcttgtctctagcgctaattgtctagaaagtgttacgtatcaagatatatcagcatttcccgaaacaattgcggtagagattaatttccgattaagcattcttcgctttttagcgcgaaagtgcgaaaccattgtggccaaatcaattgaaccacatcgtgtagagctacagcaaaactatagtagaaaaatacccagtgcaataacgatatatcgatggtggcttgcttttcgaaaatcagactacaaccccattagcttagcacctaatatcaaggatagaggtaatagagagacaaaagtgtcaacagttgttgattctattatggaacaggcagttgaaagagttatatctggacgaaaagtcaatgttagctctgcatataaacgtgttcgacgaaaagttcgtcaatacaatctaactcatggaacgaaatacacgtatcctaagtacgaatctgtaagaaagcgagtaaaaaagaaaaccccatttgagttattagccgcagggaaaggggagagagtagctaagagagagtttcgccgaatgggaaaaaagatcctcacgtctagcgtgctagagagggttgaaatagatcacactgtcgttgacctttttgcagtacacgaagagtatcgaatcccattgggccgaccttggcttactcaattggttgattgttacagtaaagctgtaatcggtttttatttaggtttcgagcctcctagctatgtgtcggtttcccttgcacttaagaatgcaatacaacgcaaagatgacttaatctcctcgtatgaatcgatcgagaatgaatggctatgttatggcatcccagacctactcgtaactgataatggtaaagagtttttgtcgaaagcatttgatcaagcatgtgaatcactattgatcaatgtgcatcaaaataaagttgagacgcccgacaacaaacctcatgttgaacgtaactacgggactattaatacttctctgttagacgatttacctgggaaatccttcagccagtaccttcaaagagaagggtacgactctgtgggagaagctacccttacactcaatgagattagagaaatttacttaatttggttggtggatatttatcataaaaaacccaatcagagaggcactaattgtcctaatgttgcgtggaaaaagggttgtcaagaatgggaaccagaggagttctctggttctaaagacgaattagactttaaatttgctattgttgattacaaacaacttactaaagtagggataactgtctacaaagaactgagttatagcaatgaccgtttagctgaatatagagggaagaaaggaaaccataaagttcagttcaagtataaccctgagtgtatggcagttatttgggtgttggatgaggatatgaatgagtactttacagttaatgcgattgactacgaatatgcaagtagagtatcactttggcaacataaatataacatgaaatatcaagcagaactaaattcagcagaatatgatgaggacaaggaaattgatgcagaaataaaaattgaagaaatcgcagatcgttcaattgttaagactaacaaaatcagagctcggaggcgtggcgctaggcatcaagagaatagcgcaagggctaagtcaatcagtaatgcgaacccggcctcgatacaaaaacatgaagatgaaatcgttagtgcagataatgacgattgggatattgattatgtctgagaaatcgtcaaatgagtgaaacgcgtgaggctcgtatatcaagagctaaaagggcatttgtatccacaccgagcgttaggaaaatcttgagttacatggatagatgtagagatctatcagacctagagtctgagcctacatgcatgatggtctatggtgcttcgggtgtaggtaaaacgaccgtcatcaagaaatacttaaatcaaaacagaagagagtccgaagccgggggcgatataataccggttttgcatattgagttgccagacaatgcgaagccagtagatgcagcaagggaattgctggttgaaatgggtgacccgctagcactttatgaaactgacttagctagattgacgaaaagactgactgaattaatccctgcggtcggcgtgaagctgattattatcgatgagttccaacatttggtggaagaaaggtcaaatcgggttcttacccaagtaggtaattggctaaaaatgatacttaacaaaacgaaatgtccaattgttatatttggtatgccatactcaaaagttgtactgcaagcaaactcgcaacttcacgggcgattttccattcaggttgaactgcgcccctttagctaccagggaggtagaggtgtatttaaaacttttttggaataccttgataaagccctaccttttgaaaaacaggctggcttagccaacgaaagtttgcagaaaaaattgtatgcattctctcagggaaacatgcgttcgttgagaaaccttatttatcaagcatctatcgaagcaattgataatcagcatgagacgataaccgaagaagatttcgtttttgcatcgaagttgacatcgggcgataaacccaactcatggaaaaatccttttgaggagggtgttgaggtaacagaagatatgttacgaccgccaccaaaagatattggttgggaggactatttgagacattcaaccccgagagtgagtaaaccaggtagaaataaaaactttttcgaataacctaggctgctgcgctgctgccaccgctgagcaataactagcataaccccttggggcctctaaacgggtcttgaggggttttttgctgaaacctcaggcatttgttgttgatacaaccataaaatgataattacacccataaattgataattatcacacccataaattgatattgcctcttcatggtctaaacttcagtaagtttacgacattttcctcgaggtcatttccggggatccatggagaaaaaaatcactggatataccaccgttgatatatcccaatggcatcgtaaagaacattttgaggcatttcagtcagttgctcaatgtacctataaccagaccgttcagctggatattacggcctttttaaagaccgtaaagaaaaataagcacaagttttatccggcctttattcacattcttgcccgcctgatgaatgctcatccggagttccgtatggcaatgaaagacggtgagctggtgatatgggatagtgttcacccttgttacaccgttttccatgagcaaactgaaacgttttcatcgctctggagtgaataccacgacgatttccggcagtttctacacatatattcgcaagatgtggcgtgttacggtgaaaacctggcctatttccctaaagggtttattgagaatatgtttttcgtctcagccaatccctgggtgagtttcaccagttttgatttaaacgtggccaatatggacaacttcttcgcccccgttttcactatgggcaaatattatacgcaaggcgacaaggtgctgatgccgctggcgattcaggttcatcatgccgtttgtgatggcttccatgtcggcagaatgcttaatgaattacaacagtactgcgatgagtggcagggcggggcgtaatttttttaaggcagttattggtgcccttctagagtccttactgcagtagttttgctgaaatactcgattcacaaaaatatcaacttatggttgttttgtgagatatcaatatatggttgttttgtggttaagttgctgattataaataattattaaatatcactttatggttgcatcaacaggtaccgagctcgaattcactggccgtcgttttacaacgtcgtgactgggaaaaccctggcgttacccaacttaatcgccttgccattttttaaccaataggccgtactgcgatgagtggcagggcggggcgtaatttttttaaggcagttattggtgcccttaaacgcctggttgctacgcctgaataagtgataataagcggatgaatggcagaaattcgaaagcaaattcgacccggtcgtcggttcagggcagggtcgttaaatagccgcttatgtctattgctggtttaccggtttattgactaccggaagcagtgtgaccgtgtgcttctcaaatgcctgaggccagtttgctcaggctctccccgtggaggtaataattgacgatatgatcatttattctgcctcccagagcctgataaaaacggtgaatccgttagcgaggtgccgccggcttccattcaggtcgaggtggcccggctccatgcaccgcgacgcaacgcggggaggcagacaaggtatagggcggcgaggcggctacagccgatagtctggaacagcgcacttacgggttgctgcgcaacccaagtgctaccggcgcggcagcgtgacccgtgtcggcggctccaacggctcgccatcgtccagaaaacacggctcatcgggcatcggcaggcgctgctgcccgcgccgttcccattcctccgtttcggtcaaggctggcaggtctggttccatgcccggaatgccgggctggctgggcggctcctcgccggggccggtcggtagttgctgctcgcccggatacagggtcgggatgcggcgcaggtcgccatgccccaacagcgattcgtcctggtcgtcgtgatcaaccaccacggcggcactgaacaccgacaggcgcaactggtcgcggggctggccccacgccacgcggtcattgaccacgtaggccgacacggtgccggggccgttgagcttcacgacggagatccagcgctcggccaccaagtccttgactgcgtattggaccgtccgcaaagaacgtccgatgagcttggaaagtgtcttctggctgaccaccacggcgttctggtggcccatctgcgccacgaggtgatgcagcagcattgccgccgtgggtttcctcgcaataagcccggcccacgcctcatgcgctttgcgttccgtttgcacccagtgaccgggcttgttcttggcttgaatgccgatttctctggactgcgtggccatgcttatctccatgcggtaggggtgccgcacggttgcggcaccatgcgcaatcagctgcaacttttcggcagcgcgacaacaattatgcgttgcgtaaaagtggcagtcaattacagattttctttaacctacgcaatgagctattgcggggggtgccgcaatgagctgttgcgtaccccccttttttaagttgttgatttttaagtctttcgcatttcgccctatatctagttctttggtgcccaaagaagggcacccctgcggggttcccccacgccttcggcgcggctccccctccggcaaaaagtggcccctccggggcttgttgatcgactgcgcggccttcggccttgcccaaggtggcgctgcccccttggaacccccgcactcgccgccgtgaggctcggggggcaggcgggcgggcttcgcccttcgactgcccccactcgcataggcttgggtcgttccaggcgcgtcaaggccaagccgctgcgcggtcgctgcgcgagccttgacccgccttccacttggtgtccaaccggcaagcgaagcgcgcaggccgcaggccggaggcttttccccagagaaaattaaaaaaattgatggggcaaggccgcaggccgcgcagttggagccggtgggtatgtggtcgaaggctgggtagccggtgggcaatccctgtggtcaagctcgtgggcaggcgcagcctgtccatcagcttgtccagcagggttgtccacgggccgagcgaagcgagccagccggtggccgctcgcggccatcgtccacatatccacgggctggcaagggagcgcagcgaccgcgcagggcgaagcccggagagcaagcccgtagggcgccgcagccgccgtaggcggtcacgactttgcgaagcaaagtctagtgagtatactcaagcattgagtggcccgccggaggcaccgccttgcgctgcccccgtcgagccggttggacaccaaaagggaggggcaggcatggcggcatacgcgatcatgcgatgcaagaagctggcgaaaatgggcaacgtggcggccagtctcaagcacgcctaccgcgagcgcgagacgcccaacgctgacgccagcaggacgccagagaacgagcactgggcggccagcagcaccgatgaagcgatgggccgactgcgcgagttgctgccagagaagcggcgcaaggacgctgtgttggcggtcgagtacgtcatgacggccagcccggaatggtggaagtcggccagccaagaacagcaggcggcgttcttcgagaaggcgcacaagtggctggcggacaagtacggggcggatcgcatcgtgacggccagcatccaccgtgacgaaaccagcccgcacatgaccgcgttcgtggtgccgctgacgcaggacggcaggctgtcggccaaggagttcatcggcaacaaagcgcagatgacccgcgaccagaccacgtttgcggccgctgtggccgatctagggctgcaacggggcatcgagggcagcaaggcacgtcacacgcgcattcaggcgttctacgaggccctggagcggccaccagtgggccacgtcaccatcagcccgcaagcggtcgagccacgcgcctatgcaccgcagggattggccgaaaagctgggaatctcaaagcgcgttgagacgccggaagccgtggccgaccggctgacaaaagcggttcggcaggggtatgagcctgccctacaggccgccgcaggagcgcgtgagatgcgcaagaaggccgatcaagcccaagagacggcccgag

SEQ ID NO: 903 - DNA, 15487 bp, Synthetic construct
  source 1..15487: mol_type = other DNA
ccagcaacgcggcctttttacggttcctggccttttgctggccttttgctcacatgttctttcctgcgttatcccctgattctgtggataaccgtattaccgcctttgagtgagctggcggccgctgcatgcctgcaggtcgactctagaggatccccgggccaggcatcaaataaaacgaaaggctcagtcgaaagactgggcctttcgttttatctgttgtttgtcggtgaacgctctctactagagtcacactggctcaccttcgggtgggcctttctgcgtttatactcataccctttctgagccgggtaccgagctcgtggataaccgtattaccgcctttgagtgagctgataccgctcgccgcagccgaactaccgagcgcagcgagtcagtgagcgaggacacccgacctgtctcttatgacaaaaagagcaaaattttgataaaatagtattagagctgagctggtggagatataccatgggtgaactgccgagtaggtagctgataacgagacctctgtcttgtcagctagggtggtctcgtgaactgccgagtaggtagctgataacggatccgaattcgagcgaaggagatatacatatgtttttgcaaagacctaaaccttacagcgatgaaagtttagaaagtttctttatccgagtggctaacaaaaatggctacggtgatgtccatcgcttcctagaagccactaaacgattccttcaagacattgaccataatggctatcaaacctttccgactgatataactcggataaacccatactcagctaaaaacagttccagcgcacgaactgcgtcattcctgaaacttgcacaattgacatttaatgaaccgccagagctacttgggttggcaattaacagaacaaacatgaaatactcgccgtcaactagcgcggttgttagaggtgcagaagtctttcctcgcagtttactacggacgcactccatcccctgctgtcctttgtgtctgcgagaaaatggctacgcctcctacctttggcactttcaggggtacgaatactgccacagccataacgtacctttaattaccacttgtagctgtggtaaggagtttgactaccgagtatctgggttaaagggcatttgctgcaaatgcaaggagcctatcaccttaaccagcagggagaacggtcatgaggcagcgtgtactgtttcaaactggcttgctggccatgaatctaaacctctgccaaatcttcctaaaagctaccgatggggtttagttcattggtggatgggtattaaagatagcgagttcgatcacttttcgttcgttcaatttttctcaaactggccaaggtcattccactcgataatcgaagatgaagtagagttcaaccttgagcatgctgttgtcagcacgtctgaattacgactaaaagatcttcttggtcgattgtttttcggttcaattcggttacctgagcggaatcttcaacacaatatcatccttggtgagcttctctgctatttagaaaatcgtttatggcaagacaagggattaatcgccaacctcaaaatgaacgcgttagaggcgactgtaatgttaaattgtagcctcgatcagattgcatcaatggttgaacaacgcatcttgaagccaaatcgaaaaagcaagcccaacagccctcttgatgttaccgattatctatttcatttcggcgatattttctgtctttggttagctgagttccaaagcgatgagtttaaccgttcgttttatgtgtcgaggtggtaaatgcaaactctgaaagaactaatcgcatccaatcctgacgacttaacaactgaacttaagagagcatttcgtccactcacaccgcatattgcaattgatggtaatgaacttgacgcactgacgatattagtcaatttaaccgataagactgatgatcagaaagacctgctcgatcgagccaaatgcaagcaaaaacttcgagatgaaaaatggtgggctagctgcataaattgcgttaattacagacaaagccataacccaaaattcccggatatacgttctgaaggcgtgattcgaacccaagccctgggtgaattaccgagtttcctactctcgtcctcaaaaatcccaccataccattggtcatatagccatgattcaaaatacgtcaacaaaagcgcattcctcaccaatgagttttgttgggatggtgagatctcatgtttgggtgagcttcttaaagatgcagatcacccactttggaatactttgaaaaagttaggttgttctcaaaaaacttgcaaagcaatggcaaaacaactagctgatattactctcacgactatcaatgtcacactcgcaccaaattacctgactcaaatatctctccccgatagtgatacatcctacatttcactctctcctgttgcatcgctatcgatgcaaagccactttcatcagaggctccaagatgaaaatcggcatagcgcgataacgcggtttagccgaactaccaacatgggggtcactgcgatgacatgtggcggcgcatttagaatgttaaagtctggcgctaagttttccagcccccctcatcaccgattaaacagtaaacgaagttggttgacgtcagagcatgttcagtcattaaaacagtaccagcgcctcaacaaaagcctcatacctgaaaactctcggattgcactccgtagaaaatacaaaatcgagcttcaaaatatggtcagatcttggtttgcaatgcaagaccatacccttgattcgaacatacttatccaacatttgaatcatgacctatcttacttaggagccacaaaacgttttgcatacgatccagcgatgaccaagctctttactgagcttttgaaacgagagttatcaaattcaatcaataatggtgagcaacacactaatggatcgtttttagtcctaccgaatatcagggtttgtggcgcaacagctttaagctccccggtaacggtggggattccatcacttacagctttctttggcttcgttcacgcatttgaacggaatataaatcgcaccacctcatcgtttcgtgttgaatcctttgcgatatgcgtccatcaactacatgtcgagaagcgaggtttgacagcagagtttgtggaaaaaggcgacgggactatatccgctcccgcgacccgggatgactggcagtgtgatgtcgtatttagccttattttgaacaccaactttgctcaacatattgaccaagatacgttagttacatcactaccaaagcgattggctcggggttcagcaaaaattgcgattgatgactttaaacatatcaactcattctcgacattagaaacagcgatcgaatctctgccaatagaagctggtaggtggttatcactttacgcacagtcaaacaataatctaagtgatctattagcagccatgacagaggaccatcagctcatggcaagctgcgtcggttaccacttgttagaagagcccaaagataaaccaaactccctcagaggttacaaacacgctatcgccgagtgcatcattggactcattaactcaatcacctttagctcagagactgatcccaacacaatcttttggtcgctaaagaactatcaaaactacctagtggtacagccaaggagtatcaacgatgaaactaccgacaaatctagcctatgagcgctctatcgacccatcagatgtctgtttttttgtcgtctggcccgatgatagaaaaacacctttaacctacaattctcgtactctgctcgggcaaatggaagcggcatcattagcctatgatgtctcaggtcaaccaataaaaagtgccaccgctgaggcgttagctcaagggaaccctcatcaagttgatttctgccacgttccatacggtgcgagtcatattgaatgcagtttctccgtctcgttttcttctgaactacgtcaaccatataagtgtaactcaagcaaagttaaacaaacgctagtgcaattagtcgagctctacgaaacgaaaatcggctggactgagctagcaacccgatatttgatgaacatttgcaacggtaaatggctgtggaaaaatacccgtaaagcctattgctggaacattgtacttacaccttggccttggaacggggaaaaggttggatttgaagatattcgtactaactacacctcacggcaagactttaaaaataataaaaattggtctgctatagttgaaatgatcaaaaccgcattttctagtactgatgggctggcgatatttgaagtcagggccaccttgcacttgccaacgaatgctatggtgcggccaagccaagttttcacagaaaaagaaagtggcagtaaaagtaaatctaaaactcaaaacagtcgagtttttcagagtacaactattgatggtgaacgatcgccaatactaggggcctttaaaacgggagcagctattgcaaccattgacgactggtatcctgaagccactgagccactaagggtcggacggtttggggttcatcgcgaagatgtcacttgctaccgtcatccgtctaccggaaaagattttttctcgatattacaacaagcagagcactatattgaagtgttgagcgccaacaaaactcccgctcaagaaactatcaacgacatgcactttttaatggctaacctgattaagggtgggatgttccagcataaaggagactgactgtgaaatggtattataagacaatcacctttctgccagagttgtgcaacaacgagtcactggctgcaaagtgtctccgcgttctgcatggatttaactatcagtatgagacacgaaatatcggcgtttcatttccgctttggtgtgatgcaacggttggaaaaaagatttcatttgtcagcaagaacaagatagaactcgacttactacttaaacaacactatttcgtccaaatggaacaacttcaatactttcatatatccaacactgttctcgtcccagaagattgtacatacgtttcctttagacgctgtcaatctatagataagctcacagcagcagggctggcaaggaaaatcagacgcctggagaaacgtgctctatctagaggcgagcaatttgacccatcatcttttgctcaaaaagagcatactgcaatagcgcactaccactcacttggggagtccagcaaacagacgaaccgcaactttcgactcaatatcaggatgctctcggagcaaccccgtgaggggaactcgatttttagtagctatggcttatcaaattcagaaaactcgtttcagcctgtacccttaatctgacctttaataaggagatataccatggcgacaagtttacctacgccctcagcaattacgacttcggcgttagagtatgcattccatactcccgctcgcaatctaacgaaatctcgcggaaaaaacattcatcgttatgtcagtgtaaagatgagtaagaggattacggtagaatctactctagagtgtgatgcctgctatcactttgattttgagccaagtattgttcgcttttgcgctcaaccgattcgatttttatattatctcaatggtcagtctcactcctatgttcctgactttctagttcaatttgataccaacgagtttgttctatatgaagtaaagtcagcttatgctaagaacaaacctgattttgatgttgaatgggaggcgaaagtaaaagcagcaactgaactagggctagaattggagcttgttgaagagagtgatattagggatacggttgtattaaataatcttaagcgcatgcatcgttatgcttcgaaagatgagctgaataacgtacataactctctcttaaaaataataaagtacaatggcgcccaatctgcaagatgcttgggagaacagttgggtttaaaaggccgaactgttttaccaattttgtgcgatttgctgtcaaggtgtttactcgatacacgtttggataagcctctatctcttgaatctcgatttgagttggccagttatggctaagaaagggttctcaagtttccatagaaaagcagtctcttcccaagatacgcttgaatcgatagagcttgtctctagcgctaattgtctagaaagtgttacgtatcaagatatatcagcatttcccgaaacaattgcggtagagattaatttccgattaagcattcttcgctttttagcgcgaaagtgcgaaaccattgtggccaaatcaattgaaccacatcgtgtagagctacagcaaaactatagtagaaaaatacccagtgcaataacgatatatcgatggtggcttgcttttcgaaaatcagactacaaccccattagcttagcacctaatatcaaggatagaggtaatagagagacaaaagtgtcaacagttgttgattctattatggaacaggcagttgaaagagttatatctggacgaaaagtcaatgttagctctgcatataaacgtgttcgacgaaaagttcgtcaatacaatctaactcatggaacgaaatacacgtatcctaagtacgaatctgtaagaaagcgagtaaaaaagaaaaccccatttgagttattagccgcagggaaaggggagagagtagctaagagagagtttcgccgaatgggaaaaaagatcctcacgtctagcgtgctagagagggttgaaatagatcacactgtcgttgacctttttgcagtacacgaagagtatcgaatcccattgggccgaccttggcttactcaattggttgattgttacagtaaagctgtaatcggtttttatttaggtttcgagcctcctagctatgtgtcggtttcccttgcacttaagaatgcaatacaacgcaaagatgacttaatctcctcgtatgaatcgatcgagaatgaatggctatgttatggcatcccagacctactcgtaactgataatggtaaagagtttttgtcgaaagcatttgatcaagcatgtgaatcactattgatcaatgtgcatcaaaataaagttgagacgcccgacaacaaacctcatgttgaacgtaactacgggactattaatacttctctgttagacgatttacctgggaaatccttcagccagtaccttcaaagagaagggtacgactctgtgggagaagctacccttacactcaatgagattagagaaatttacttaatttggttggtggatatttatcataaaaaacccaatcagagaggcactaattgtcctaatgttgcgtggaaaaagggttgtcaagaatgggaaccagaggagttctctggttctaaagacgaattagactttaaatttgctattgttgattacaaacaacttactaaagtagggataactgtctacaaagaactgagttatagcaatgaccgtttagctgaatatagagggaagaaaggaaaccataaagttcagttcaagtataaccctgagtgtatggcagttatttgggtgttggatgaggatatgaatgagtactttacagttaatgcgattgactacgaatatgcaagtagagtatcactttggcaacataaatataacatgaaatatcaagcagaactaaattcagcagaatatgatgaggacaaggaaattgatgcagaaataaaaattgaagaaatcgcagatcgttcaattgttaagactaacaaaatcagagctcggaggcgtggcgctaggcatcaagagaatagcgcaagggctaagtcaatcagtaatgcgaacccggcctcgatacaaaaacatgaagatgaaatcgttagtgcagataatgacgattgggatattgattatgtctgagaaatcgtcaaatgagtgaaacgcgtgaggctcgtatatcaagagctaaaagggcatttgtatccacaccgagcgttaggaaaatcttgagttacatggatagatgtagagatctatcagacctagagtctgagcctacatgcatgatggtctatggtgcttcgggtgtaggtaaaacgaccgtcatcaagaaatacttaaatcaaaacagaagagagtccgaagccgggggcgatataataccggttttgcatattgagttgccagacaatgcgaagccagtagatgcagcaagggaattgctggttgaaatgggtgacccgctagcactttatgaaactgacttagctagattgacgaaaagactgactgaattaatccctgcggtcggcgtgaagctgattattatcgatgagttccaacatttggtggaagaaaggtcaaatcgggttcttacccaagtaggtaattggctaaaaatgatacttaacaaaacgaaatgtccaattgttatatttggtatgccatactcaaaagttgtactgcaagcaaactcgcaacttcacgggcgattttccattcaggttgaactgcgcccctttagctaccagggaggtagaggtgtatttaaaacttttttggaataccttgataaagccctaccttttgaaaaacaggctggcttagccaacgaaagtttgcagaaaaaattgtatgcattctctcagggaaacatgcgttcgttgagaaaccttatttatcaagcatctatcgaagcaattgataatcagcatgagacgataaccgaagaagatttcgtttttgcatcgaagttgacatcgggcgataaacccaactcatggaaaaatccttttgaggagggtgttgaggtaacagaagatatgttacgaccgccaccaaaagatattggttgggaggactatttgagacattcaaccccgagagtgagtaaaccaggtagaaataaaaactttttcgaataacctaggctgctgcgctgctgccaccgctgagcaataactagcataaccccttggggcctctaaacgggtcttgaggggttttttgctgaaacctcaggcatttgttgttgatacaaccataaaatgataattacacccataaattgataattatcacacccataaattgatattgcctcttcatggtctaaacttcagtaagtttacgacattttcctcgaggtcatttccggggatccatggagaaaaaaatcactggatataccaccgttgatatatcccaatggcatcgtaaagaacattttgaggcatttcagtcagttgctcaatgtacctataaccagaccgttcagctggatattacggcctttttaaagaccgtaaagaaaaataagcacaagttttatccggcctttattcacattcttgcccgcctgatgaatgctcatccggagttccgtatggcaatgaaagacggtgagctggtgatatgggatagtgttcacccttgttacaccgttttccatgagcaaactgaaacgttttcatcgctctggagtgaataccacgacgatttccggcagtttctacacatatattcgcaagatgtggcgtgttacggtgaaaacctggcctatttccctaaagggtttattgagaatatgtttttcgtctcagccaatccctgggtgagtttcaccagttttgatttaaacgtggccaatatggacaacttcttcgcccccgttttcactatgggcaaatattatacgcaaggcgacaaggtgctgatgccgctggcgattcaggttcatcatgccgtttgtgatggcttccatgtcggcagaatgcttaatgaattacaacagtactgcgatgagtggcagggcggggcgtaatttttttaaggcagttattggtgcccttctagagtccttactgcagtagttttgctgaaatactcgattcacaaaaatatcaacttatggttgttttgtgagatatcaatatatggttgttttgtggttaagttgctgattataaataattattaaatatcactttatggttgcatcaacaggtaccgagctcgaattcactggccgtcgttttacaacgtcgtgactgggaaaaccctggcgttacccaacttaatcgccttgccaggcgcgcctattctaaatgcataataaatactgataacatcttatattttgtattatattttgtattatcgttgacatgtataattttgatatcaaaaactgattttccctctattattttcgagatttattttcttaattctctttaacaaactagaaatattgtatatacaaaaaattataaataatagatgaatagtttaattataggtgttcatcaatcgaaaaagcaacgtatcttatttaaagtgcgttgcttttttctcatttataaggttaaataattctcatatatcaagcaaaggcgcctttgcggaaagagttaataagttaacagaagatgaaccaaaactaaatggtttagcaggaaacttagataaaaaaatgaatccagaattatattcagaacaggaacagcaacaagaacaacaaaagaatcaaaaacgagatagaggtatgcacttatagaacatgcatttatgccgagaaaacttattggttggaatgggctatgtgttagctaacttgttagcgagttggttggacttgaattgggattaatcccaagaaagtaccaactcaacaacacataaagccctgtaggttccgaccaataaggaaattggaataaagcaataaaaggagttgaagaaatgaaattcagagaagcctttgagaattttataacaagtaagtatgtacttggtgttttagtagttttaactgtttaccagataatacaaatgcttaaataaaaaaagacttgatctgattagaccaaatcttttgatagtgttatattaataacaaaataaaaaggagtcgctcacgacctgaccaaagtttgtgaacgacatcattcaaagaaaaaaacactgagttgtttttataatcttgtatatttagatattaaacgatatttaaatatacatcaagatatatatttgggtgagcgattccttaaacgaaattgagattaaggagtcgattttttatgtataaaaacaatcatgcaaatcattcaaatcatttggaaaatcacgatttagacaatttttctaaaaccggctactctaatagccggttggacgcacatactgtgtgcatatctgatccaaaattaagttttgatgcaatgacgatcgttggaaatctcaaccgagacaacgctcaagccctttctaaatttatgagtgtagagccccaaataagactttgggatattcttcaaacaaagtttaaagctaaagcacttcaagaaaaagtttatattgaatatgacaaagtgaaagcagatagttgggatagacgtaatatgcgtattgaatttaatccaaacaaacttacacgagatgaaatgatttggttaaaacaaaatataataagctacatggaagatgacggttttacaagattagatttagcctttgattttgaagatgatttgagtgactactatgcaatgtctgataaagcagttaagaaaactattttttatggtcgtaatggtaagccagaaacaaaatattttggcgtgagagatagtaatagatttattagaatttataataaaaagcaagaacgtaaagataatgcagatgctgaagttatgtctgaacatttatggcgtgtagaaatcgaatttaaaagagatatggtggattactggaatgattgctttagtgatttacatatcttgcaaccagattggaaaactatccaacgcactgcggatagagcaatagtttttatgttattgagtgatgaagaagaatggggaaagcttcacagaaattctagaacaaaatataagaatttgataaaagaaatttcgccagtcgatttaacggacttaatgaaatcgactttaaaagcgaacgaaaaacaattgcaaaaacaaatcgatttttggcaacatgaatttaaattttggaaatagtgtacatattaatattactgaacaaaaatgatatatttaaactattctaatttaggaggatttttttatgaagtgtctatttaaaaatttggggaatttatatgaggtgaaagaataatttacccctataaactttagtcacctcaagtaaagaggtaaaattgtttagtttatataaaaaatttaaaggtttgttttatagcgttttattttggctttgtattctttcattttttagtgtattaaatgaaatggttttaaatgtttctttacctgatattgcaaatcattttaatactactcctggaattacaaactgggtaaacactgcatatatgttaactttttcgataggaacagcagtatatggaaaattatctgattatataaatataaaaaaattgttaattattggtattagtttgagctgtcttggttcattgattgcttttattgggcccacctaggtattatcaagataagaaagaaaaggatttttcgctacgctcaaatcctttaaaaaaacacaaaagaccacattttttaatgtggtcttttattcttcaactaaagcacccattagttcaacaaacgaaaattggataaagtgggatatttttaaaatatatatttatgttacagtaatattgacttttaaaaaaggattgattctaatgaagaaagcagacaagtaagcctcctaaattcactttagataaaaatttaggaggcatatcaaatgaactttaataaaattgatttagacaattggaagagaaaagagatatttaatcattatttgaaccaacaaacgacttttagtataaccacagaaattgatattagtgttttataccgaaacataaaacaagaaggatataaattttaccctgcatttattttcttagtgacaagggtgataaactcaaatacagcttttagaactggttacaatagcgacggagagttaggttattgggataagttagagccactttatacaatttttgatggtgtatctaaaacattctctggtatttggactcctgtaaagaatgacttcaaagagttttatgatttatacctttctgatgtagagaaatataatggttcggggaaattgtttcccaaaacacctatacctgaaaatgctttttctctttctattattccatggacttcatttactgggtttaacttaaatatcaataataatagtaattaccttctacccattattacagcaggaaaattcattaataaaggtaattcaatatatttaccgctatctttacaggtacatcattctgtttgtgatggttatcatgcaggattgtttatgaactctattcaggaattgtcagataggcctaatgactggcttttataatatgagataatgccgactgtactttttacagtcggttttctaatgtcactaacctgccccgttagttgaagaaggccgcggcctcgagatccaagtaaaaaacaagagagcattattagacgcattggcttatttctcgagcggccgcatagttaagccagccccgacacccgccaacacccgctgacgcgccctgacgggcttgtctgctcccggcatccgcttacagacaagctgtgaccgtctccgggagctgcatgtgtcagaggttttcaccgtcatcaccgaaacgcgcgagacgaaagggcctcgtgatacgcctatttttataggttaatgtcatgataataatggtttcttagacgtcaggtggcacttttcggggaaatgtgcgcggaacccctatttgtttatttttctaaatacattcaaatatgtatccgctcatgagacaataaccctgataaatgcttcaataatattgaaaaaggaagagtatgagtattcaacatttccgtgtcgcccttattcccttttttgcggcattttgccttcctgtttttgctcacccagaaacgctggtgaaagtaaaagatgctgaagatcagttgggtgcacgagtgggttacatcgaactggatctcaacagcggtaagatccttgagagttttcgccccgaagaacgttttccaatgatgagcacttttaaagttctgctatgtggcgcggtattatcccgtattgacgccgggcaagagcaactcggtcgccgcatacactattctcagaatgacttggttgagtactcaccagtcacagaaaagcatcttacggatggcatgacagtaagagaattatgcagtgctgccataaccatgagtgataacactgcggccaacttacttctgacaacgatcggaggaccgaaggagctaaccgcttttttgcacaacatgggggatcatgtaactcgccttgatcgttgggaaccggagctgaatgaagccataccaaacgacgagcgtgacaccacgatgcctgtagcaatggcaacaacgttgcgcaaactattaactggcgaactacttactctagcttcccggcaacaattaatagactggatggaggcggataaagttgcaggaccacttctgcgctcggcccttccggctggctggtttattgctgataaatctggagccggtgagcgtggttcacgcggtatcattgcagcactggggccagatggtaagccctcccgtatcgtagttatctacacgacggggagtcaggcaactatggatgaacgaaatagacagatcgctgagataggtgcctcactgattaagcattggtaactgtcagaccaagtttactcatatatactttagattgatttaaaacttcatttttaatttaaaaggatctaggtgaagatcctttttgataatctcatgaccaaaatcccttaacgtgagttttcgttccactgagcgtcagaccccgtagaaaagatcaaaggatcttcttgagatcctttttttctgcgcgtaatctgctgcttgcaaacaaaaaaaccaccgctaccagcggtggtttgtttgccggatcaagagctaccaactctttttccgaaggtaactggcttcagcagagcgcagataccaaatactgttcttctagtgtagccgtagttaggccaccacttcaagaactctgtagcaccgcctacatacctcgctctgctaatcctgttaccagtggctgctgccagtggcgataagtcgtgtcttaccgggttggactcaagacgatagttaccggataaggcgcagcggtcgggctgaacggggggttcgtgcacacagcccagcttggagcgaacgacctacaccgaactgagatacctacagcgtgagctatgagaaagcgccacgcttcccgaagggagaaaggcggacaggtatccggtaagcggcagggtcggaacaggagagcgcacgagggagcttccagggggaaacgcctggtatctttatagtcctgtcgggtttcgccacctctgacttgagcgtcgatttttgtgatgctcgtcaggggggcggagcctatggaaaaacg

SEQ ID NO: 904 - DNA, 6659 bp, Synthetic construct
  source 1..6659: mol_type = other DNA
ttcttgaagacgaaagggcctcgtgatacgcctatttttataggttaatgtcatgataataatggtttcttagacgtcaggtggcacttttcggggaaatgtgcgcggaacccctatttgtttatttttctaaatacattcaaatatgtatccgctcatgagacaataaccctgataaatgcttcaataacattgaaaaaggaagagtatgagtattcaacatttccgtgtcgcccttattcccttttttgcggcattttgccttcctgtttttgctcacccagaaacgctggtgaaagtaaaagatgctgaagatcagttgggtgcacgagtgggttacatcgaactggatctcaacagcggtaagatccttgagagttttcgccccgaagaacgttttccaatgatgagcacttttaaagttctgctatgtggcgcggtattatcccgtgttgacgccgggcaagagcaactcggtcgccgcatacactattctcagaatgacttggttgagtactcaccagtcacagaaaagcatcttacggatggcatgacagtaagagaattatgcagtgctgccataaccatgagtgataacactgcggccaacttacttctgacaacgatcggaggaccgaaggagctaaccgcttttttgcacaacatgggggatcatgtaactcgccttgatcgttgggaaccggagctgaatgaagccataccaaacgacgagcgtgacaccacgatgcctgcagcaatggcaacaacgttgcgcaaactattaactggcgaactacttactctagcttcccggcaacaattaatagactggatggaggcggataaagttgcaggaccacttctgcgctcggcccttccggctggctggtttattgctgataaatctggagccggtgagcgtgggtctcgcggtatcattgcagcactggggccagatggtaagccctcccgtatcgtagttatctacacgacggggagtcaggcaactatggatgaacgaaatagacagatcgctgagataggtgcctcactgattaagcattggtaactgtcagaccaagtttactcatatatactttagattgatttaaaacttcatttttaatttaaaaggatctaggtgaagatcctttttgataatctcatgaccaaaatcccttaacgtgagttttcgttccactgagcgtcagaccccgtagaaaagatcaaaggatcttcttgagatcctttttttctgcgcgtaatctgctgcttgcaaacaaaaaaaccaccgctaccagcggtggtttgtttgccggatcaagagctaccaactctttttccgaaggtaactggcttcagcagagcgcagataccaaatactgtccttctagtgtagccgtagttaggccaccacttcaagaactctgtagcaccgcctacatacctcgctctgctaatcctgttaccagtggctgctgccagtggcgataagtcgtgtcttaccgggttggactcaagacgatagttaccggataaggcgcagcggtcgggctgaacggggggttcgtgcacacagcccagcttggagcgaacgacctacaccgaactgagatacctacagcgtgagctatgagaaagcgccacgcttcccgaagggagaaaggcggacaggtatccggtaagcggcagggtcggaacaggagagcgcacgagggagcttccagggggaaacgcctggtatctttatagtcctgtcgggtttcgccacctctgacttgagcgtcgatttttgtgatgctcgtcaggggggcggagcctatggaaaaacgccagcaacgcggcctttttacggttcctggccttttgctggccttttgctcacatgttctttcctgcgttatcccctgattctgtggataaccgtattaccgcctttgagtgagctgataccgctcgccgcagccgaacgaccgagcgcagcgagtcagtgagcgaggaagcggaagagcgcctgatgcggtattttctccttacgcatctgtgcggtatttcacaccgcatatatggtgcactctcagtacaatctgctctgatgccgcatagttaagccagtatacactccgctatcgctacgtgactgggtcatggctgcgccccgacacccgccaacacccgctgacgcgccctgacgggcttgtctgctcccggcatccgcttacagacaagctgtgaccgtctccgggagctgcatgtgtcagaggttttcaccgtcatcaccgaaacgcgcgaggcagctgcggtaaagctcatcagcgtggtcgtgaagcgattcacagatgtctgcctgttcatccgcgtccagctcgttgagtttctccagaagcgttaatgtctggcttctgataaagcgggccatgttaagggcggttttttcctgtttggtcactgatgcctccgtgtaagggggatttctgttcatgggggtaatgataccgatgaaacgagagaggatgctcacgatacgggttactgatgatgaacatgcccggttactggaacgttgtgagggtaaacaactggcggtatggatgcggcgggaccagagaaaaatcactcagggtcaatgccagcgcttcgttaatacagatgtaggtgttccacagggtagccagcagcatcctgcgatgcagatccggaacataatggtgcagggcgctgacttccgcgtttccagactttacgaaacacggaaaccgaagaccattcatgttgttgctcaggtcgcagacgttttgcagcagcagtcgcttcacgttcgctcgcgtatcggtgattcattctgctaaccagtaaggcaaccccgccagcctagccgggtcctcaacgacaggagcacgatcatgcgcacccgtggccaggacccaacgctgcccgagatgcgccgcgtgcggctgctggagatggcggacgcgatggatatgttctgccaagggttggtttgcgcattcacagttctccgcaagaattgattggctccaattcttggagtggtgaatccgttagcgaggtgccgccggcttccattcaggtcgaggtggcccggctccatgcaccgcgacgcaacgcggggaggcagacaaggtatagggcggcgcctacaatccatgccaacccgttccatgtgctcgccgaggcggcataaatcgccgtgacgatcagcggtccagtgatcgaagttaggctggtaagagccgcgagcgatccttgaagctgtccctgatggtcgtcatctacctgcctggacagcatggcctgcaacgcgggcatcccgatgccgccggaagcgagaagaatcataatggggaaggccatccagcctcgcgtcgcgaacgccagcaagacgtagcccagcgcgtcggccgccatgccggcgataatggcctgcttctcgccgaaacgtttggtggcgggaccagtgacgaaggcttgagcgagggcgtgcaagattccgaataccgcaagcgacaggccgatcatcgtcgcgctccagcgaaagcggtcctcgccgaaaatgacccagagcgctgccggcacctgtcctacgagttgcatgataaagaagacagtcataagtgcggcgacgatagtcatgccccgcgcccaccggaaggagctgactgggttgaaggctctcaagggcatcggtcgacgctctcccttatgcgactcctgcattaggaagcagcccagtagtaggttgaggccgttgagcaccgccgccgcaaggaatggtgcatgcaaggagatggcgcccaacagtcccccggccacggggcctgccaccatacccacgccgaaacaagcgctcatgagcccgaagtggcgagcccgatcttccccatcggtgatgtcggcgatataggcgccagcaaccgcacctgtggcgccggtgatgccggccacgatgcgtccggcgtagaggatcgagatctcgatcccgcgaaattaatacgactcactatagggagaccacaacggtttccctctagtgccggctccggagagctctttaattaagcggccgccctgcaggactcgagttctagaaataattttgtttaactttaagaaggagatatacatatgaaatcttctcaccatcaccatcaccatcaccatcaccatggttcttctatgaaaatcgaagaaggtaaactggtaatctggattaacggcgataaaggctataacggtctcgctgaagtcggtaagaaattcgagaaagataccggaattaaagtcaccgttgagcatccggataaactggaagagaaattcccacaggttgcggcaactggcgatggccctgacattatcttctgggcacacgaccgctttggtggctacgctcaatctggcctgttggctgaaatcaccccggacaaagcgttccaggacaagctgtatccgtttacctgggatgccgtacgttacaacggcaagctgattgcttacccgatcgctgttgaagcgttatcgctgatttataacaaagatctgctgccgaacccgccaaaaacctgggaagagatcccggcgctggataaagaactgaaagcgaaaggtaagagcgcgctgatgttcaacctgcaagaaccgtacttcacctggccgctgattgctgctgacgggggttatgcgttcaagtatgaaaacggcaagtacgacattaaagacgtgggcgtggataacgctggcgcgaaagcgggtctgaccttcctggttgacctgattaaaaacaaacacatgaatgcagacaccgattactccatcgcagaagctgcctttaataaaggcgaaacagcgatgaccatcaacggcccgtgggcatggtccaacatcgacaccagcaaagtgaattatggtgtaacggtactgccgaccttcaagggtcaaccatccaaaccgttcgttggcgtgctgagcgcaggtattaacgccgccagtccgaacaaagagctggcaaaagagttcctcgaaaactatctgctgactgatgaaggtctggaagcggttaataaagacaaaccgctgggtgccgtagcgctgaagtcttacgaggaagagttggcgaaagatccacgtattgccgccactatggaaaacgcccagaaaggtgaaatcatgccgaacatcccgcagatgtccgctttctggtatgccgtgcgtactgcggtgatcaacgccgccagcggtcgtcagactgtcgatgaagccctgaaagacgcgcagactaattcgagctcgaacaacaacaacaataacaataacaacaacctcgggatcgaggaaaacctgtacttccaatccaatgcaatgacaagcttacctacgccctcagcaattacgacttcggcgttagagtatgcattccatactcccgctcgcaatctaacgaaatctcgcggaaaaaacattcatcgttatgtcagtgtaaagatgagtaagaggattacggtagaatctactctagagtgtgatgcctgctatcactttgattttgagccaagtattgttcgcttttgcgctcaaccgattcgatttttatattatctcaatggtcagtctcactcctatgttcctgactttctagttcaatttgataccaacgagtttgttctatatgaagtaaagtcagcttatgctaagaacaaacctgattttgatgttgaatgggaggcgaaagtaaaagcagcaactgaactagggctagaattggagcttgttgaagagagtgatattagggatacggttgtattaaataatcttaagcgcatgcatcgttatgcttcgaaagatgagctgaataacgtacataactctctcttaaaaataataaagtacaatggcgcccaatctgcaagatgcttgggagaacagttgggtttaaaaggccgaactgttttaccaattttgtgcgatttgctgtcaaggtgtttactcgatacacgtttggataagcctctatctcttgaatctcgatttgagttggccagttatggctaatagcattggaagtggataacggatccgcgatcgcggcgcgccacctggtggccggccggtaccacgcgtgcgcgctgatccggctgctaacaaagcccgaaaggaagctgagttggctgctgccaccgctgagcaataactagcataaccccttggggcctctaaacgggtcttgaggggttttttgctgaaaggaggaactatatccggatatccacaggacgggtgtggtcgccatgatcgcgtagtcgatagtggctccaagtagcgaagcgagcaggactgggcggcggccaaagcggtcggacagtgctccgagaacgggtgcgcatagaaattgcatcaacgcatatagcgctagcagcacgccatagtgactggcgatgctgtcggaatggacgatatcccgcaagaggcccggcagtaccggcataaccaagcctatgcctacagcatccagggtgacggtgccgaggatgacgatgagcgcattgttagatttcatacacggtgcctgactgcgttagcaatttaactgtgataaactaccgcattaaagcttatcgatgataagctgtcaaacatgagaa

SEQ ID NO: 905 - DNA, 7781 bp, Synthetic construct
  source 1..7781: mol_type = other DNA
ttcttgaagacgaaagggcctcgtgatacgcctatttttataggttaatgtcatgataataatggtttcttagacgtcaggtggcacttttcggggaaatgtgcgcggaacccctatttgtttatttttctaaatacattcaaatatgtatccgctcatgagacaataaccctgataaatgcttcaataacattgaaaaaggaagagtatgagtattcaacatttccgtgtcgcccttattcccttttttgcggcattttgccttcctgtttttgctcacccagaaacgctggtgaaagtaaaagatgctgaagatcagttgggtgcacgagtgggttacatcgaactggatctcaacagcggtaagatccttgagagttttcgccccgaagaacgttttccaatgatgagcacttttaaagttctgctatgtggcgcggtattatcccgtgttgacgccgggcaagagcaactcggtcgccgcatacactattctcagaatgacttggttgagtactcaccagtcacagaaaagcatcttacggatggcatgacagtaagagaattatgcagtgctgccataaccatgagtgataacactgcggccaacttacttctgacaacgatcggaggaccgaaggagctaaccgcttttttgcacaacatgggggatcatgtaactcgccttgatcgttgggaaccggagctgaatgaagccataccaaacgacgagcgtgacaccacgatgcctgcagcaatggcaacaacgttgcgcaaactattaactggcgaactacttactctagcttcccggcaacaattaatagactggatggaggcggataaagttgcaggaccacttctgcgctcggcccttccggctggctggtttattgctgataaatctggagccggtgagcgtgggtctcgcggtatcattgcagcactggggccagatggtaagccctcccgtatcgtagttatctacacgacggggagtcaggcaactatggatgaacgaaatagacagatcgctgagataggtgcctcactgattaagcattggtaactgtcagaccaagtttactcatatatactttagattgatttaaaacttcatttttaatttaaaaggatctaggtgaagatcctttttgataatctcatgaccaaaatcccttaacgtgagttttcgttccactgagcgtcagaccccgtagaaaagatcaaaggatcttcttgagatcctttttttctgcgcgtaatctgctgcttgcaaacaaaaaaaccaccgctaccagcggtggtttgtttgccggatcaagagctaccaactctttttccgaaggtaactggcttcagcagagcgcagataccaaatactgtccttctagtgtagccgtagttaggccaccacttcaagaactctgtagcaccgcctacatacctcgctctgctaatcctgttaccagtggctgctgccagtggcgataagtcgtgtcttaccgggttggactcaagacgatagttaccggataaggcgcagcggtcgggctgaacggggggttcgtgcacacagcccagcttggagcgaacgacctacaccgaactgagatacctacagcgtgagctatgagaaagcgccacgcttcccgaagggagaaaggcggacaggtatccggtaagcggcagggtcggaacaggagagcgcacgagggagcttccagggggaaacgcctggtatctttatagtcctgtcgggtttcgccacctctgacttgagcgtcgatttttgtgatgctcgtcaggggggcggagcctatggaaaaacgccagcaacgcggcctttttacggttcctggccttttgctggccttttgctcacatgttctttcctgcgttatcccctgattctgtggataaccgtattaccgcctttgagtgagctgataccgctcgccgcagccgaacgaccgagcgcagcgagtcagtgagcgaggaagcggaagagcgcctgatgcggtattttctccttacgcatctgtgcggtatttcacaccgcatatatggtgcactctcagtacaatctgctctgatgccgcatagttaagccagtatacactccgctatcgctacgtgactgggtcatggctgcgccccgacacccgccaacacccgctgacgcgccctgacgggcttgtctgctcccggcatccgcttacagacaagctgtgaccgtctccgggagctgcatgtgtcagaggttttcaccgtcatcaccgaaacgcgcgaggcagctgcggtaaagctcatcagcgtggtcgtgaagcgattcacagatgtctgcctgttcatccgcgtccagctcgttgagtttctccagaagcgttaatgtctggcttctgataaagcgggccatgttaagggcggttttttcctgtttggtcactgatgcctccgtgtaagggggatttctgttcatgggggtaatgataccgatgaaacgagagaggatgctcacgatacgggttactgatgatgaacatgcccggttactggaacgttgtgagggtaaacaactggcggtatggatgcggcgggaccagagaaaaatcactcagggtcaatgccagcgcttcgttaatacagatgtaggtgttccacagggtagccagcagcatcctgcgatgcagatccggaacataatggtgcagggcgctgacttccgcgtttccagactttacgaaacacggaaaccgaagaccattcatgttgttgctcaggtcgcagacgttttgcagcagcagtcgcttcacgttcgctcgcgtatcggtgattcattctgctaaccagtaaggcaaccccgccagcctagccgggtcctcaacgacaggagcacgatcatgcgcacccgtggccaggacccaacgctgcccgagatgcgccgcgtgcggctgctggagatggcggacgcgatggatatgttctgccaagggttggtttgcgcattcacagttctccgcaagaattgattggctccaattcttggagtggtgaatccgttagcgaggtgccgccggcttccattcaggtcgaggtggcccggctccatgcaccgcgacgcaacgcggggaggcagacaaggtatagggcggcgcctacaatccatgccaacccgttccatgtgctcgccgaggcggcataaatcgccgtgacgatcagcggtccagtgatcgaagttaggctggtaagagccgcgagcgatccttgaagctgtccctgatggtcgtcatctacctgcctggacagcatggcctgcaacgcgggcatcccgatgccgccggaagcgagaagaatcataatggggaaggccatccagcctcgcgtcgcgaacgccagcaagacgtagcccagcgcgtcggccgccatgccggcgataatggcctgcttctcgccgaaacgtttggtggcgggaccagtgacgaaggcttgagcgagggcgtgcaagattccgaataccgcaagcgacaggccgatcatcgtcgcgctccagcgaaagcggtcctcgccgaaaatgacccagagcgctgccggcacctgtcctacgagttgcatgataaagaagacagtcataagtgcggcgacgatagtcatgccccgcgcccaccggaaggagctgactgggttgaaggctctcaagggcatcggtcgacgctctcccttatgcgactcctgcattaggaagcagcccagtagtaggttgaggccgttgagcaccgccgccgcaaggaatggtgcatgcaaggagatggcgcccaacagtcccccggccacggggcctgccaccatacccacgccgaaacaagcgctcatgagcccgaagtggcgagcccgatcttccccatcggtgatgtcggcgatataggcgccagcaaccgcacctgtggcgccggtgatgccggccacgatgcgtccggcgtagaggatcgagatctcgatcccgcgaaattaatacgactcactatagggagaccacaacggtttccctctagtgccggctccggagagctctttaattaagcggccgccctgcaggactcgagttctagaaataattttgtttaactttaagaaggagatatacatatgaaatcttctcaccatcaccatcaccatcaccatcaccatggttcttctatgaaaatcgaagaaggtaaactggtaatctggattaacggcgataaaggctataacggtctcgctgaagtcggtaagaaattcgagaaagataccggaattaaagtcaccgttgagcatccggataaactggaagagaaattcccacaggttgcggcaactggcgatggccctgacattatcttctgggcacacgaccgctttggtggctacgctcaatctggcctgttggctgaaatcaccccggacaaagcgttccaggacaagctgtatccgtttacctgggatgccgtacgttacaacggcaagctgattgcttacccgatcgctgttgaagcgttatcgctgatttataacaaagatctgctgccgaacccgccaaaaacctgggaagagatcccggcgctggataaagaactgaaagcgaaaggtaagagcgcgctgatgttcaacctgcaagaaccgtacttcacctggccgctgattgctgctgacgggggttatgcgttcaagtatgaaaacggcaagtacgacattaaagacgtgggcgtggataacgctggcgcgaaagcgggtctgaccttcctggttgacctgattaaaaacaaacacatgaatgcagacaccgattactccatcgcagaagctgcctttaataaaggcgaaacagcgatgaccatcaacggcccgtgggcatggtccaacatcgacaccagcaaagtgaattatggtgtaacggtactgccgaccttcaagggtcaaccatccaaaccgttcgttggcgtgctgagcgcaggtattaacgccgccagtccgaacaaagagctggcaaaagagttcctcgaaaactatctgctgactgatgaaggtctggaagcggttaataaagacaaaccgctgggtgccgtagcgctgaagtcttacgaggaagagttggcgaaagatccacgtattgccgccactatggaaaacgcccagaaaggtgaaatcatgccgaacatcccgcagatgtccgctttctggtatgccgtgcgtactgcggtgatcaacgccgccagcggtcgtcagactgtcgatgaagccctgaaagacgcgcagactaattcgagctcgaacaacaacaacaataacaataacaacaacctcgggatcgaggaaaacctgtacttccaatccaatgcaatggctaagaaagggttctcaagtttccatagaaaagcagtctcttcccaagatacgcttgaatcgatagagcttgtctctagcgctaattgtctagaaagtgttacgtatcaagatatatcagcatttcccgaaacaattgcggtagagattaatttccgattaagcattcttcgctttttagcgcgaaagtgcgaaaccattgtggccaaatcaattgaaccacatcgtgtagagctacagcaaaactatagtagaaaaatacccagtgcaataacgatatatcgatggtggcttgcttttcgaaaatcagactacaaccccattagcttagcacctaatatcaaggatagaggtaatagagagacaaaagtgtcaacagttgttgattctattatggaacaggcagttgaaagagttatatctggacgaaaagtcaatgttagctctgcatataaacgtgttcgacgaaaagttcgtcaatacaatctaactcatggaacgaaatacacgtatcctaagtacgaatctgtaagaaagcgagtaaaaaagaaaaccccatttgagttattagccgcagggaaaggggagagagtagctaagagagagtttcgccgaatgggaaaaaagatcctcacgtctagcgtgctagagagggttgaaatagatcacactgtcgttgacctttttgcagtacacgaagagtatcgaatcccattgggccgaccttggcttactcaattggttgattgttacagtaaagctgtaatcggtttttatttaggtttcgagcctcctagctatgtgtcggtttcccttgcacttaagaatgcaatacaacgcaaagatgacttaatctcctcgtatgaatcgatcgagaatgaatggctatgttatggcatcccagacctactcgtaactgataatggtaaagagtttttgtcgaaagcatttgatcaagcatgtgaatcactattgatcaatgtgcatcaaaataaagttgagacgcccgacaacaaacctcatgttgaacgtaactacgggactattaatacttctctgttagacgatttacctgggaaatccttcagccagtaccttcaaagagaagggtacgactctgtgggagaagctacccttacactcaatgagattagagaaatttacttaatttggttggtggatatttatcataaaaaacccaatcagagaggcactaattgtcctaatgttgcgtggaaaaagggttgtcaagaatgggaaccagaggagttctctggttctaaagacgaattagactttaaatttgctattgttgattacaaacaacttactaaagtagggataactgtctacaaagaactgagttatagcaatgaccgtttagctgaatatagagggaagaaaggaaaccataaagttcagttcaagtataaccctgagtgtatggcagttatttgggtgttggatgaggatatgaatgagtactttacagttaatgcgattgactacgaatatgcaagtagagtatcactttggcaacataaatataacatgaaatatcaagcagaactaaattcagcagaatatgatgaggacaaggaaattgatgcagaaataaaaattgaagaaatcgcagatcgttcaattgttaagactaacaaaatcagagctcggaggcgtggcgctaggcatcaagagaatagcgcaagggctaagtcaatcagtaatgcgaacccggcctcgatacaaaaacatgaagatgaaatcgttagtgcagataatgacgattgggatattgattatgtctaatagcattggaagtggataacggatccgcgatcgcggcgcgccacctggtggccggccggtaccacgcgtgcgcgctgatccggctgctaacaaagcccgaaaggaagctgagttggctgctgccaccgctgagcaataactagcataaccccttggggcctctaaacgggtcttgaggggttttttgctgaaaggaggaactatatccggatatccacaggacgggtgtggtcgccatgatcgcgtagtcgatagtggctccaagtagcgaagcgagcaggactgggcggcggccaaagcggtcggacagtgctccgagaacgggtgcgcatagaaattgcatcaacgcatatagcgctagcagcacgccatagtgactggcgatgctgtcggaatggacgatatcccgcaagaggcccggcagtaccggcataaccaagcctatgcctacagcatccagggtgacggtgccgaggatgacgatgagcgcattgttagatttcatacacggtgcctgactgcgttagcaatttaactgtgataaactaccgcattaaagcttatcgatgataagctgtcaaacatgagaa

SEQ ID NO: 906 - DNA, 6962 bp, Synthetic construct
  source 1..6962: mol_type = other DNA
ttcttgaagacgaaagggcctcgtgatacgcctatttttataggttaatgtcatgataataatggtttcttagacgtcaggtggcacttttcggggaaatgtgcgcggaacccctatttgtttatttttctaaatacattcaaatatgtatccgctcatgagacaataaccctgataaatgcttcaataacattgaaaaaggaagagtatgagtattcaacatttccgtgtcgcccttattcccttttttgcggcattttgccttcctgtttttgctcacccagaaacgctggtgaaagtaaaagatgctgaagatcagttgggtgcacgagtgggttacatcgaactggatctcaacagcggtaagatccttgagagttttcgccccgaagaacgttttccaatgatgagcacttttaaagttctgctatgtggcgcggtattatcccgtgttgacgccgggcaagagcaactcggtcgccgcatacactattctcagaatgacttggttgagtactcaccagtcacagaaaagcatcttacggatggcatgacagtaagagaattatgcagtgctgccataaccatgagtgataacactgcggccaacttacttctgacaacgatcggaggaccgaaggagctaaccgcttttttgcacaacatgggggatcatgtaactcgccttgatcgttgggaaccggagctgaatgaagccataccaaacgacgagcgtgacaccacgatgcctgcagcaatggcaacaacgttgcgcaaactattaactggcgaactacttactctagcttcccggcaacaattaatagactggatggaggcggataaagttgcaggaccacttctgcgctcggcccttccggctggctggtttattgctgataaatctggagccggtgagcgtgggtctcgcggtatcattgcagcactggggccagatggtaagccctcccgtatcgtagttatctacacgacggggagtcaggcaactatggatgaacgaaatagacagatcgctgagataggtgcctcactgattaagcattggtaactgtcagaccaagtttactcatatatactttagattgatttaaaacttcatttttaatttaaaaggatctaggtgaagatcctttttgataatctcatgaccaaaatcccttaacgtgagttttcgttccactgagcgtcagaccccgtagaaaagatcaaaggatcttcttgagatcctttttttctgcgcgtaatctgctgcttgcaaacaaaaaaaccaccgctaccagcggtggtttgtttgccggatcaagagctaccaactctttttccgaaggtaactggcttcagcagagcgcagataccaaatactgtccttctagtgtagccgtagttaggccaccacttcaagaactctgtagcaccgcctacatacctcgctctgctaatcctgttaccagtggctgctgccagtggcgataagtcgtgtcttaccgggttggactcaagacgatagttaccggataaggcgcagcggtcgggctgaacggggggttcgtgcacacagcccagcttggagcgaacgacctacaccgaactgagatacctacagcgtgagctatgagaaagcgccacgcttcccgaagggagaaaggcggacaggtatccggtaagcggcagggtcggaacaggagagcgcacgagggagcttccagggggaaacgcctggtatctttatagtcctgtcgggtttcgccacctctgacttgagcgtcgatttttgtgatgctcgtcaggggggcggagcctatggaaaaacgccagcaacgcggcctttttacggttcctggccttttgctggccttttgctcacatgttctttcctgcgttatcccctgattctgtggataaccgtattaccgcctttgagtgagctgataccgctcgccgcagccgaacgaccgagcgcagcgagtcagtgagcgaggaagcggaagagcgcctgatgcggtattttctccttacgcatctgtgcggtatttcacaccgcatatatggtgcactctcagtacaatctgctctgatgccgcatagttaagccagtatacactccgctatcgctacgtgactgggtcatggctgcgccccgacacccgccaacacccgctgacgcgccctgacgggcttgtctgctcccggcatccgcttacagacaagctgtgaccgtctccgggagctgcatgtgtcagaggttttcaccgtcatcaccgaaacgcgcgaggcagctgcggtaaagctcatcagcgtggtcgtgaagcgattcacagatgtctgcctgttcatccgcgtccagctcgttgagtttctccagaagcgttaatgtctggcttctgataaagcgggccatgttaagggcggttttttcctgtttggtcactgatgcctccgtgtaagggggatttctgttcatgggggtaatgataccgatgaaacgagagaggatgctcacgatacgggttactgatgatgaacatgcccggttactggaacgttgtgagggtaaacaactggcggtatggatgcggcgggaccagagaaaaatcactcagggtcaatgccagcgcttcgttaatacagatgtaggtgttccacagggtagccagcagcatcctgcgatgcagatccggaacataatggtgcagggcgctgacttccgcgtttccagactttacgaaacacggaaaccgaagaccattcatgttgttgctcaggtcgcagacgttttgcagcagcagtcgcttcacgttcgctcgcgtatcggtgattcattctgctaaccagtaaggcaaccccgccagcctagccgggtcctcaacgacaggagcacgatcatgcgcacccgtggccaggacccaacgctgcccgagatgcgccgcgtgcggctgctggagatggcggacgcgatggatatgttctgccaagggttggtttgcgcattcacagttctccgcaagaattgattggctccaattcttggagtggtgaatccgttagcgaggtgccgccggcttccattcaggtcgaggtggcccggctccatgcaccgcgacgcaacgcggggaggcagacaaggtatagggcggcgcctacaatccatgccaacccgttccatgtgctcgccgaggcggcataaatcgccgtgacgatcagcggtccagtgatcgaagttaggctggtaagagccgcgagcgatccttgaagctgtccctgatggtcgtcatctacctgcctggacagcatggcctgcaacgcgggcatcccgatgccgccggaagcgagaagaatcataatggggaaggccatccagcctcgcgtcgcgaacgccagcaagacgtagcccagcgcgtcggccgccatgccggcgataatggcctgcttctcgccgaaacgtttggtggcgggaccagtgacgaaggcttgagcgagggcgtgcaagattccgaataccgcaagcgacaggccgatcatcgtcgcgctccagcgaaagcggtcctcgccgaaaatgacccagagcgctgccggcacctgtcctacgagttgcatgataaagaagacagtcataagtgcggcgacgatagtcatgccccgcgcccaccggaaggagctgactgggttgaaggctctcaagggcatcggtcgacgctctcccttatgcgactcctgcattaggaagcagcccagtagtaggttgaggccgttgagcaccgccgccgcaaggaatggtgcatgcaaggagatggcgcccaacagtcccccggccacggggcctgccaccatacccacgccgaaacaagcgctcatgagcccgaagtggcgagcccgatcttccccatcggtgatgtcggcgatataggcgccagcaaccgcacctgtggcgccggtgatgccggccacgatgcgtccggcgtagaggatcgagatctcgatcccgcgaaattaatacgactcactatagggagaccacaacggtttccctctagtgccggctccggagagctctttaattaagcggccgccctgcaggactcgagttctagaaataattttgtttaactttaagaaggagatatacatatgaaatcttctcaccatcaccatcaccatcaccatcaccatggttcttctatgaaaatcgaagaaggtaaactggtaatctggattaacggcgataaaggctataacggtctcgctgaagtcggtaagaaattcgagaaagataccggaattaaagtcaccgttgagcatccggataaactggaagagaaattcccacaggttgcggcaactggcgatggccctgacattatcttctgggcacacgaccgctttggtggctacgctcaatctggcctgttggctgaaatcaccccggacaaagcgttccaggacaagctgtatccgtttacctgggatgccgtacgttacaacggcaagctgattgcttacccgatcgctgttgaagcgttatcgctgatttataacaaagatctgctgccgaacccgccaaaaacctgggaagagatcccggcgctggataaagaactgaaagcgaaaggtaagagcgcgctgatgttcaacctgcaagaaccgtacttcacctggccgctgattgctgctgacgggggttatgcgttcaagtatgaaaacggcaagtacgacattaaagacgtgggcgtggataacgctggcgcgaaagcgggtctgaccttcctggttgacctgattaaaaacaaacacatgaatgcagacaccgattactccatcgcagaagctgcctttaataaaggcgaaacagcgatgaccatcaacggcccgtgggcatggtccaacatcgacaccagcaaagtgaattatggtgtaacggtactgccgaccttcaagggtcaaccatccaaaccgttcgttggcgtgctgagcgcaggtattaacgccgccagtccgaacaaagagctggcaaaagagttcctcgaaaactatctgctgactgatgaaggtctggaagcggttaataaagacaaaccgctgggtgccgtagcgctgaagtcttacgaggaagagttggcgaaagatccacgtattgccgccactatggaaaacgcccagaaaggtgaaatcatgccgaacatcccgcagatgtccgctttctggtatgccgtgcgtactgcggtgatcaacgccgccagcggtcgtcagactgtcgatgaagccctgaaagacgcgcagactaattcgagctcgaacaacaacaacaataacaataacaacaacctcgggatcgaggaaaacctgtacttccaatccaatgcaatgagtgaaacgcgtgaggctcgtatatcaagagctaaaagggcatttgtatccacaccgagcgttaggaaaatcttgagttacatggatagatgtagagatctatcagacctagagtctgagcctacatgcatgatggtctatggtgcttcgggtgtaggtaaaacgaccgtcatcaagaaatacttaaatcaaaacagaagagagtccgaagccgggggcgatataataccggttttgcatattgagttgccagacaatgcgaagccagtagatgcagcaagggaattgctggttgaaatgggtgacccgctagcactttatgaaactgacttagctagattgacgaaaagactgactgaattaatccctgcggtcggcgtgaagctgattattatcgatgagttccaacatttggtggaagaaaggtcaaatcgggttcttacccaagtaggtaattggctaaaaatgatacttaacaaaacgaaatgtccaattgttatatttggtatgccatactcaaaagttgtactgcaagcaaactcgcaacttcacgggcgattttccattcaggttgaactgcgcccctttagctaccagggaggtagaggtgtatttaaaacttttttggaataccttgataaagccctaccttttgaaaaacaggctggcttagccaacgaaagtttgcagaaaaaattgtatgcattctctcagggaaacatgcgttcgttgagaaaccttatttatcaagcatctatcgaagcaattgataatcagcatgagacgataaccgaagaagatttcgtttttgcatcgaagttgacatcgggcgataaacccaactcatggaaaaatccttttgaggagggtgttgaggtaacagaagatatgttacgaccgccaccaaaagatattggttgggaggactatttgagacattcaaccccgagagtgagtaaaccaggtagaaataaaaactttttcgaataatagcattggaagtggataacggatccgcgatcgcggcgcgccacctggtggccggccggtaccacgcgtgcgcgctgatccggctgctaacaaagcccgaaaggaagctgagttggctgctgccaccgctgagcaataactagcataaccccttggggcctctaaacgggtcttgaggggttttttgctgaaaggaggaactatatccggatatccacaggacgggtgtggtcgccatgatcgcgtagtcgatagtggctccaagtagcgaagcgagcaggactgggcggcggccaaagcggtcggacagtgctccgagaacgggtgcgcatagaaattgcatcaacgcatatagcgctagcagcacgccatagtgactggcgatgctgtcggaatggacgatatcccgcaagaggcccggcagtaccggcataaccaagcctatgcctacagcatccagggtgacggtgccgaggatgacgatgagcgcattgttagatttcatacacggtgcctgactgcgttagcaatttaactgtgataaactaccgcattaaagcttatcgatgataagctgtcaaacatgagaa

SEQ ID NO: 907 - DNA, 9077 bp, Synthetic construct
  source 1..9077: mol_type = other DNA
ttcttgaagacgaaagggcctcgtgatacgcctatttttataggttaatgtcatgataataatggtttcttagacgtcaggtggcacttttcggggaaatgtgcgcggaacccctatttgtttatttttctaaatacattcaaatatgtatccgctcatgagacaataaccctgataaatgcttcaataacattgaaaaaggaagagtatgagtattcaacatttccgtgtcgcccttattcccttttttgcggcattttgccttcctgtttttgctcacccagaaacgctggtgaaagtaaaagatgctgaagatcagttgggtgcacgagtgggttacatcgaactggatctcaacagcggtaagatccttgagagttttcgccccgaagaacgttttccaatgatgagcacttttaaagttctgctatgtggcgcggtattatcccgtgttgacgccgggcaagagcaactcggtcgccgcatacactattctcagaatgacttggttgagtactcaccagtcacagaaaagcatcttacggatggcatgacagtaagagaattatgcagtgctgccataaccatgagtgataacactgcggccaacttacttctgacaacgatcggaggaccgaaggagctaaccgcttttttgcacaacatgggggatcatgtaactcgccttgatcgttgggaaccggagctgaatgaagccataccaaacgacgagcgtgacaccacgatgcctgcagcaatggcaacaacgttgcgcaaactattaactggcgaactacttactctagcttcccggcaacaattaatagactggatggaggcggataaagttgcaggaccacttctgcgctcggcccttccggctggctggtttattgctgataaatctggagccggtgagcgtgggtctcgcggtatcattgcagcactggggccagatggtaagccctcccgtatcgtagttatctacacgacggggagtcaggcaactatggatgaacgaaatagacagatcgctgagataggtgcctcactgattaagcattggtaactgtcagaccaagtttactcatatatactttagattgatttaaaacttcatttttaatttaaaaggatctaggtgaagatcctttttgataatctcatgaccaaaatcccttaacgtgagttttcgttccactgagcgtcagaccccgtagaaaagatcaaaggatcttcttgagatcctttttttctgcgcgtaatctgctgcttgcaaacaaaaaaaccaccgctaccagcggtggtttgtttgccggatcaagagctaccaactctttttccgaaggtaactggcttcagcagagcgcagataccaaatactgtccttctagtgtagccgtagttaggccaccacttcaagaactctgtagcaccgcctacatacctcgctctgctaatcctgttaccagtggctgctgccagtggcgataagtcgtgtcttaccgggttggactcaagacgatagttaccggataaggcgcagcggtcgggctgaacggggggttcgtgcacacagcccagcttggagcgaacgacctacaccgaactgagatacctacagcgtgagctatgagaaagcgccacgcttcccgaagggagaaaggcggacaggtatccggtaagcggcagggtcggaacaggagagcgcacgagggagcttccagggggaaacgcctggtatctttatagtcctgtcgggtttcgccacctctgacttgagcgtcgatttttgtgatgctcgtcaggggggcggagcctatggaaaaacgccagcaacgcggcctttttacggttcctggccttttgctggccttttgctcacatgttctttcctgcgttatcccctgattctgtggataaccgtattaccgcctttgagtgagctgataccgctcgccgcagccgaacgaccgagcgcagcgagtcagtgagcgaggaagcggaagagcgcctgatgcggtattttctccttacgcatctgtgcggtatttcacaccgcatatatggtgcactctcagtacaatctgctctgatgccgcatagttaagccagtatacactccgctatcgctacgtgactgggtcatggctgcgccccgacacccgccaacacccgctgacgcgccctgacgggcttgtctgctcccggcatccgcttacagacaagctgtgaccgtctccgggagctgcatgtgtcagaggttttcaccgtcatcaccgaaacgcgcgaggcagctgcggtaaagctcatcagcgtggtcgtgaagcgattcacagatgtctgcctgttcatccgcgtccagctcgttgagtttctccagaagcgttaatgtctggcttctgataaagcgggccatgttaagggcggttttttcctgtttggtcactgatgcctccgtgtaagggggatttctgttcatgggggtaatgataccgatgaaacgagagaggatgctcacgatacgggttactgatgatgaacatgcccggttactggaacgttgtgagggtaaacaactggcggtatggatgcggcgggaccagagaaaaatcactcagggtcaatgccagcgcttcgttaatacagatgtaggtgttccacagggtagccagcagcatcctgcgatgcagatccggaacataatggtgcagggcgctgacttccgcgtttccagactttacgaaacacggaaaccgaagaccattcatgttgttgctcaggtcgcagacgttttgcagcagcagtcgcttcacgttcgctcgcgtatcggtgattcattctgctaaccagtaaggcaaccccgccagcctagccgggtcctcaacgacaggagcacgatcatgcgcacccgtggccaggacccaacgctgcccgagatgcgccgcgtgcggctgctggagatggcggacgcgatggatatgttctgccaagggttggtttgcgcattcacagttctccgcaagaattgattggctccaattcttggagtggtgaatccgttagcgaggtgccgccggcttccattcaggtcgaggtggcccggctccatgcaccgcgacgcaacgcggggaggcagacaaggtatagggcggcgcctacaatccatgccaacccgttccatgtgctcgccgaggcggcataaatcgccgtgacgatcagcggtccagtgatcgaagttaggctggtaagagccgcgagcgatccttgaagctgtccctgatggtcgtcatctacctgcctggacagcatggcctgcaacgcgggcatcccgatgccgccggaagcgagaagaatcataatggggaaggccatccagcctcgcgtcgcgaacgccagcaagacgtagcccagcgcgtcggccgccatgccggcgataatggcctgcttctcgccgaaacgtttggtggcgggaccagtgacgaaggcttgagcgagggcgtgcaagattccgaataccgcaagcgacaggccgatcatcgtcgcgctccagcgaaagcggtcctcgccgaaaatgacccagagcgctgccggcacctgtcctacgagttgcatgataaagaagacagtcataagtgcggcgacgatagtcatgccccgcgcccaccggaaggagctgactgggttgaaggctctcaagggcatcggtcgacgctctcccttatgcgactcctgcattaggaagcagcccagtagtaggttgaggccgttgagcaccgccgccgcaaggaatggtgcatgcaaggagatggcgcccaacagtcccccggccacggggcctgccaccatacccacgccgaaacaagcgctcatgagcccgaagtggcgagcccgatcttccccatcggtgatgtcggcgatataggcgccagcaaccgcacctgtggcgccggtgatgccggccacgatgcgtccggcgtagaggatcgagatctcgatcccgcgaaattaatacgactcactatagggagaccacaacggtttccctctagtgccggctccggagagctctttaattaagcggccgccctgcaggactcgagttctagaaataattttgtttaactttaagaaggagatatacatatgaaatcttctcaccatcaccatcaccatcaccatcaccatggttcttctatgaaaatcgaagaaggtaaactggtaatctggattaacggcgataaaggctataacggtctcgctgaagtcggtaagaaattcgagaaagataccggaattaaagtcaccgttgagcatccggataaactggaagagaaattcccacaggttgcggcaactggcgatggccctgacattatcttctgggcacacgaccgctttggtggctacgctcaatctggcctgttggctgaaatcaccccggacaaagcgttccaggacaagctgtatccgtttacctgggatgccgtacgttacaacggcaagctgattgcttacccgatcgctgttgaagcgttatcgctgatttataacaaagatctgctgccgaacccgccaaaaacctgggaagagatcccggcgctggataaagaactgaaagcgaaaggtaagagcgcgctgatgttcaacctgcaagaaccgtacttcacctggccgctgattgctgctgacgggggttatgcgttcaagtatgaaaacggcaagtacgacattaaagacgtgggcgtggataacgctggcgcgaaagcgggtctgaccttcctggttgacctgattaaaaacaaacacatgaatgcagacaccgattactccatcgcagaagctgcctttaataaaggcgaaacagcgatgaccatcaacggcccgtgggcatggtccaacatcgacaccagcaaagtgaattatggtgtaacggtactgccgaccttcaagggtcaaccatccaaaccgttcgttggcgtgctgagcgcaggtattaacgccgccagtccgaacaaagagctggcaaaagagttcctcgaaaactatctgctgactgatgaaggtctggaagcggttaataaagacaaaccgctgggtgccgtagcgctgaagtcttacgaggaagagttggcgaaagatccacgtattgccgccactatggaaaacgcccagaaaggtgaaatcatgccgaacatcccgcagatgtccgctttctggtatgccgtgcgtactgcggtgatcaacgccgccagcggtcgtcagactgtcgatgaagccctgaaagacgcgcagactaattcgagctcgaacaacaacaacaataacaataacaacaacctcgggatcgaggaaaacctgtacttccaatccaatgcaatgtttttgcaaagacctaaaccttacagcgatgaaagtttagaaagtttctttatccgagtggctaacaaaaatggctacggtgatgtccatcgcttcctagaagccactaaacgattccttcaagacattgaccataatggctatcaaacctttccgactgatataactcggataaacccatactcagctaaaaacagttccagcgcacgaactgcgtcattcctgaaacttgcacaattgacatttaatgaaccgccagagctacttgggttggcaattaacagaacaaacatgaaatactcgccgtcaactagcgcggttgttagaggtgcagaagtctttcctcgcagtttactacggacgcactccatcccctgctgtcctttgtgtctgcgagaaaatggctacgcctcctacctttggcactttcaggggtacgaatactgccacagccataacgtacctttaattaccacttgtagctgtggtaaggagtttgactaccgagtatctgggttaaagggcatttgctgcaaatgcaaggagcctatcaccttaaccagcagggagaacggtcatgaggcagcgtgtactgtttcaaactggcttgctggccatgaatctaaacctctgccaaatcttcctaaaagctaccgatggggtttagttcattggtggatgggtattaaagatagcgagttcgatcacttttcgttcgttcaatttttctcaaactggccaaggtcattccactcgataatcgaagatgaagtagagttcaaccttgagcatgctgttgtcagcacgtctgaattacgactaaaagatcttcttggtcgattgtttttcggttcaattcggttacctgagcggaatcttcaacacaatatcatccttggtgagcttctctgctatttagaaaatcgtttatggcaagacaagggattaatcgccaacctcaaaatgaacgcgttagaggcgactgtaatgttaaattgtagcctcgatcagattgcatcaatggttgaacaacgcatcttgaagccaaatcgaaaaagcaagcccaacagccctcttgatgttaccgattatctatttcatttcggcgatattttctgtctttggttagctgagttccaaagcgatgagtttaaccgttcgttttatgtgtcgaggtggtaaatgcaaactctgaaagaactaatcgcatccaatcctgacgacttaacaactgaacttaagagagcatttcgtccactcacaccgcatattgcaattgatggtaatgaacttgacgcactgacgatattagtcaatttaaccgataagactgatgatcagaaagacctgctcgatcgagccaaatgcaagcaaaaacttcgagatgaaaaatggtgggctagctgcataaattgcgttaattacagacaaagccataacccaaaattcccggatatacgttctgaaggcgtgattcgaacccaagccctgggtgaattaccgagtttcctactctcgtcctcaaaaatcccaccataccattggtcatatagccatgattcaaaatacgtcaacaaaagcgcattcctcaccaatgagttttgttgggatggtgagatctcatgtttgggtgagcttcttaaagatgcagatcacccactttggaatactttgaaaaagttaggttgttctcaaaaaacttgcaaagcaatggcaaaacaactagctgatattactctcacgactatcaatgtcacactcgcaccaaattacctgactcaaatatctctccccgatagtgatacatcctacatttcactctctcctgttgcatcgctatcgatgcaaagccactttcatcagaggctccaagatgaaaatcggcatagcgcgataacgcggtttagccgaactaccaacatgggggtcactgcgatgacatgtggcggcgcatttagaatgttaaagtctggcgctaagttttccagcccccctcatcaccgattaaacagtaaacgaagttggttgacgtcagagcatgttcagtcattaaaacagtaccagcgcctcaacaaaagcctcatacctgaaaactctcggattgcactccgtagaaaatacaaaatcgagcttcaaaatatggtcagatcttggtttgcaatgcaagaccatacccttgattcgaacatacttatccaacatttgaatcatgacctatcttacttaggagccacaaaacgttttgcatacgatccagcgatgaccaagctctttactgagcttttgaaacgagagttatcaaattcaatcaataatggtgagcaacacactaatggatcgtttttagtcctaccgaatatcagggtttgtggcgcaacagctttaagctccccggtaacggtggggattccatcacttacagctttctttggcttcgttcacgcatttgaacggaatataaatcgcaccacctcatcgtttcgtgttgaatcctttgcgatatgcgtccatcaactacatgtcgagaagcgaggtttgacagcagagtttgtggaaaaaggcgacgggactatatccgctcccgcgacccgggatgactggcagtgtgatgtcgtatttagccttattttgaacaccaactttgctcaacatattgaccaagatacgttagttacatcactaccaaagcgattggctcggggttcagcaaaaattgcgattgatgactttaaacatatcaactcattctcgacattagaaacagcgatcgaatctctgccaatagaagctggtaggtggttatcactttacgcacagtcaaacaataatctaagtgatctattagcagccatgacagaggaccatcagctcatggcaagctgcgtcggttaccacttgttagaagagcccaaagataaaccaaactccctcagaggttacaaacacgctatcgccgagtgcatcattggactcattaactcaatcacctttagctcagagactgatcccaacacaatcttttggtcgctaaagaactatcaaaactacctagtggtacagccaaggagtatcaacgatgaaactaccgacaaatctagcctataatagcattggaagtggataacggatccgcgatcgcggcgcgccacctggtggccggccggtaccacgcgtgcgcgctgatccggctgctaacaaagcccgaaaggaagctgagttggctgctgccaccgctgagcaataactagcataaccccttggggcctctaaacgggtcttgaggggttttttgctgaaaggaggaactatatccggatatccacaggacgggtgtggtcgccatgatcgcgtagtcgatagtggctccaagtagcgaagcgagcaggactgggcggcggccaaagcggtcggacagtgctccgagaacgggtgcgcatagaaattgcatcaacgcatatagcgctagcagcacgccatagtgactggcgatgctgtcggaatggacgatatcccgcaagaggcccggcagtaccggcataaccaagcctatgcctacagcatccagggtgacggtgccgaggatgacgatgagcgcattgttagatttcatacacggtgcctgactgcgttagcaatttaactgtgataaactaccgcattaaagcttatcgatgataagctgtcaaacatgagaa

SEQ ID NO: 908 - DNA, 7031 bp, Synthetic construct
  source 1..7031: mol_type = other DNA
ttcttgaagacgaaagggcctcgtgatacgcctatttttataggttaatgtcatgataataatggtttcttagacgtcaggtggcacttttcggggaaatgtgcgcggaacccctatttgtttatttttctaaatacattcaaatatgtatccgctcatgagacaataaccctgataaatgcttcaataacattgaaaaaggaagagtatgagtattcaacatttccgtgtcgcccttattcccttttttgcggcattttgccttcctgtttttgctcacccagaaacgctggtgaaagtaaaagatgctgaagatcagttgggtgcacgagtgggttacatcgaactggatctcaacagcggtaagatccttgagagttttcgccccgaagaacgttttccaatgatgagcacttttaaagttctgctatgtggcgcggtattatcccgtgttgacgccgggcaagagcaactcggtcgccgcatacactattctcagaatgacttggttgagtactcaccagtcacagaaaagcatcttacggatggcatgacagtaagagaattatgcagtgctgccataaccatgagtgataacactgcggccaacttacttctgacaacgatcggaggaccgaaggagctaaccgcttttttgcacaacatgggggatcatgtaactcgccttgatcgttgggaaccggagctgaatgaagccataccaaacgacgagcgtgacaccacgatgcctgcagcaatggcaacaacgttgcgcaaactattaactggcgaactacttactctagcttcccggcaacaattaatagactggatggaggcggataaagttgcaggaccacttctgcgctcggcccttccggctggctggtttattgctgataaatctggagccggtgagcgtgggtctcgcggtatcattgcagcactggggccagatggtaagccctcccgtatcgtagttatctacacgacggggagtcaggcaactatggatgaacgaaatagacagatcgctgagataggtgcctcactgattaagcattggtaactgtcagaccaagtttactcatatatactttagattgatttaaaacttcatttttaatttaaaaggatctaggtgaagatcctttttgataatctcatgaccaaaatcccttaacgtgagttttcgttccactgagcgtcagaccccgtagaaaagatcaaaggatcttcttgagatcctttttttctgcgcgtaatctgctgcttgcaaacaaaaaaaccaccgctaccagcggtggtttgtttgccggatcaagagctaccaactctttttccgaaggtaactggcttcagcagagcgcagataccaaatactgtccttctagtgtagccgtagttaggccaccacttcaagaactctgtagcaccgcctacatacctcgctctgctaatcctgttaccagtggctgctgccagtggcgataagtcgtgtcttaccgggttggactcaagacgatagttaccggataaggcgcagcggtcgggctgaacggggggttcgtgcacacagcccagcttggagcgaacgacctacaccgaactgagatacctacagcgtgagctatgagaaagcgccacgcttcccgaagggagaaaggcggacaggtatccggtaagcggcagggtcggaacaggagagcgcacgagggagcttccagggggaaacgcctggtatctttatagtcctgtcgggtttcgccacctctgacttgagcgtcgatttttgtgatgctcgtcaggggggcggagcctatggaaaaacgccagcaacgcggcctttttacggttcctggccttttgctggccttttgctcacatgttctttcctgcgttatcccctgattctgtggataaccgtattaccgcctttgagtgagctgataccgctcgccgcagccgaacgaccgagcgcagcgagtcagtgagcgaggaagcggaagagcgcctgatgcggtattttctccttacgcatctgtgcggtatttcacaccgcatatatggtgcactctcagtacaatctgctctgatgccgcatagttaagccagtatacactccgctatcgctacgtgactgggtcatggctgcgccccgacacccgccaacacccgctgacgcgccctgacgggcttgtctgctcccggcatccgcttacagacaagctgtgaccgtctccgggagctgcatgtgtcagaggttttcaccgtcatcaccgaaacgcgcgaggcagctgcggtaaagctcatcagcgtggtcgtgaagcgattcacagatgtctgcctgttcatccgcgtccagctcgttgagtttctccagaagcgttaatgtctggcttctgataaagcgggccatgttaagggcggttttttcctgtttggtcactgatgcctccgtgtaagggggatttctgttcatgggggtaatgataccgatgaaacgagagaggatgctcacgatacgggttactgatgatgaacatgcccggttactggaacgttgtgagggtaaacaactggcggtatggatgcggcgggaccagagaaaaatcactcagggtcaatgccagcgcttcgttaatacagatgtaggtgttccacagggtagccagcagcatcctgcgatgcagatccggaacataatggtgcagggcgctgacttccgcgtttccagactttacgaaacacggaaaccgaagaccattcatgttgttgctcaggtcgcagacgttttgcagcagcagtcgcttcacgttcgctcgcgtatcggtgattcattctgctaaccagtaaggcaaccccgccagcctagccgggtcctcaacgacaggagcacgatcatgcgcacccgtggccaggacccaacgctgcccgagatgcgccgcgtgcggctgctggagatggcggacgcgatggatatgttctgccaagggttggtttgcgcattcacagttctccgcaagaattgattggctccaattcttggagtggtgaatccgttagcgaggtgccgccggcttccattcaggtcgaggtggcccggctccatgcaccgcgacgcaacgcggggaggcagacaaggtatagggcggcgcctacaatccatgccaacccgttccatgtgctcgccgaggcggcataaatcgccgtgacgatcagcggtccagtgatcgaagttaggctggtaagagccgcgagcgatccttgaagctgtccctgatggtcgtcatctacctgcctggacagcatggcctgcaacgcgggcatcccgatgccgccggaagcgagaagaatcataatggggaaggccatccagcctcgcgtcgcgaacgccagcaagacgtagcccagcgcgtcggccgccatgccggcgataatggcctgcttctcgccgaaacgtttggtggcgggaccagtgacgaaggcttgagcgagggcgtgcaagattccgaataccgcaagcgacaggccgatcatcgtcgcgctccagcgaaagcggtcctcgccgaaaatgacccagagcgctgccggcacctgtcctacgagttgcatgataaagaagacagtcataagtgcggcgacgatagtcatgccccgcgcccaccggaaggagctgactgggttgaaggctctcaagggcatcggtcgacgctctcccttatgcgactcctgcattaggaagcagcccagtagtaggttgaggccgttgagcaccgccgccgcaaggaatggtgcatgcaaggagatggcgcccaacagtcccccggccacggggcctgccaccatacccacgccgaaacaagcgctcatgagcccgaagtggcgagcccgatcttccccatcggtgatgtcggcgatataggcgccagcaaccgcacctgtggcgccggtgatgccggccacgatgcgtccggcgtagaggatcgagatctcgatcccgcgaaattaatacgactcactatagggagaccacaacggtttccctctagtgccggctccggagagctctttaattaagcggccgccctgcaggactcgagttctagaaataattttgtttaactttaagaaggagatatacatatgaaatcttctcaccatcaccatcaccatcaccatcaccatggttcttctatgaaaatcgaagaaggtaaactggtaatctggattaacggcgataaaggctataacggtctcgctgaagtcggtaagaaattcgagaaagataccggaattaaagtcaccgttgagcatccggataaactggaagagaaattcccacaggttgcggcaactggcgatggccctgacattatcttctgggcacacgaccgctttggtggctacgctcaatctggcctgttggctgaaatcaccccggacaaagcgttccaggacaagctgtatccgtttacctgggatgccgtacgttacaacggcaagctgattgcttacccgatcgctgttgaagcgttatcgctgatttataacaaagatctgctgccgaacccgccaaaaacctgggaagagatcccggcgctggataaagaactgaaagcgaaaggtaagagcgcgctgatgttcaacctgcaagaaccgtacttcacctggccgctgattgctgctgacgggggttatgcgttcaagtatgaaaacggcaagtacgacattaaagacgtgggcgtggataacgctggcgcgaaagcgggtctgaccttcctggttgacctgattaaaaacaaacacatgaatgcagacaccgattactccatcgcagaagctgcctttaataaaggcgaaacagcgatgaccatcaacggcccgtgggcatggtccaacatcgacaccagcaaagtgaattatggtgtaacggtactgccgaccttcaagggtcaaccatccaaaccgttcgttggcgtgctgagcgcaggtattaacgccgccagtccgaacaaagagctggcaaaagagttcctcgaaaactatctgctgactgatgaaggtctggaagcggttaataaagacaaaccgctgggtgccgtagcgctgaagtcttacgaggaagagttggcgaaagatccacgtattgccgccactatggaaaacgcccagaaaggtgaaatcatgccgaacatcccgcagatgtccgctttctggtatgccgtgcgtactgcggtgatcaacgccgccagcggtcgtcagactgtcgatgaagccctgaaagacgcgcagactaattcgagctcgaacaacaacaacaataacaataacaacaacctcgggatcgaggaaaacctgtacttccaatccaatgcaatgaaactaccgacaaatctagcctatgagcgctctatcgacccatcagatgtctgtttttttgtcgtctggcccgatgatagaaaaacacctttaacctacaattctcgtactctgctcgggcaaatggaagcggcatcattagcctatgatgtctcaggtcaaccaataaaaagtgccaccgctgaggcgttagctcaagggaaccctcatcaagttgatttctgccacgttccatacggtgcgagtcatattgaatgcagtttctccgtctcgttttcttctgaactacgtcaaccatataagtgtaactcaagcaaagttaaacaaacgctagtgcaattagtcgagctctacgaaacgaaaatcggctggactgagctagcaacccgatatttgatgaacatttgcaacggtaaatggctgtggaaaaatacccgtaaagcctattgctggaacattgtacttacaccttggccttggaacggggaaaaggttggatttgaagatattcgtactaactacacctcacggcaagactttaaaaataataaaaattggtctgctatagttgaaatgatcaaaaccgcattttctagtactgatgggctggcgatatttgaagtcagggccaccttgcacttgccaacgaatgctatggtgcggccaagccaagttttcacagaaaaagaaagtggcagtaaaagtaaatctaaaactcaaaacagtcgagtttttcagagtacaactattgatggtgaacgatcgccaatactaggggcctttaaaacgggagcagctattgcaaccattgacgactggtatcctgaagccactgagccactaagggtcggacggtttggggttcatcgcgaagatgtcacttgctaccgtcatccgtctaccggaaaagattttttctcgatattacaacaagcagagcactatattgaagtgttgagcgccaacaaaactcccgctcaagaaactatcaacgacatgcactttttaatggctaacctgattaagggtgggatgttccagcataaaggagactgataataacattggaagtggataacggatccgcgatcgcggcgcgccacctggtggccggccggtaccacgcgtgcgcgctgatccggctgctaacaaagcccgaaaggaagctgagttggctgctgccaccgctgagcaataactagcataaccccttggggcctctaaacgggtcttgaggggttttttgctgaaaggaggaactatatccggatatccacaggacgggtgtggtcgccatgatcgcgtagtcgatagtggctccaagtagcgaagcgagcaggactgggcggcggccaaagcggtcggacagtgctccgagaacgggtgcgcatagaaattgcatcaacgcatatagcgctagcagcacgccatagtgactggcgatgctgtcggaatggacgatatcccgcaagaggcccggcagtaccggcataaccaagcctatgcctacagcatccagggtgacggtgccgaggatgacgatgagcgcattgttagatttcatacacggtgcctgactgcgttagcaatttaactgtgataaactaccgcattaaagcttatcgatgataagctgtcaaacatgagaa

SEQ ID NO: 909 - DNA, 6569 bp, Synthetic construct
  source 1..6569: mol_type = other DNA
ttcttgaagacgaaagggcctcgtgatacgcctatttttataggttaatgtcatgataataatggtttcttagacgtcaggtggcacttttcggggaaatgtgcgcggaacccctatttgtttatttttctaaatacattcaaatatgtatccgctcatgagacaataaccctgataaatgcttcaataacattgaaaaaggaagagtatgagtattcaacatttccgtgtcgcccttattcccttttttgcggcattttgccttcctgtttttgctcacccagaaacgctggtgaaagtaaaagatgctgaagatcagttgggtgcacgagtgggttacatcgaactggatctcaacagcggtaagatccttgagagttttcgccccgaagaacgttttccaatgatgagcacttttaaagttctgctatgtggcgcggtattatcccgtgttgacgccgggcaagagcaactcggtcgccgcatacactattctcagaatgacttggttgagtactcaccagtcacagaaaagcatcttacggatggcatgacagtaagagaattatgcagtgctgccataaccatgagtgataacactgcggccaacttacttctgacaacgatcggaggaccgaaggagctaaccgcttttttgcacaacatgggggatcatgtaactcgccttgatcgttgggaaccggagctgaatgaagccataccaaacgacgagcgtgacaccacgatgcctgcagcaatggcaacaacgttgcgcaaactattaactggcgaactacttactctagcttcccggcaacaattaatagactggatggaggcggataaagttgcaggaccacttctgcgctcggcccttccggctggctggtttattgctgataaatctggagccggtgagcgtgggtctcgcggtatcattgcagcactggggccagatggtaagccctcccgtatcgtagttatctacacgacggggagtcaggcaactatggatgaacgaaatagacagatcgctgagataggtgcctcactgattaagcattggtaactgtcagaccaagtttactcatatatactttagattgatttaaaacttcatttttaatttaaaaggatctaggtgaagatcctttttgataatctcatgaccaaaatcccttaacgtgagttttcgttccactgagcgtcagaccccgtagaaaagatcaaaggatcttcttgagatcctttttttctgcgcgtaatctgctgcttgcaaacaaaaaaaccaccgctaccagcggtggtttgtttgccggatcaagagctaccaactctttttccgaaggtaactggcttcagcagagcgcagataccaaatactgtccttctagtgtagccgtagttaggccaccacttcaagaactctgtagcaccgcctacatacctcgctctgctaatcctgttaccagtggctgctgccagtggcgataagtcgtgtcttaccgggttggactcaagacgatagttaccggataaggcgcagcggtcgggctgaacggggggttcgtgcacacagcccagcttggagcgaacgacctacaccgaactgagatacctacagcgtgagctatgagaaagcgccacgcttcccgaagggagaaaggcggacaggtatccggtaagcggcagggtcggaacaggagagcgcacgagggagcttccagggggaaacgcctggtatctttatagtcctgtcgggtttcgccacctctgacttgagcgtcgatttttgtgatgctcgtcaggggggcggagcctatggaaaaacgccagcaacgcggcctttttacggttcctggccttttgctggccttttgctcacatgttctttcctgcgttatcccctgattctgtggataaccgtattaccgcctttgagtgagctgataccgctcgccgcagccgaacgaccgagcgcagcgagtcagtgagcgaggaagcggaagagcgcctgatgcggtattttctccttacgcatctgtgcggtatttcacaccgcatatatggtgcactctcagtacaatctgctctgatgccgcatagttaagccagtatacactccgctatcgctacgtgactgggtcatggctgcgccccgacacccgccaacacccgctgacgcgccctgacgggcttgtctgctcccggcatccgcttacagacaagctgtgaccgtctccgggagctgcatgtgtcagaggttttcaccgtcatcaccgaaacgcgcgaggcagctgcggtaaagctcatcagcgtggtcgtgaagcgattcacagatgtctgcctgttcatccgcgtccagctcgttgagtttctccagaagcgttaatgtctggcttctgataaagcgggccatgttaagggcggttttttcctgtttggtcactgatgcctccgtgtaagggggatttctgttcatgggggtaatgataccgatgaaacgagagaggatgctcacgatacgggttactgatgatgaacatgcccggttactggaacgttgtgagggtaaacaactggcggtatggatgcggcgggaccagagaaaaatcactcagggtcaatgccagcgcttcgttaatacagatgtaggtgttccacagggtagccagcagcatcctgcgatgcagatccggaacataatggtgcagggcgctgacttccgcgtttccagactttacgaaacacggaaaccgaagaccattcatgttgttgctcaggtcgcagacgttttgcagcagcagtcgcttcacgttcgctcgcgtatcggtgattcattctgctaaccagtaaggcaaccccgccagcctagccgggtcctcaacgacaggagcacgatcatgcgcacccgtggccaggacccaacgctgcccgagatgcgccgcgtgcggctgctggagatggcggacgcgatggatatgttctgccaagggttggtttgcgcattcacagttctccgcaagaattgattggctccaattcttggagtggtgaatccgttagcgaggtgccgccggcttccattcaggtcgaggtggcccggctccatgcaccgcgacgcaacgcggggaggcagacaaggtatagggcggcgcctacaatccatgccaacccgttccatgtgctcgccgaggcggcataaatcgccgtgacgatcagcggtccagtgatcgaagttaggctggtaagagccgcgagcgatccttgaagctgtccctgatggtcgtcatctacctgcctggacagcatggcctgcaacgcgggcatcccgatgccgccggaagcgagaagaatcataatggggaaggccatccagcctcgcgtcgcgaacgccagcaagacgtagcccagcgcgtcggccgccatgccggcgataatggcctgcttctcgccgaaacgtttggtggcgggaccagtgacgaaggcttgagcgagggcgtgcaagattccgaataccgcaagcgacaggccgatcatcgtcgcgctccagcgaaagcggtcctcgccgaaaatgacccagagcgctgccggcacctgtcctacgagttgcatgataaagaagacagtcataagtgcggcgacgatagtcatgccccgcgcccaccggaaggagctgactgggttgaaggctctcaagggcatcggtcgacgctctcccttatgcgactcctgcattaggaagcagcccagtagtaggttgaggccgttgagcaccgccgccgcaaggaatggtgcatgcaaggagatggcgcccaacagtcccccggccacggggcctgccaccatacccacgccgaaacaagcgctcatgagcccgaagtggcgagcccgatcttccccatcggtgatgtcggcgatataggcgccagcaaccgcacctgtggcgccggtgatgccggccacgatgcgtccggcgtagaggatcgagatctcgatcccgcgaaattaatacgactcactatagggagaccacaacggtttccctctagtgccggctccggagagctctttaattaagcggccgccctgcaggactcgagttctagaaataattttgtttaactttaagaaggagatatacatatgaaatcttctcaccatcaccatcaccatcaccatcaccatggttcttctatgaaaatcgaagaaggtaaactggtaatctggattaacggcgataaaggctataacggtctcgctgaagtcggtaagaaattcgagaaagataccggaattaaagtcaccgttgagcatccggataaactggaagagaaattcccacaggttgcggcaactggcgatggccctgacattatcttctgggcacacgaccgctttggtggctacgctcaatctggcctgttggctgaaatcaccccggacaaagcgttccaggacaagctgtatccgtttacctgggatgccgtacgttacaacggcaagctgattgcttacccgatcgctgttgaagcgttatcgctgatttataacaaagatctgctgccgaacccgccaaaaacctgggaagagatcccggcgctggataaagaactgaaagcgaaaggtaagagcgcgctgatgttcaacctgcaagaaccgtacttcacctggccgctgattgctgctgacgggggttatgcgttcaagtatgaaaacggcaagtacgacattaaagacgtgggcgtggataacgctggcgcgaaagcgggtctgaccttcctggttgacctgattaaaaacaaacacatgaatgcagacaccgattactccatcgcagaagctgcctttaataaaggcgaaacagcgatgaccatcaacggcccgtgggcatggtccaacatcgacaccagcaaagtgaattatggtgtaacggtactgccgaccttcaagggtcaaccatccaaaccgttcgttggcgtgctgagcgcaggtattaacgccgccagtccgaacaaagagctggcaaaagagttcctcgaaaactatctgctgactgatgaaggtctggaagcggttaataaagacaaaccgctgggtgccgtagcgctgaagtcttacgaggaagagttggcgaaagatccacgtattgccgccactatggaaaacgcccagaaaggtgaaatcatgccgaacatcccgcagatgtccgctttctggtatgccgtgcgtactgcggtgatcaacgccgccagcggtcgtcagactgtcgatgaagccctgaaagacgcgcagactaattcgagctcgaacaacaacaacaataacaataacaacaacctcgggatcgaggaaaacctgtacttccaatccaatgcagtgaaatggtattataagacaatcacctttctgccagagttgtgcaacaacgagtcactggctgcaaagtgtctccgcgttctgcatggatttaactatcagtatgagacacgaaatatcggcgtttcatttccgctttggtgtgatgcaacggttggaaaaaagatttcatttgtcagcaagaacaagatagaactcgacttactacttaaacaacactatttcgtccaaatggaacaacttcaatactttcatatatccaacactgttctcgtcccagaagattgtacatacgtttcctttagacgctgtcaatctatagataagctcacagcagcagggctggcaaggaaaatcagacgcctggagaaacgtgctctatctagaggcgagcaatttgacccatcatcttttgctcaaaaagagcatactgcaatagcgcactaccactcacttggggagtccagcaaacagacgaaccgcaactttcgactcaatatcaggatgctctcggagcaaccccgtgaggggaactcgatttttagtagctatggcttatcaaattcagaaaactcgtttcagcctgtacccttaatctaatagcattggaagtggataacggatccgcgatcgcggcgcgccacctggtggccggccggtaccacgcgtgcgcgctgatccggctgctaacaaagcccgaaaggaagctgagttggctgctgccaccgctgagcaataactagcataaccccttggggcctctaaacgggtcttgaggggttttttgctgaaaggaggaactatatccggatatccacaggacgggtgtggtcgccatgatcgcgtagtcgatagtggctccaagtagcgaagcgagcaggactgggcggcggccaaagcggtcggacagtgctccgagaacgggtgcgcatagaaattgcatcaacgcatatagcgctagcagcacgccatagtgactggcgatgctgtcggaatggacgatatcccgcaagaggcccggcagtaccggcataaccaagcctatgcctacagcatccagggtgacggtgccgaggatgacgatgagcgcattgttagatttcatacacggtgcctgactgcgttagcaatttaactgtgataaactaccgcattaaagcttatcgatgataagctgtcaaacatgagaa

SEQ ID NO: 910 - DNA, 8463 bp, Synthetic construct
  source 1..8463: mol_type = other DNA
ttcttgaagacgaaagggcctcgtgatacgcctatttttataggttaatgtcatgataataatggtttcttagacgtcaggtggcacttttcggggaaatgtgcgcggaacccctatttgtttatttttctaaatacattcaaatatgtatccgctcatgagacaataaccctgataaatgcttcaataacattgaaaaaggaagagtatgagtattcaacatttccgtgtcgcccttattcccttttttgcggcattttgccttcctgtttttgctcacccagaaacgctggtgaaagtaaaagatgctgaagatcagttgggtgcacgagtgggttacatcgaactggatctcaacagcggtaagatccttgagagttttcgccccgaagaacgttttccaatgatgagcacttttaaagttctgctatgtggcgcggtattatcccgtgttgacgccgggcaagagcaactcggtcgccgcatacactattctcagaatgacttggttgagtactcaccagtcacagaaaagcatcttacggatggcatgacagtaagagaattatgcagtgctgccataaccatgagtgataacactgcggccaacttacttctgacaacgatcggaggaccgaaggagctaaccgcttttttgcacaacatgggggatcatgtaactcgccttgatcgttgggaaccggagctgaatgaagccataccaaacgacgagcgtgacaccacgatgcctgcagcaatggcaacaacgttgcgcaaactattaactggcgaactacttactctagcttcccggcaacaattaatagactggatggaggcggataaagttgcaggaccacttctgcgctcggcccttccggctggctggtttattgctgataaatctggagccggtgagcgtgggtctcgcggtatcattgcagcactggggccagatggtaagccctcccgtatcgtagttatctacacgacggggagtcaggcaactatggatgaacgaaatagacagatcgctgagataggtgcctcactgattaagcattggtaactgtcagaccaagtttactcatatatactttagattgatttaaaacttcatttttaatttaaaaggatctaggtgaagatcctttttgataatctcatgaccaaaatcccttaacgtgagttttcgttccactgagcgtcagaccccgtagaaaagatcaaaggatcttcttgagatcctttttttctgcgcgtaatctgctgcttgcaaacaaaaaaaccaccgctaccagcggtggtttgtttgccggatcaagagctaccaactctttttccgaaggtaactggcttcagcagagcgcagataccaaatactgtccttctagtgtagccgtagttaggccaccacttcaagaactctgtagcaccgcctacatacctcgctctgctaatcctgttaccagtggctgctgccagtggcgataagtcgtgtcttaccgggttggactcaagacgatagttaccggataaggcgcagcggtcgggctgaacggggggttcgtgcacacagcccagcttggagcgaacgacctacaccgaactgagatacctacagcgtgagctatgagaaagcgccacgcttcccgaagggagaaaggcggacaggtatccggtaagcggcagggtcggaacaggagagcgcacgagggagcttccagggggaaacgcctggtatctttatagtcctgtcgggtttcgccacctctgacttgagcgtcgatttttgtgatgctcgtcaggggggcggagcctatggaaaaacgccagcaacgcggcctttttacggttcctggccttttgctggccttttgctcacatgttctttcctgcgttatcccctgattctgtggataaccgtattaccgcctttgagtgagctgataccgctcgccgcagccgaacgaccgagcgcagcgagtcagtgagcgaggaagcggaagagcgcctgatgcggtattttctccttacgcatctgtgcggtatttcacaccgcatatatggtgcactctcagtacaatctgctctgatgccgcatagttaagccagtatacactccgctatcgctacgtgactgggtcatggctgcgccccgacacccgccaacacccgctgacgcgccctgacgggcttgtctgctcccggcatccgcttacagacaagctgtgaccgtctccgggagctgcatgtgtcagaggttttcaccgtcatcaccgaaacgcgcgaggcagctgcggtaaagctcatcagcgtggtcgtgaagcgattcacagatgtctgcctgttcatccgcgtccagctcgttgagtttctccagaagcgttaatgtctggcttctgataaagcgggccatgttaagggcggttttttcctgtttggtcactgatgcctccgtgtaagggggatttctgttcatgggggtaatgataccgatgaaacgagagaggatgctcacgatacgggttactgatgatgaacatgcccggttactggaacgttgtgagggtaaacaactggcggtatggatgcggcgggaccagagaaaaatcactcagggtcaatgccagcgcttcgttaatacagatgtaggtgttccacagggtagccagcagcatcctgcgatgcagatccggaacataatggtgcagggcgctgacttccgcgtttccagactttacgaaacacggaaaccgaagaccattcatgttgttgctcaggtcgcagacgttttgcagcagcagtcgcttcacgttcgctcgcgtatcggtgattcattctgctaaccagtaaggcaaccccgccagcctagccgggtcctcaacgacaggagcacgatcatgcgcacccgtggccaggacccaacgctgcccgagatgcgccgcgtgcggctgctggagatggcggacgcgatggatatgttctgccaagggttggtttgcgcattcacagttctccgcaagaattgattggctccaattcttggagtggtgaatccgttagcgaggtgccgccggcttccattcaggtcgaggtggcccggctccatgcaccgcgacgcaacgcggggaggcagacaaggtatagggcggcgcctacaatccatgccaacccgttccatgtgctcgccgaggcggcataaatcgccgtgacgatcagcggtccagtgatcgaagttaggctggtaagagccgcgagcgatccttgaagctgtccctgatggtcgtcatctacctgcctggacagcatggcctgcaacgcgggcatcccgatgccgccggaagcgagaagaatcataatggggaaggccatccagcctcgcgtcgcgaacgccagcaagacgtagcccagcgcgtcggccgccatgccggcgataatggcctgcttctcgccgaaacgtttggtggcgggaccagtgacgaaggcttgagcgagggcgtgcaagattccgaataccgcaagcgacaggccgatcatcgtcgcgctccagcgaaagcggtcctcgccgaaaatgacccagagcgctgccggcacctgtcctacgagttgcatgataaagaagacagtcataagtgcggcgacgatagtcatgccccgcgcccaccggaaggagctgactgggttgaaggctctcaagggcatcggtcgacgctctcccttatgcgactcctgcattaggaagcagcccagtagtaggttgaggccgttgagcaccgccgccgcaaggaatggtgcatgcaaggagatggcgcccaacagtcccccggccacggggcctgccaccatacccacgccgaaacaagcgctcatgagcccgaagtggcgagcccgatcttccccatcggtgatgtcggcgatataggcgccagcaaccgcacctgtggcgccggtgatgccggccacgatgcgtccggcgtagaggatcgagatctcgatcccgcgaaattaatacgactcactatagggagaccacaacggtttccctctagtgccggctccggagagctctttaattaagcggccgccctgcaggactcgagttctagaaataattttgtttaactttaagaaggagatatacatatgaaatcttctcaccatcaccatcaccatcaccatcaccatggttcttctatgaaaatcgaagaaggtaaactggtaatctggattaacggcgataaaggctataacggtctcgctgaagtcggtaagaaattcgagaaagataccggaattaaagtcaccgttgagcatccggataaactggaagagaaattcccacaggttgcggcaactggcgatggccctgacattatcttctgggcacacgaccgctttggtggctacgctcaatctggcctgttggctgaaatcaccccggacaaagcgttccaggacaagctgtatccgtttacctgggatgccgtacgttacaacggcaagctgattgcttacccgatcgctgttgaagcgttatcgctgatttataacaaagatctgctgccgaacccgccaaaaacctgggaagagatcccggcgctggataaagaactgaaagcgaaaggtaagagcgcgctgatgttcaacctgcaagaaccgtacttcacctggccgctgattgctgctgacgggggttatgcgttcaagtatgaaaacggcaagtacgacattaaagacgtgggcgtggataacgctggcgcgaaagcgggtctgaccttcctggttgacctgattaaaaacaaacacatgaatgcagacaccgattactccatcgcagaagctgcctttaataaaggcgaaacagcgatgaccatcaacggcccgtgggcatggtccaacatcgacaccagcaaagtgaattatggtgtaacggtactgccgaccttcaagggtcaaccatccaaaccgttcgttggcgtgctgagcgcaggtattaacgccgccagtccgaacaaagagctggcaaaagagttcctcgaaaactatctgctgactgatgaaggtctggaagcggttaataaagacaaaccgctgggtgccgtagcgctgaagtcttacgaggaagagttggcgaaagatccacgtattgccgccactatggaaaacgcccagaaaggtgaaatcatgccgaacatcccgcagatgtccgctttctggtatgccgtgcgtactgcggtgatcaacgccgccagcggtcgtcagactgtcgatgaagccctgaaagacgcgcagactaattcgagctcgaacaacaacaacaataacaataacaacaacctcgggatcgaggaaaacctgtacttccaatccaatgcaatgacaagcttacctacgccctcagcaattacgacttcggcgttagagtatgcattccatactcccgctcgcaatctaacgaaatctcgcggaaaaaacattcatcgttatgtcagtgtaaagatgagtaagaggattacggtagaatctactctagagtgtgatgcctgctatcactttgattttgagccaagtattgttcgcttttgcgctcaaccgattcgatttttatattatctcaatggtcagtctcactcctatgttcctgactttctagttcaatttgataccaacgagtttgttctatatgaagtaaagtcagcttatgctaagaacaaacctgattttgatgttgaatgggaggcgaaagtaaaagcagcaactgaactagggctagaattggagcttgttgaagagagtgatattagggatacggttgtattaaataatcttaagcgcatgcatcgttatgcttcgaaagatgagctgaataacgtacataactctctcttaaaaataataaagtacaatggcgcccaatctgcaagatgcttgggagaacagttgggtttaaaaggccgaactgttttaccaattttgtgcgatttgctgtcaaggtgtttactcgatacacgtttggataagcctctatctcttgaatctcgatttgagttggccagttatggctaagaaagggttctcaagtttccatagaaaagcagtctcttcccaagatacgcttgaatcgatagagcttgtctctagcgctaattgtctagaaagtgttacgtatcaagatatatcagcatttcccgaaacaattgcggtagagattaatttccgattaagcattcttcgctttttagcgcgaaagtgcgaaaccattgtggccaaatcaattgaaccacatcgtgtagagctacagcaaaactatagtagaaaaatacccagtgcaataacgatatatcgatggtggcttgcttttcgaaaatcagactacaaccccattagcttagcacctaatatcaaggatagaggtaatagagagacaaaagtgtcaacagttgttgattctattatggaacaggcagttgaaagagttatatctggacgaaaagtcaatgttagctctgcatataaacgtgttcgacgaaaagttcgtcaatacaatctaactcatggaacgaaatacacgtatcctaagtacgaatctgtaagaaagcgagtaaaaaagaaaaccccatttgagttattagccgcagggaaaggggagagagtagctaagagagagtttcgccgaatgggaaaaaagatcctcacgtctagcgtgctagagagggttgaaatagatcacactgtcgttgacctttttgcagtacacgaagagtatcgaatcccattgggccgaccttggcttactcaattggttgattgttacagtaaagctgtaatcggtttttatttaggtttcgagcctcctagctatgtgtcggtttcccttgcacttaagaatgcaatacaacgcaaagatgacttaatctcctcgtatgaatcgatcgagaatgaatggctatgttatggcatcccagacctactcgtaactgataatggtaaagagtttttgtcgaaagcatttgatcaagcatgtgaatcactattgatcaatgtgcatcaaaataaagttgagacgcccgacaacaaacctcatgttgaacgtaactacgggactattaatacttctctgttagacgatttacctgggaaatccttcagccagtaccttcaaagagaagggtacgactctgtgggagaagctacccttacactcaatgagattagagaaatttacttaatttggttggtggatatttatcataaaaaacccaatcagagaggcactaattgtcctaatgttgcgtggaaaaagggttgtcaagaatgggaaccagaggagttctctggttctaaagacgaattagactttaaatttgctattgttgattacaaacaacttactaaagtagggataactgtctacaaagaactgagttatagcaatgaccgtttagctgaatatagagggaagaaaggaaaccataaagttcagttcaagtataaccctgagtgtatggcagttatttgggtgttggatgaggatatgaatgagtactttacagttaatgcgattgactacgaatatgcaagtagagtatcactttggcaacataaatataacatgaaatatcaagcagaactaaattcagcagaatatgatgaggacaaggaaattgatgcagaaataaaaattgaagaaatcgcagatcgttcaattgttaagactaacaaaatcagagctcggaggcgtggcgctaggcatcaagagaatagcgcaagggctaagtcaatcagtaatgcgaacccggcctcgatacaaaaacatgaagatgaaatcgttagtgcagataatgacgattgggatattgattatgtctaatagcattggaagtggataacggatccgcgatcgcggcgcgccacctggtggccggccggtaccacgcgtgcgcgctgatccggctgctaacaaagcccgaaaggaagctgagttggctgctgccaccgctgagcaataactagcataaccccttggggcctctaaacgggtcttgaggggttttttgctgaaaggaggaactatatccggatatccacaggacgggtgtggtcgccatgatcgcgtagtcgatagtggctccaagtagcgaagcgagcaggactgggcggcggccaaagcggtcggacagtgctccgagaacgggtgcgcatagaaattgcatcaacgcatatagcgctagcagcacgccatagtgactggcgatgctgtcggaatggacgatatcccgcaagaggcccggcagtaccggcataaccaagcctatgcctacagcatccagggtgacggtgccgaggatgacgatgagcgcattgttagatttcatacacggtgcctgactgcgttagcaatttaactgtgataaactaccgcattaaagcttatcgatgataagctgtcaaacatgagaa

SEQ ID NO: 911 - DNA, 9467 bp, Synthetic construct
  source 1..9467: mol_type = other DNA
ttcttgaagacgaaagggcctcgtgatacgcctatttttataggttaatgtcatgataataatggtttcttagacgtcaggtggcacttttcggggaaatgtgcgcggaacccctatttgtttatttttctaaatacattcaaatatgtatccgctcatgagacaataaccctgataaatgcttcaataacattgaaaaaggaagagtatgagtattcaacatttccgtgtcgcccttattcccttttttgcggcattttgccttcctgtttttgctcacccagaaacgctggtgaaagtaaaagatgctgaagatcagttgggtgcacgagtgggttacatcgaactggatctcaacagcggtaagatccttgagagttttcgccccgaagaacgttttccaatgatgagcacttttaaagttctgctatgtggcgcggtattatcccgtgttgacgccgggcaagagcaactcggtcgccgcatacactattctcagaatgacttggttgagtactcaccagtcacagaaaagcatcttacggatggcatgacagtaagagaattatgcagtgctgccataaccatgagtgataacactgcggccaacttacttctgacaacgatcggaggaccgaaggagctaaccgcttttttgcacaacatgggggatcatgtaactcgccttgatcgttgggaaccggagctgaatgaagccataccaaacgacgagcgtgacaccacgatgcctgcagcaatggcaacaacgttgcgcaaactattaactggcgaactacttactctagcttcccggcaacaattaatagactggatggaggcggataaagttgcaggaccacttctgcgctcggcccttccggctggctggtttattgctgataaatctggagccggtgagcgtgggtctcgcggtatcattgcagcactggggccagatggtaagccctcccgtatcgtagttatctacacgacggggagtcaggcaactatggatgaacgaaatagacagatcgctgagataggtgcctcactgattaagcattggtaactgtcagaccaagtttactcatatatactttagattgatttaaaacttcatttttaatttaaaaggatctaggtgaagatcctttttgataatctcatgaccaaaatcccttaacgtgagttttcgttccactgagcgtcagaccccgtagaaaagatcaaaggatcttcttgagatcctttttttctgcgcgtaatctgctgcttgcaaacaaaaaaaccaccgctaccagcggtggtttgtttgccggatcaagagctaccaactctttttccgaaggtaactggcttcagcagagcgcagataccaaatactgtccttctagtgtagccgtagttaggccaccacttcaagaactctgtagcaccgcctacatacctcgctctgctaatcctgttaccagtggctgctgccagtggcgataagtcgtgtcttaccgggttggactcaagacgatagttaccggataaggcgcagcggtcgggctgaacggggggttcgtgcacacagcccagcttggagcgaacgacctacaccgaactgagatacctacagcgtgagctatgagaaagcgccacgcttcccgaagggagaaaggcggacaggtatccggtaagcggcagggtcggaacaggagagcgcacgagggagcttccagggggaaacgcctggtatctttatagtcctgtcgggtttcgccacctctgacttgagcgtcgatttttgtgatgctcgtcaggggggcggagcctatggaaaaacgccagcaacgcggcctttttacggttcctggccttttgctggccttttgctcacatgttctttcctgcgttatcccctgattctgtggataaccgtattaccgcctttgagtgagctgataccgctcgccgcagccgaacgaccgagcgcagcgagtcagtgagcgaggaagcggaagagcgcctgatgcggtattttctccttacgcatctgtgcggtatttcacaccgcatatatggtgcactctcagtacaatctgctctgatgccgcatagttaagccagtatacactccgctatcgctacgtgactgggtcatggctgcgccccgacacccgccaacacccgctgacgcgccctgacgggcttgtctgctcccggcatccgcttacagacaagctgtgaccgtctccgggagctgcatgtgtcagaggttttcaccgtcatcaccgaaacgcgcgaggcagctgcggtaaagctcatcagcgtggtcgtgaagcgattcacagatgtctgcctgttcatccgcgtccagctcgttgagtttctccagaagcgttaatgtctggcttctgataaagcgggccatgttaagggcggttttttcctgtttggtcactgatgcctccgtgtaagggggatttctgttcatgggggtaatgataccgatgaaacgagagaggatgctcacgatacgggttactgatgatgaacatgcccggttactggaacgttgtgagggtaaacaactggcggtatggatgcggcgggaccagagaaaaatcactcagggtcaatgccagcgcttcgttaatacagatgtaggtgttccacagggtagccagcagcatcctgcgatgcagatccggaacataatggtgcagggcgctgacttccgcgtttccagactttacgaaacacggaaaccgaagaccattcatgttgttgctcaggtcgcagacgttttgcagcagcagtcgcttcacgttcgctcgcgtatcggtgattcattctgctaaccagtaaggcaaccccgccagcctagccgggtcctcaacgacaggagcacgatcatgcgcacccgtggccaggacccaacgctgcccgagatgcgccgcgtgcggctgctggagatggcggacgcgatggatatgttctgccaagggttggtttgcgcattcacagttctccgcaagaattgattggctccaattcttggagtggtgaatccgttagcgaggtgccgccggcttccattcaggtcgaggtggcccggctccatgcaccgcgacgcaacgcggggaggcagacaaggtatagggcggcgcctacaatccatgccaacccgttccatgtgctcgccgaggcggcataaatcgccgtgacgatcagcggtccagtgatcgaagttaggctggtaagagccgcgagcgatccttgaagctgtccctgatggtcgtcatctacctgcctggacagcatggcctgcaacgcgggcatcccgatgccgccggaagcgagaagaatcataatggggaaggccatccagcctcgcgtcgcgaacgccagcaagacgtagcccagcgcgtcggccgccatgccggcgataatggcctgcttctcgccgaaacgtttggtggcgggaccagtgacgaaggcttgagcgagggcgtgcaagattccgaataccgcaagcgacaggccgatcatcgtcgcgctccagcgaaagcggtcctcgccgaaaatgacccagagcgctgccggcacctgtcctacgagttgcatgataaagaagacagtcataagtgcggcgacgatagtcatgccccgcgcccaccggaaggagctgactgggttgaaggctctcaagggcatcggtcgacgctctcccttatgcgactcctgcattaggaagcagcccagtagtaggttgaggccgttgagcaccgccgccgcaaggaatggtgcatgcaaggagatggcgcccaacagtcccccggccacggggcctgccaccatacccacgccgaaacaagcgctcatgagcccgaagtggcgagcccgatcttccccatcggtgatgtcggcgatataggcgccagcaaccgcacctgtggcgccggtgatgccggccacgatgcgtccggcgtagaggatcgagatctcgatcccgcgaaattaatacgactcactatagggagaccacaacggtttccctctagtgccggctccggagagctctttaattaagcggccgccctgcaggactcgagttctagaaataattttgtttaactttaagaaggagatatacatatgaaatcttctcaccatcaccatcaccatcaccatcaccatggttcttctatgaaaatcgaagaaggtaaactggtaatctggattaacggcgataaaggctataacggtctcgctgaagtcggtaagaaattcgagaaagataccggaattaaagtcaccgttgagcatccggataaactggaagagaaattcccacaggttgcggcaactggcgatggccctgacattatcttctgggcacacgaccgctttggtggctacgctcaatctggcctgttggctgaaatcaccccggacaaagcgttccaggacaagctgtatccgtttacctgggatgccgtacgttacaacggcaagctgattgcttacccgatcgctgttgaagcgttatcgctgatttataacaaagatctgctgccgaacccgccaaaaacctgggaagagatcccggcgctggataaagaactgaaagcgaaaggtaagagcgcgctgatgttcaacctgcaagaaccgtacttcacctggccgctgattgctgctgacgggggttatgcgttcaagtatgaaaacggcaagtacgacattaaagacgtgggcgtggataacgctggcgcgaaagcgggtctgaccttcctggttgacctgattaaaaacaaacacatgaatgcagacaccgattactccatcgcagaagctgcctttaataaaggcgaaacagcgatgaccatcaacggcccgtgggcatggtccaacatcgacaccagcaaagtgaattatggtgtaacggtactgccgaccttcaagggtcaaccatccaaaccgttcgttggcgtgctgagcgcaggtattaacgccgccagtccgaacaaagagctggcaaaagagttcctcgaaaactatctgctgactgatgaaggtctggaagcggttaataaagacaaaccgctgggtgccgtagcgctgaagtcttacgaggaagagttggcgaaagatccacgtattgccgccactatggaaaacgcccagaaaggtgaaatcatgccgaacatcccgcagatgtccgctttctggtatgccgtgcgtactgcggtgatcaacgccgccagcggtcgtcagactgtcgatgaagccctgaaagacgcgcagactaattcgagctcgaacaacaacaacaataacaataacaacaacctcgggatcgaggaaaacctgtacttccaatccaatgcaatgacaagcttacctacgccctcagcaattacgacttcggcgttagagtatgcattccatactcccgctcgcaatctaacgaaatctcgcggaaaaaacattcatcgttatgtcagtgtaaagatgagtaagaggattacggtagaatctactctagagtgtgatgcctgctatcactttgattttgagccaagtattgttcgcttttgcgctcaaccgattcgatttttatattatctcaatggtcagtctcactcctatgttcctgactttctagttcaatttgataccaacgagtttgttctatatgaagtaaagtcagcttatgctaagaacaaacctgattttgatgttgaatgggaggcgaaagtaaaagcagcaactgaactagggctagaattggagcttgttgaagagagtgatattagggatacggttgtattaaataatcttaagcgcatgcatcgttatgcttcgaaagatgagctgaataacgtacataactctctcttaaaaataataaagtacaatggcgcccaatctgcaagatgcttgggagaacagttgggtttaaaaggccgaactgttttaccaattttgtgcgatttgctgtcaaggtgtttactcgatacacgtttggataagcctctatctcttgaatctcgatttgagttggccagttatggctaagaaagggttctcaagtttccatagaaaagcagtctcttcccaagatacgcttgaatcgatagagcttgtctctagcgctaattgtctagaaagtgttacgtatcaagatatatcagcatttcccgaaacaattgcggtagagattaatttccgattaagcattcttcgctttttagcgcgaaagtgcgaaaccattgtggccaaatcaattgaaccacatcgtgtagagctacagcaaaactatagtagaaaaatacccagtgcaataacgatatatcgatggtggcttgcttttcgaaaatcagactacaaccccattagcttagcacctaatatcaaggatagaggtaatagagagacaaaagtgtcaacagttgttgattctattatggaacaggcagttgaaagagttatatctggacgaaaagtcaatgttagctctgcatataaacgtgttcgacgaaaagttcgtcaatacaatctaactcatggaacgaaatacacgtatcctaagtacgaatctgtaagaaagcgagtaaaaaagaaaaccccatttgagttattagccgcagggaaaggggagagagtagctaagagagagtttcgccgaatgggaaaaaagatcctcacgtctagcgtgctagagagggttgaaatagatcacactgtcgttgacctttttgcagtacacgaagagtatcgaatcccattgggccgaccttggcttactcaattggttgattgttacagtaaagctgtaatcggtttttatttaggtttcgagcctcctagctatgtgtcggtttcccttgcacttaagaatgcaatacaacgcaaagatgacttaatctcctcgtatgaatcgatcgagaatgaatggctatgttatggcatcccagacctactcgtaactgataatggtaaagagtttttgtcgaaagcatttgatcaagcatgtgaatcactattgatcaatgtgcatcaaaataaagttgagacgcccgacaacaaacctcatgttgaacgtaactacgggactattaatacttctctgttagacgatttacctgggaaatccttcagccagtaccttcaaagagaagggtacgactctgtgggagaagctacccttacactcaatgagattagagaaatttacttaatttggttggtggatatttatcataaaaaacccaatcagagaggcactaattgtcctaatgttgcgtggaaaaagggttgtcaagaatgggaaccagaggagttctctggttctaaagacgaattagactttaaatttgctattgttgattacaaacaacttactaaagtagggataactgtctacaaagaactgagttatagcaatgaccgtttagctgaatatagagggaagaaaggaaaccataaagttcagttcaagtataaccctgagtgtatggcagttatttgggtgttggatgaggatatgaatgagtactttacagttaatgcgattgactacgaatatgcaagtagagtatcactttggcaacataaatataacatgaaatatcaagcagaactaaattcagcagaatatgatgaggacaaggaaattgatgcagaaataaaaattgaagaaatcgcagatcgttcaattgttaagactaacaaaatcagagctcggaggcgtggcgctaggcatcaagagaatagcgcaagggctaagtcaatcagtaatgcgaacccggcctcgatacaaaaacatgaagatgaaatcgttagtgcagataatgacgattgggatattgattatgtctgagaaatcgtcaaatgagtgaaacgcgtgaggctcgtatatcaagagctaaaagggcatttgtatccacaccgagcgttaggaaaatcttgagttacatggatagatgtagagatctatcagacctagagtctgagcctacatgcatgatggtctatggtgcttcgggtgtaggtaaaacgaccgtcatcaagaaatacttaaatcaaaacagaagagagtccgaagccgggggcgatataataccggttttgcatattgagttgccagacaatgcgaagccagtagatgcagcaagggaattgctggttgaaatgggtgacccgctagcactttatgaaactgacttagctagattgacgaaaagactgactgaattaatccctgcggtcggcgtgaagctgattattatcgatgagttccaacatttggtggaagaaaggtcaaatcgggttcttacccaagtaggtaattggctaaaaatgatacttaacaaaacgaaatgtccaattgttatatttggtatgccatactcaaaagttgtactgcaagcaaactcgcaacttcacgggcgattttccattcaggttgaactgcgcccctttagctaccagggaggtagaggtgtatttaaaacttttttggaataccttgataaagccctaccttttgaaaaacaggctggcttagccaacgaaagtttgcagaaaaaattgtatgcattctctcagggaaacatgcgttcgttgagaaaccttatttatcaagcatctatcgaagcaattgataatcagcatgagacgataaccgaagaagatttcgtttttgcatcgaagttgacatcgggcgataaacccaactcatggaaaaatccttttgaggagggtgttgaggtaacagaagatatgttacgaccgccaccaaaagatattggttgggaggactatttgagacattcaaccccgagagtgagtaaaccaggtagaaataaaaactttttcgaataatagcattggaagtggataacggatccgcgatcgcggcgcgccacctggtggccggccggtaccacgcgtgcgcgctgatccggctgctaacaaagcccgaaaggaagctgagttggctgctgccaccgctgagcaataactagcataaccccttggggcctctaaacgggtcttgaggggttttttgctgaaaggaggaactatatccggatatccacaggacgggtgtggtcgccatgatcgcgtagtcgatagtggctccaagtagcgaagcgagcaggactgggcggcggccaaagcggtcggacagtgctccgagaacgggtgcgcatagaaattgcatcaacgcatatagcgctagcagcacgccatagtgactggcgatgctgtcggaatggacgatatcccgcaagaggcccggcagtaccggcataaccaagcctatgcctacagcatccagggtgacggtgccgaggatgacgatgagcgcattgttagatttcatacacggtgcctgactgcgttagcaatttaactgtgataaactaccgcattaaagcttatcgatgataagctgtcaaacatgagaa

SEQ ID NO: 912-915 - skipped (4 entries)

SEQ ID NO: 916 - DNA, 74 bp, Synthetic construct
  source 1..74: mol_type = other DNA
ttcatcaagccattggaccgccttacaggacgctttggcttcattgcttttcagcttcgccttgacggccaaaa

SEQ ID NO: 917 - DNA, 74 bp, Synthetic construct
  source 1..74: mol_type = other DNA
ttttggccgtcaaggcgaagctgaaaagcaatgaagccaaagcgtcctgtaaggcggtccaatggcttgatgaa

SEQ ID NO: 918 - DNA, 10896 bp, Synthetic construct
  source 1..10896: mol_type = other DNA
atcttaccgctgttgagatccagttcgatgtaacccactcgtgcacccaactgatcttcagcatcttttactttcaccagcgtttctgggtgagcaaaaacaggaaggcaaaatgccgcaaaaaagggaataagggcgacacggaaatgttgaatactcatactcttcctttttcaatattattgaagcatttatcagggttattgtctcatgagcggatacatatttgaatgtatttagaaaaataaacaaataggggttccgcgcacatttccccgaaaagtgccacctgacgtcgacggatcgggagatctcccgatcccctatggtgcactctcagtacaatctgctctgatgccgcatagttaagccagtatctgctccctgcttgtgtgttggagggcctatttcccatgattccttcatatttgcatatacgatacaaggctgttagagagataattagaattaatttgactgtaaacacaaagatattagtacaaaatacgtgacgtagaaagtaataatttcttgggtagtttgcagttttaaaattatgttttaaaatggactatcatatgcttaccgtaacttgaaagtatttcgatttcttggctttatatatcttgtggaaaggacgaaacaccgtaatacgactcactatagggtctagaattcctgtgaactgccgagtaggtagctgataactgctcggctggctctcggtttctctgctttccgtgaactgccgagtaggtagctgataacgttgcagcggccgctttttttcttctgaggcggaaagaaccagctggggctctagggggtatccccacgcgccctgtagcggcgaggtcgctgagtagtgcgcgagcaaaatttaagctacaacaaggcaaggcttgaccgacaattgcatgaagaatctgcttagggttaggcgttttgcgctgcttcgcgatgtacgggccagatatacgcgttgacattgattattgactagttattaatagtaatcaattacggggtcattagttcatagcccatatatggagttccgcgttacataacttacggtaaatggcccgcctggctgaccgcccaacgacccccgcccattgacgtcaataatgacgtatgttcccatagtaacgccaatagggactttccattgacgtcaatgggtggagtatttacggtaaactgcccacttggcagtacatcaagtgtatcatatgccaagtacgccccctattgacgtcaatgacggtaaatggcccgcctggcattatgcccagtacatgaccttatgggactttcctacttggcagtacatctacgtattagtcatcgctattaccatggtgatgcggttttggcagtacatcaatgggcgtggatagcggtttgactcacggggatttccaagtctccaccccattgacgtcaatgggagtttgttttggcaccaaaatcaacgggactttccaaaatgtcgtaacaactccgccccattgacgcaaatgggcggtaggcgtgtacggtgggaggtctatataagcagagctctctggctaactagagaacccactgcttactggcttatcgaaattaatacgactcactatagggagacccaagctggctagcgtttaaacttaagcttgccaccatggggcccaagaagaaaaggaaggtcggctcagccatgaagctgccaaccaacctggcctacgagcggagcatcgaccccagcgacgtgtgcttcttcgtggtgtggccagacgataggaaaacccccctgacatacaattcccgcacactgctgggacagatggaggcagccagcctggcatacgacgtgtccggccagcctatcaagtctgccaccgcagaggccctggcacagggcaaccctcaccaggtggatttctgccatgtgccatacggcgccagccacatcgagtgtagcttctccgtgtcttttagctccgagctgcggcagccatataagtgtaattctagcaaggtgaagcagacactggtgcagctggtggagctgtacgaaaccaagatcggctggacagagctggccacccggtatctgatgaatatctgcaacggcaagtggctgtggaagaatacaagaaaggcctactgttggaacatcgtgctgaccccctggccttggaatggcgagaaagtgggcttcgaggacatcaggaccaactatacatcccgccaggacttcaagaacaataagaattggtctgccatcgtggagatgatcaagacagccttctcctctaccgacggcctggccatctttgaggtgagggccacactgcacctgccaaccaacgcaatggtgcgccctagccaggtgttcacagagaaggagagcggctccaagtctaagagcaagacccagaactctagggtgttccagagcaccacaatcgatggagagcggagcccaatcctgggagcctttaagacaggcgccgccatcgccaccatcgacgattggtatccagaggcaaccgagcctctgagggtgggccgctttggagtgcacagggaggacgtgacatgctacagacacccatctaccggcaaggatttctttagcatcctccagcaggccgagcactatatcgaggtgctgagtgccaacaagacacccgcccaggaaaccatcaatgacatgcacttcctgatggccaacctgatcaagggcggcatgtttcagcacaagggcgacgggtccggagagggaaggggctctctgctgacctgcggcgacgtggaggagaaccctggacctggaccgaaaaagaagcgaaaagttggatccggcatgttcctccagaggccaaagccctacagcgacgagtccctggagtctttctttatcagagtggccaataagaacggctatggcgatgtgcacaggttcctggaggccaccaagcggttcctccaggacatcgatcacaacggctaccagacctttccaacagacatcaccaggatcaatccctatagcgccaagaacagctcctctgcccgcacagcctccttcctgaagctggcccagctgacctttaatgagccacctgagctgctgggactggccatcaatcggacaaacatgaagtactccccttctaccagcgccgtggtgagaggagcagaggtgttcccacggtccctgctgagaacccacagcatcccatgctgtcccctgtgcctgagagagaacggctacgccagctatctgtggcacttccagggctacgagtattgtcactcccacaatgtgcctctgatcaccacatgctcttgtggcaaggagtttgactacagggtgagcggcctgaagggcatctgctgtaagtgcaaggagccaatcaccctgacaagccgcgagaatggccacgaggccgcctgtaccgtgtccaactggctggccggccacgagtctaagcctctgccaaacctgcccaagtcctatagatggggactggtgcactggtggatgggcatcaaggactccgagttcgatcacttctcttttgtgcagttctttagcaactggcctcggagcttccactccatcatcgaggacgaggtggagtttaatctggagcacgccgtggtgtccacctctgagctgcggctgaaggatctgctgggcagactgttctttggcagcatcaggctgccagagcgcaatctccagcacaacatcatcctgggcgagctgctgtgctacctggagaaccgcctgtggcaggacaagggcctgatcgccaatctgaagatgaacgccctggaggccacagtgatgctgaattgttccctggatcagatcgcctctatggtggagcagcgcatcctgaagcccaatagaaagtccaagcctaactctccactggacgtgaccgattacctgttccactttggcgacatcttctgcctgtggctggccgagtttcagtccgatgagttcaaccggagcttctacgtgagccggtggggctcgagcgagggaaggggctccctgctgacttgtggcgacgtggaggagaaccctggacctagcccaaaaaagaaacgcaaggtgggcaccggtgtgaagtggtactataagaccatcacattcctgcctgagctgtgcaacaatgagtctctggcagcaaagtgtctgcgggtgctgcacggcttcaattaccagtatgagacaagaaacatcggcgtgtcctttccactgtggtgcgacgccaccgtgggcaagaagatctctttcgtgagcaagaacaagatcgagctggatctgctgctgaagcagcactacttcgtgcagatggagcagctccagtattttcacatcagcaatacagtgctggtgcccgaggactgcacctacgtgagctttcggagatgtcagtccatcgataagctgaccgcagcaggactggcaagaaagatcaggcgcctggagaagcgggccctgtccagaggcgagcagttcgacccatctagctttgcccagaaggagcacacagccatcgcccactaccactctctgggcgagtcctctaagcagaccaatcggaacttcagactgaacatcaggatgctgagtgagcagccaagggagggcaattccatcttcagctcctatggcctgagcaattccgagaactcttttcagcccgtgcctctgatcggtaaccaggagggaagaggctccctgctgacatgtggcgacgtggaagaaaaccctggacctggccctaaaaaaaagcggaaggtaggtaccggcatgcagaccctgaaggagctgatcgccagcaaccccgacgatctgaccacagagctgaagagggccttccgccccctgacacctcacatcgccatcgacggcaatgagctggatgccctgaccatcctggtgaacctgacagacaagaccgacgatcagaaggacctgctggatcgggccaagtgtaagcagaagctgagagatgagaagtggtgggcctcctgcatcaactgcgtgaactacaggcagtctcacaacccaaagttccccgacatccgcagcgagggcgtgatcagaacacaggccctgggcgagctgcccagctttctgctgtctagctccaagatcccaccctaccactggtcttatagccacgactctaagtatgtgaataagagcgccttcctgaccaacgagttttgctgggatggcgagatcagctgtctgggcgagctgctgaaggacgccgatcaccctctgtggaacacactgaagaagctgggctgctcccagaaaacctgtaaggcaatggccaagcagctggccgacatcacactgaccacaatcaatgtgaccctggcccccaactacctgacacagatctctctgcctgactccgatacatcttatatctccctgtctcctgtggccagcctgtccatgcagagccacttccaccagaggctccaggatgagaacaggcactccgccatcacccggttcagccggaccacaaatatgggagtgacagcaatgacctgcggaggagccttcaggatgctgaaaagcggcgccaagttttctagccctccacaccaccggctgaacagcaagagatcctggctgacctccgagcatgtgcagtctctgaagcagtaccagcggctgaataagagcctgatcccagagaactccagaatcgccctgcggagaaagtataagatcgagctgcaaaatatggtgcgctcttggttcgccatgcaggaccacacactggatagcaatatcctgatccagcacctgaaccacgacctgtcctacctgggcgccaccaagcggttcgcctatgatcccgccatgacaaagctgtttaccgagctgctgaagagagagctgtctaacagcatcaacaatggcgagcagcacaccaatggcagctttctggtgctgcctaacatcagagtgtgcggagcaaccgccctgtcctctcctgtgacagtgggcatcccatccctgaccgccttctttggcttcgtgcacgcctttgagaggaatatcaaccgcaccacaagctccttcagggtggagagctttgccatctgcgtgcaccagctgcatgtggagaagcgcggcctgacagccgagttcgtggagaagggcgacggaacaatctccgccccagcaaccagggacgattggcagtgtgatgtggtgttctctctgatcctgaataccaactttgcccagcacatcgaccaggatacactcgtcacctctctgccaaagaggctggcaaggggaagcgccaagatcgccatcgacgatttcaagcacatcaactccttttctacactggaaaccgcaatcgagagcctgccaatcgaggcaggcagatggctgagtctgtacgcccagtccaacaataacctgtctgacctgctggccgccatgacagaggatcaccagctgatggccagctgcgtgggctaccacctgctggaggagcctaaagacaagccaaactccctcagaggctataagcacgccatcgccgagtgtatcatcggcctgatcaattccatcaccttctctagcgagacagatcccaacaccatcttttggagcctgaagaattaccagaactatctggtggtgcagcctcgctccatcaatgacgaaaccaccgataagtcctctctgtgatctagagggcccgtttaaacccgctgatcagcctcgactgtgccttctagttgccagccatctgttgtttgcccctcccccgtgccttccttgaccctggaaggtgccactcccactgtcctttcctaataaaatgaggaaattgcatcgcattgtctgagtaggtgtcattctattctggggggtggggtggggcaggacagcaagggggaggattgggaaagacaatagcaggcatgctggggatgcggtgggctctatggcttctgaggcggaaagaaccagctggggctctagggggtatccccacgcgccctgtagcggcgcattaagcgcggcgggtgtggtggttacgcgcagcgtgaccgctacacttgccagcgccctagcgcccgctcctttcgctttcttcccttcctttctcgccacgttcgccggctttccccgtcaagctctaaatcgggggctccctttagggttccgatttagtgctttacggcacctcgaccccaaaaaacttgattagggtgatggttcacgtagtgggccatcgccctgatagacggtttttcgccctttgacgttggagtccacgttctttaatagtggactcttgttccaaactggaacaacactcaaccctatctcggtctattcttttgatttataagggattttgccgatttcggcctattggttaaaaaatgagctgatttaacaaaaatttaacgcgaattaattctgtggaatgtgtgtcagttagggtgtggaaagtccccaggctccccagcaggcagaagtatgcaaagcatgcatctcaattagtcagcaaccaggtgtggaaagtccccaggctccccagcaggcagaagtatgcaaagcatgcatctcaattagtcagcaaccatagtcccgcccctaactccgcccatcccgcccctaactccgcccagttccgcccattctccgccccatggctgactaattttttttatttatgcagaggccgaggccgcctctgcctctgagctattccagaagtagtgaggaggcttttttggaggcctaggcttttgcaaaaagctcccgggagcttgtatatccattttcggatctgatcaagagacaggatgaggatcgtttcgcatgattgaacaagatggattgcacgcaggttctccggccgcttgggtggagaggctattcggctatgactgggcacaacagacaatcggctgctctgatgccgccgtgttccggctgtcagcgcaggggcgcccggttctttttgtcaagaccgacctgtccggtgccctgaatgaactgcaggacgaggcagcgcggctatcgtggctggccacgacgggcgttccttgcgcagctgtgctcgacgttgtcactgaagcgggaagggactggctgctattgggcgaagtgccggggcaggatctcctgtcatctcaccttgctcctgccgagaaagtatccatcatggctgatgcaatgcggcggctgcatacgcttgatccggctacctgcccattcgaccaccaagcgaaacatcgcatcgagcgagcacgtactcggatggaagccggtcttgtcgatcaggatgatctggacgaagagcatcaggggctcgcgccagccgaactgttcgccaggctcaaggcgcgcatgcccgacggcgaggatctcgtcgtgacccatggcgatgcctgcttgccgaatatcatggtggaaaatggccgcttttctggattcatcgactgtggccggctgggtgtggcggaccgctatcaggacatagcgttggctacccgtgatattgctgaagagcttggcggcgaatgggctgaccgcttcctcgtgctttacggtatcgccgctcccgattcgcagcgcatcgccttctatcgccttcttgacgagttcttctgagcgggactctggggttcgaaatgaccgaccaagcgacgcccaacctgccatcacgagatttcgattccaccgccgccttctatgaaaggttgggcttcggaatcgttttccgggacgccggctggatgatcctccagcgcggggatctcatgctggagttcttcgcccaccccaacttgtttattgcagcttataatggttacaaataaagcaatagcatcacaaatttcacaaataaagcatttttttcactgcattctagttgtggtttgtccaaactcatcaatgtatcttatcatgtctgtataccgtcgacctctagctagagcttggcgtaatcatggtcatagctgtttcctgtgtgaaattgttatccgctcacaattccacacaacatacgagccggaagcataaagtgtaaagcctggggtgcctaatgagtgagctaactcacattaattgcgttgcgctcactgcccgctttccagtcgggaaacctgtcgtgccagctgcattaatgaatcggccaacgcgcggggagaggcggtttgcgtattgggcgctcttccgcttcctcgctcactgactcgctgcgctcggtcgttcggctgcggcgagcggtatcagctcactcaaaggcggtaatacggttatccacagaatcaggggataacgcaggaaagaacatgtgagcaaaaggccagcaaaaggccaggaaccgtaaaaaggccgcgttgctggcgtttttccataggctccgcccccctgacgagcatcacaaaaatcgacgctcaagtcagaggtggcgaaacccgacaggactataaagataccaggcgtttccccctggaagctccctcgtgcgctctcctgttccgaccctgccgcttaccggatacctgtccgcctttctcccttcgggaagcgtggcgctttctcatagctcacgctgtaggtatctcagttcggtgtaggtcgttcgctccaagctgggctgtgtgcacgaaccccccgttcagcccgaccgctgcgccttatccggtaactatcgtcttgagtccaacccggtaagacacgacttatcgccactggcagcagccactggtaacaggattagcagagcgaggtatgtaggcggtgctacagagttcttgaagtggtggcctaactacggctacactagaagaacagtatttggtatctgcgctctgctgaagccagttaccttcggaaaaagagttggtagctcttgatccggcaaacaaaccaccgctggtagcggtttttttgtttgcaagcagcagattacgcgcagaaaaaaaggatctcaagaagatcctttgatcttttctacggggtctgacgctcagtggaacgaaaactcacgttaagggattttggtcatgagattatcaaaaaggatcttcacctagatccttttaaattaaaaatgaagttttaaatcaatctaaagtatatatgagtaaacttggtctgacagttaccaatgcttaatcagtgaggcacctatctcagcgatctgtctatttcgttcatccatagttgcctgactccccgtcgtgtagataactacgatacgggagggcttaccatctggccccagtgctgcaatgataccgcgagacccacgctcaccggctccagatttatcagcaataaaccagccagccggaagggccgagcgcagaagtggtcctgcaactttatccgcctccatccagtctattaattgttgccgggaagctagagtaagtagttcgccagttaatagtttgcgcaacgttgttgccattgctacaggcatcgtggtgtcacgctcgtcgtttggtatggcttcattcagctccggttcccaacgatcaaggcgagttacatgatcccccatgttgtgcaaaaaagcggttagctccttcggtcctccgatcgttgtcagaagtaagttggccgcagtgttatcactcatggttatggcagcactgcataattctcttactgtcatgccatccgtaagatgcttttctgtgactggtgagtactcaaccaagtcattctgagaatagtgtatgcggcgaccgagttgctcttgcccggcgtcaatacgggataataccgcgccacatagcagaactttaaaagtgctcatcattggaaaacgttcttcggggcgaaaactctcaagg

SEQ ID NO: 919 - DNA, 10896 bp, Synthetic construct
  source 1..10896: mol_type = other DNA
atcttaccgctgttgagatccagttcgatgtaacccactcgtgcacccaactgatcttcagcatcttttactttcaccagcgtttctgggtgagcaaaaacaggaaggcaaaatgccgcaaaaaagggaataagggcgacacggaaatgttgaatactcatactcttcctttttcaatattattgaagcatttatcagggttattgtctcatgagcggatacatatttgaatgtatttagaaaaataaacaaataggggttccgcgcacatttccccgaaaagtgccacctgacgtcgacggatcgggagatctcccgatcccctatggtgcactctcagtacaatctgctctgatgccgcatagttaagccagtatctgctccctgcttgtgtgttggagggcctatttcccatgattccttcatatttgcatatacgatacaaggctgttagagagataattagaattaatttgactgtaaacacaaagatattagtacaaaatacgtgacgtagaaagtaataatttcttgggtagtttgcagttttaaaattatgttttaaaatggactatcatatgcttaccgtaacttgaaagtatttcgatttcttggctttatatatcttgtggaaaggacgaaacaccgtaatacgactcactatagggtctagaattcctgtgaactgccgagtaggtagctgataactgcagcactggatgctttgtgagttggggattgtgaactgccgagtaggtagctgataacgttgcagcggccgctttttttcttctgaggcggaaagaaccagctggggctctagggggtatccccacgcgccctgtagcggcgaggtcgctgagtagtgcgcgagcaaaatttaagctacaacaaggcaaggcttgaccgacaattgcatgaagaatctgcttagggttaggcgttttgcgctgcttcgcgatgtacgggccagatatacgcgttgacattgattattgactagttattaatagtaatcaattacggggtcattagttcatagcccatatatggagttccgcgttacataacttacggtaaatggcccgcctggctgaccgcccaacgacccccgcccattgacgtcaataatgacgtatgttcccatagtaacgccaatagggactttccattgacgtcaatgggtggagtatttacggtaaactgcccacttggcagtacatcaagtgtatcatatgccaagtacgccccctattgacgtcaatgacggtaaatggcccgcctggcattatgcccagtacatgaccttatgggactttcctacttggcagtacatctacgtattagtcatcgctattaccatggtgatgcggttttggcagtacatcaatgggcgtggatagcggtttgactcacggggatttccaagtctccaccccattgacgtcaatgggagtttgttttggcaccaaaatcaacgggactttccaaaatgtcgtaacaactccgccccattgacgcaaatgggcggtaggcgtgtacggtgggaggtctatataagcagagctctctggctaactagagaacccactgcttactggcttatcgaaattaatacgactcactatagggagacccaagctggctagcgtttaaacttaagcttgccaccatggggcccaagaagaaaaggaaggtcggctcagccatgaagctgccaaccaacctggcctacgagcggagcatcgaccccagcgacgtgtgcttcttcgtggtgtggccagacgataggaaaacccccctgacatacaattcccgcacactgctgggacagatggaggcagccagcctggcatacgacgtgtccggccagcctatcaagtctgccaccgcagaggccctggcacagggcaaccctcaccaggtggatttctgccatgtgccatacggcgccagccacatcgagtgtagcttctccgtgtcttttagctccgagctgcggcagccatataagtgtaattctagcaaggtgaagcagacactggtgcagctggtggagctgtacgaaaccaagatcggctggacagagctggccacccggtatctgatgaatatctgcaacggcaagtggctgtggaagaatacaagaaaggcctactgttggaacatcgtgctgaccccctggccttggaatggcgagaaagtgggcttcgaggacatcaggaccaactatacatcccgccaggacttcaagaacaataagaattggtctgccatcgtggagatgatcaagacagccttctcctctaccgacggcctggccatctttgaggtgagggccacactgcacctgccaaccaacgcaatggtgcgccctagccaggtgttcacagagaaggagagcggctccaagtctaagagcaagacccagaactctagggtgttccagagcaccacaatcgatggagagcggagcccaatcctgggagcctttaagacaggcgccgccatcgccaccatcgacgattggtatccagaggcaaccgagcctctgagggtgggccgctttggagtgcacagggaggacgtgacatgctacagacacccatctaccggcaaggatttctttagcatcctccagcaggccgagcactatatcgaggtgctgagtgccaacaagacacccgcccaggaaaccatcaatgacatgcacttcctgatggccaacctgatcaagggcggcatgtttcagcacaagggcgacgggtccggagagggaaggggctctctgctgacctgcggcgacgtggaggagaaccctggacctggaccgaaaaagaagcgaaaagttggatccggcatgttcctccagaggccaaagccctacagcgacgagtccctggagtctttctttatcagagtggccaataagaacggctatggcgatgtgcacaggttcctggaggccaccaagcggttcctccaggacatcgatcacaacggctaccagacctttccaacagacatcaccaggatcaatccctatagcgccaagaacagctcctctgcccgcacagcctccttcctgaagctggcccagctgacctttaatgagccacctgagctgctgggactggccatcaatcggacaaacatgaagtactccccttctaccagcgccgtggtgagaggagcagaggtgttcccacggtccctgctgagaacccacagcatcccatgctgtcccctgtgcctgagagagaacggctacgccagctatctgtggcacttccagggctacgagtattgtcactcccacaatgtgcctctgatcaccacatgctcttgtggcaaggagtttgactacagggtgagcggcctgaagggcatctgctgtaagtgcaaggagccaatcaccctgacaagccgcgagaatggccacgaggccgcctgtaccgtgtccaactggctggccggccacgagtctaagcctctgccaaacctgcccaagtcctatagatggggactggtgcactggtggatgggcatcaaggactccgagttcgatcacttctcttttgtgcagttctttagcaactggcctcggagcttccactccatcatcgaggacgaggtggagtttaatctggagcacgccgtggtgtccacctctgagctgcggctgaaggatctgctgggcagactgttctttggcagcatcaggctgccagagcgcaatctccagcacaacatcatcctgggcgagctgctgtgctacctggagaaccgcctgtggcaggacaagggcctgatcgccaatctgaagatgaacgccctggaggccacagtgatgctgaattgttccctggatcagatcgcctctatggtggagcagcgcatcctgaagcccaatagaaagtccaagcctaactctccactggacgtgaccgattacctgttccactttggcgacatcttctgcctgtggctggccgagtttcagtccgatgagttcaaccggagcttctacgtgagccggtggggctcgagcgagggaaggggctccctgctgacttgtggcgacgtggaggagaaccctggacctagcccaaaaaagaaacgcaaggtgggcaccggtgtgaagtggtactataagaccatcacattcctgcctgagctgtgcaacaatgagtctctggcagcaaagtgtctgcgggtgctgcacggcttcaattaccagtatgagacaagaaacatcggcgtgtcctttccactgtggtgcgacgccaccgtgggcaagaagatctctttcgtgagcaagaacaagatcgagctggatctgctgctgaagcagcactacttcgtgcagatggagcagctccagtattttcacatcagcaatacagtgctggtgcccgaggactgcacctacgtgagctttcggagatgtcagtccatcgataagctgaccgcagcaggactggcaagaaagatcaggcgcctggagaagcgggccctgtccagaggcgagcagttcgacccatctagctttgcccagaaggagcacacagccatcgcccactaccactctctgggcgagtcctctaagcagaccaatcggaacttcagactgaacatcaggatgctgagtgagcagccaagggagggcaattccatcttcagctcctatggcctgagcaattccgagaactcttttcagcccgtgcctctgatcggtaaccaggagggaagaggctccctgctgacatgtggcgacgtggaagaaaaccctggacctggccctaaaaaaaagcggaaggtaggtaccggcatgcagaccctgaaggagctgatcgccagcaaccccgacgatctgaccacagagctgaagagggccttccgccccctgacacctcacatcgccatcgacggcaatgagctggatgccctgaccatcctggtgaacctgacagacaagaccgacgatcagaaggacctgctggatcgggccaagtgtaagcagaagctgagagatgagaagtggtgggcctcctgcatcaactgcgtgaactacaggcagtctcacaacccaaagttccccgacatccgcagcgagggcgtgatcagaacacaggccctgggcgagctgcccagctttctgctgtctagctccaagatcccaccctaccactggtcttatagccacgactctaagtatgtgaataagagcgccttcctgaccaacgagttttgctgggatggcgagatcagctgtctgggcgagctgctgaaggacgccgatcaccctctgtggaacacactgaagaagctgggctgctcccagaaaacctgtaaggcaatggccaagcagctggccgacatcacactgaccacaatcaatgtgaccctggcccccaactacctgacacagatctctctgcctgactccgatacatcttatatctccctgtctcctgtggccagcctgtccatgcagagccacttccaccagaggctccaggatgagaacaggcactccgccatcacccggttcagccggaccacaaatatgggagtgacagcaatgacctgcggaggagccttcaggatgctgaaaagcggcgccaagttttctagccctccacaccaccggctgaacagcaagagatcctggctgacctccgagcatgtgcagtctctgaagcagtaccagcggctgaataagagcctgatcccagagaactccagaatcgccctgcggagaaagtataagatcgagctgcaaaatatggtgcgctcttggttcgccatgcaggaccacacactggatagcaatatcctgatccagcacctgaaccacgacctgtcctacctgggcgccaccaagcggttcgcctatgatcccgccatgacaaagctgtttaccgagctgctgaagagagagctgtctaacagcatcaacaatggcgagcagcacaccaatggcagctttctggtgctgcctaacatcagagtgtgcggagcaaccgccctgtcctctcctgtgacagtgggcatcccatccctgaccgccttctttggcttcgtgcacgcctttgagaggaatatcaaccgcaccacaagctccttcagggtggagagctttgccatctgcgtgcaccagctgcatgtggagaagcgcggcctgacagccgagttcgtggagaagggcgacggaacaatctccgccccagcaaccagggacgattggcagtgtgatgtggtgttctctctgatcctgaataccaactttgcccagcacatcgaccaggatacactcgtcacctctctgccaaagaggctggcaaggggaagcgccaagatcgccatcgacgatttcaagcacatcaactccttttctacactggaaaccgcaatcgagagcctgccaatcgaggcaggcagatggctgagtctgtacgcccagtccaacaataacctgtctgacctgctggccgccatgacagaggatcaccagctgatggccagctgcgtgggctaccacctgctggaggagcctaaagacaagccaaactccctcagaggctataagcacgccatcgccgagtgtatcatcggcctgatcaattccatcaccttctctagcgagacagatcccaacaccatcttttggagcctgaagaattaccagaactatctggtggtgcagcctcgctccatcaatgacgaaaccaccgataagtcctctctgtgatctagagggcccgtttaaacccgctgatcagcctcgactgtgccttctagttgccagccatctgttgtttgcccctcccccgtgccttccttgaccctggaaggtgccactcccactgtcctttcctaataaaatgaggaaattgcatcgcattgtctgagtaggtgtcattctattctggggggtggggtggggcaggacagcaagggggaggattgggaaagacaatagcaggcatgctggggatgcggtgggctctatggcttctgaggcggaaagaaccagctggggctctagggggtatccccacgcgccctgtagcggcgcattaagcgcggcgggtgtggtggttacgcgcagcgtgaccgctacacttgccagcgccctagcgcccgctcctttcgctttcttcccttcctttctcgccacgttcgccggctttccccgtcaagctctaaatcgggggctccctttagggttccgatttagtgctttacggcacctcgaccccaaaaaacttgattagggtgatggttcacgtagtgggccatcgccctgatagacggtttttcgccctttgacgttggagtccacgttctttaatagtggactcttgttccaaactggaacaacactcaaccctatctcggtctattcttttgatttataagggattttgccgatttcggcctattggttaaaaaatgagctgatttaacaaaaatttaacgcgaattaattctgtggaatgtgtgtcagttagggtgtggaaagtccccaggctccccagcaggcagaagtatgcaaagcatgcatctcaattagtcagcaaccaggtgtggaaagtccccaggctccccagcaggcagaagtatgcaaagcatgcatctcaattagtcagcaaccatagtcccgcccctaactccgcccatcccgcccctaactccgcccagttccgcccattctccgccccatggctgactaattttttttatttatgcagaggccgaggccgcctctgcctctgagctattccagaagtagtgaggaggcttttttggaggcctaggcttttgcaaaaagctcccgggagcttgtatatccattttcggatctgatcaagagacaggatgaggatcgtttcgcatgattgaacaagatggattgcacgcaggttctccggccgcttgggtggagaggctattcggctatgactgggcacaacagacaatcggctgctctgatgccgccgtgttccggctgtcagcgcaggggcgcccggttctttttgtcaagaccgacctgtccggtgccctgaatgaactgcaggacgaggcagcgcggctatcgtggctggccacgacgggcgttccttgcgcagctgtgctcgacgttgtcactgaagcgggaagggactggctgctattgggcgaagtgccggggcaggatctcctgtcatctcaccttgctcctgccgagaaagtatccatcatggctgatgcaatgcggcggctgcatacgcttgatccggctacctgcccattcgaccaccaagcgaaacatcgcatcgagcgagcacgtactcggatggaagccggtcttgtcgatcaggatgatctggacgaagagcatcaggggctcgcgccagccgaactgttcgccaggctcaaggcgcgcatgcccgacggcgaggatctcgtcgtgacccatggcgatgcctgcttgccgaatatcatggtggaaaatggccgcttttctggattcatcgactgtggccggctgggtgtggcggaccgctatcaggacatagcgttggctacccgtgatattgctgaagagcttggcggcgaatgggctgaccgcttcctcgtgctttacggtatcgccgctcccgattcgcagcgcatcgccttctatcgccttcttgacgagttcttctgagcgggactctggggttcgaaatgaccgaccaagcgacgcccaacctgccatcacgagatttcgattccaccgccgccttctatgaaaggttgggcttcggaatcgttttccgggacgccggctggatgatcctccagcgcggggatctcatgctggagttcttcgcccaccccaacttgtttattgcagcttataatggttacaaataaagcaatagcatcacaaatttcacaaataaagcatttttttcactgcattctagttgtggtttgtccaaactcatcaatgtatcttatcatgtctgtataccgtcgacctctagctagagcttggcgtaatcatggtcatagctgtttcctgtgtgaaattgttatccgctcacaattccacacaacatacgagccggaagcataaagtgtaaagcctggggtgcctaatgagtgagctaactcacattaattgcgttgcgctcactgcccgctttccagtcgggaaacctgtcgtgccagctgcattaatgaatcggccaacgcgcggggagaggcggtttgcgtattgggcgctcttccgcttcctcgctcactgactcgctgcgctcggtcgttcggctgcggcgagcggtatcagctcactcaaaggcggtaatacggttatccacagaatcaggggataacgcaggaaagaacatgtgagcaaaaggccagcaaaaggccaggaaccgtaaaaaggccgcgttgctggcgtttttccataggctccgcccccctgacgagcatcacaaaaatcgacgctcaagtcagaggtggcgaaacccgacaggactataaagataccaggcgtttccccctggaagctccctcgtgcgctctcctgttccgaccctgccgcttaccggatacctgtccgcctttctcccttcgggaagcgtggcgctttctcatagctcacgctgtaggtatctcagttcggtgtaggtcgttcgctccaagctgggctgtgtgcacgaaccccccgttcagcccgaccgctgcgccttatccggtaactatcgtcttgagtccaacccggtaagacacgacttatcgccactggcagcagccactggtaacaggattagcagagcgaggtatgtaggcggtgctacagagttcttgaagtggtggcctaactacggctacactagaagaacagtatttggtatctgcgctctgctgaagccagttaccttcggaaaaagagttggtagctcttgatccggcaaacaaaccaccgctggtagcggtttttttgtttgcaagcagcagattacgcgcagaaaaaaaggatctcaagaagatcctttgatcttttctacggggtctgacgctcagtggaacgaaaactcacgttaagggattttggtcatgagattatcaaaaaggatcttcacctagatccttttaaattaaaaatgaagttttaaatcaatctaaagtatatatgagtaaacttggtctgacagttaccaatgcttaatcagtgaggcacctatctcagcgatctgtctatttcgttcatccatagttgcctgactccccgtcgtgtagataactacgatacgggagggcttaccatctggccccagtgctgcaatgataccgcgagacccacgctcaccggctccagatttatcagcaataaaccagccagccggaagggccgagcgcagaagtggtcctgcaactttatccgcctccatccagtctattaattgttgccgggaagctagagtaagtagttcgccagttaatagtttgcgcaacgttgttgccattgctacaggcatcgtggtgtcacgctcgtcgtttggtatggcttcattcagctccggttcccaacgatcaaggcgagttacatgatcccccatgttgtgcaaaaaagcggttagctccttcggtcctccgatcgttgtcagaagtaagttggccgcagtgttatcactcatggttatggcagcactgcataattctcttactgtcatgccatccgtaagatgcttttctgtgactggtgagtactcaaccaagtcattctgagaatagtgtatgcggcgaccgagttgctcttgcccggcgtcaatacgggataataccgcgccacatagcagaactttaaaagtgctcatcattggaaaacgttcttcggggcgaaaactctcaagg

SEQ ID NO: 920 - DNA, 10896 bp, Synthetic construct
  source 1..10896: mol_type = other DNA
atcttaccgctgttgagatccagttcgatgtaacccactcgtgcacccaactgatcttcagcatcttttactttcaccagcgtttctgggtgagcaaaaacaggaaggcaaaatgccgcaaaaaagggaataagggcgacacggaaatgttgaatactcatactcttcctttttcaatattattgaagcatttatcagggttattgtctcatgagcggatacatatttgaatgtatttagaaaaataaacaaataggggttccgcgcacatttccccgaaaagtgccacctgacgtcgacggatcgggagatctcccgatcccctatggtgcactctcagtacaatctgctctgatgccgcatagttaagccagtatctgctccctgcttgtgtgttggagggcctatttcccatgattccttcatatttgcatatacgatacaaggctgttagagagataattagaattaatttgactgtaaacacaaagatattagtacaaaatacgtgacgtagaaagtaataatttcttgggtagtttgcagttttaaaattatgttttaaaatggactatcatatgcttaccgtaacttgaaagtatttcgatttcttggctttatatatcttgtggaaaggacgaaacaccgtaatacgactcactatagggtctagaattcctgtgaactgccgagtaggtagctgataacgattggccccagccgccctggtgactcgacgcgtgaactgccgagtaggtagctgataacgttgcagcggccgctttttttcttctgaggcggaaagaaccagctggggctctagggggtatccccacgcgccctgtagcggcgaggtcgctgagtagtgcgcgagcaaaatttaagctacaacaaggcaaggcttgaccgacaattgcatgaagaatctgcttagggttaggcgttttgcgctgcttcgcgatgtacgggccagatatacgcgttgacattgattattgactagttattaatagtaatcaattacggggtcattagttcatagcccatatatggagttccgcgttacataacttacggtaaatggcccgcctggctgaccgcccaacgacccccgcccattgacgtcaataatgacgtatgttcccatagtaacgccaatagggactttccattgacgtcaatgggtggagtatttacggtaaactgcccacttggcagtacatcaagtgtatcatatgccaagtacgccccctattgacgtcaatgacggtaaatggcccgcctggcattatgcccagtacatgaccttatgggactttcctacttggcagtacatctacgtattagtcatcgctattaccatggtgatgcggttttggcagtacatcaatgggcgtggatagcggtttgactcacggggatttccaagtctccaccccattgacgtcaatgggagtttgttttggcaccaaaatcaacgggactttccaaaatgtcgtaacaactccgccccattgacgcaaatgggcggtaggcgtgtacggtgggaggtctatataagcagagctctctggctaactagagaacccactgcttactggcttatcgaaattaatacgactcactatagggagacccaagctggctagcgtttaaacttaagcttgccaccatggggcccaagaagaaaaggaaggtcggctcagccatgaagctgccaaccaacctggcctacgagcggagcatcgaccccagcgacgtgtgcttcttcgtggtgtggccagacgataggaaaacccccctgacatacaattcccgcacactgctgggacagatggaggcagccagcctggcatacgacgtgtccggccagcctatcaagtctgccaccgcagaggccctggcacagggcaaccctcaccaggtggatttctgccatgtgccatacggcgccagccacatcgagtgtagcttctccgtgtcttttagctccgagctgcggcagccatataagtgtaattctagcaaggtgaagcagacactggtgcagctggtggagctgtacgaaaccaagatcggctggacagagctggccacccggtatctgatgaatatctgcaacggcaagtggctgtggaagaatacaagaaaggcctactgttggaacatcgtgctgaccccctggccttggaatggcgagaaagtgggcttcgaggacatcaggaccaactatacatcccgccaggacttcaagaacaataagaattggtctgccatcgtggagatgatcaagacagccttctcctctaccgacggcctggccatctttgaggtgagggccacactgcacctgccaaccaacgcaatggtgcgccctagccaggtgttcacagagaaggagagcggctccaagtctaagagcaagacccagaactctagggtgttccagagcaccacaatcgatggagagcggagcccaatcctgggagcctttaagacaggcgccgccatcgccaccatcgacgattggtatccagaggcaaccgagcctctgagggtgggccgctttggagtgcacagggaggacgtgacatgctacagacacccatctaccggcaaggatttctttagcatcctccagcaggccgagcactatatcgaggtgctgagtgccaacaagacacccgcccaggaaaccatcaatgacatgcacttcctgatggccaacctgatcaagggcggcatgtttcagcacaagggcgacgggtccggagagggaaggggctctctgctgacctgcggcgacgtggaggagaaccctggacctggaccgaaaaagaagcgaaaagttggatccggcatgttcctccagaggccaaagccctacagcgacgagtccctggagtctttctttatcagagtggccaataagaacggctatggcgatgtgcacaggttcctggaggccaccaagcggttcctccaggacatcgatcacaacggctaccagacctttccaacagacatcaccaggatcaatccctatagcgccaagaacagctcctctgcccgcacagcctccttcctgaagctggcccagctgacctttaatgagccacctgagctgctgggactggccatcaatcggacaaacatgaagtactccccttctaccagcgccgtggtgagaggagcagaggtgttcccacggtccctgctgagaacccacagcatcccatgctgtcccctgtgcctgagagagaacggctacgccagctatctgtggcacttccagggctacgagtattgtcactcccacaatgtgcctctgatcaccacatgctcttgtggcaaggagtttgactacagggtgagcggcctgaagggcatctgctgtaagtgcaaggagccaatcaccctgacaagccgcgagaatggccacgaggccgcctgtaccgtgtccaactggctggccggccacgagtctaagcctctgccaaacctgcccaagtcctatagatggggactggtgcactggtggatgggcatcaaggactccgagttcgatcacttctcttttgtgcagttctttagcaactggcctcggagcttccactccatcatcgaggacgaggtggagtttaatctggagcacgccgtggtgtccacctctgagctgcggctgaaggatctgctgggcagactgttctttggcagcatcaggctgccagagcgcaatctccagcacaacatcatcctgggcgagctgctgtgctacctggagaaccgcctgtggcaggacaagggcctgatcgccaatctgaagatgaacgccctggaggccacagtgatgctgaattgttccctggatcagatcgcctctatggtggagcagcgcatcctgaagcccaatagaaagtccaagcctaactctccactggacgtgaccgattacctgttccactttggcgacatcttctgcctgtggctggccgagtttcagtccgatgagttcaaccggagcttctacgtgagccggtggggctcgagcgagggaaggggctccctgctgacttgtggcgacgtggaggagaaccctggacctagcccaaaaaagaaacgcaaggtgggcaccggtgtgaagtggtactataagaccatcacattcctgcctgagctgtgcaacaatgagtctctggcagcaaagtgtctgcgggtgctgcacggcttcaattaccagtatgagacaagaaacatcggcgtgtcctttccactgtggtgcgacgccaccgtgggcaagaagatctctttcgtgagcaagaacaagatcgagctggatctgctgctgaagcagcactacttcgtgcagatggagcagctccagtattttcacatcagcaatacagtgctggtgcccgaggactgcacctacgtgagctttcggagatgtcagtccatcgataagctgaccgcagcaggactggcaagaaagatcaggcgcctggagaagcgggccctgtccagaggcgagcagttcgacccatctagctttgcccagaaggagcacacagccatcgcccactaccactctctgggcgagtcctctaagcagaccaatcggaacttcagactgaacatcaggatgctgagtgagcagccaagggagggcaattccatcttcagctcctatggcctgagcaattccgagaactcttttcagcccgtgcctctgatcggtaaccaggagggaagaggctccctgctgacatgtggcgacgtggaagaaaaccctggacctggccctaaaaaaaagcggaaggtaggtaccggcatgcagaccctgaaggagctgatcgccagcaaccccgacgatctgaccacagagctgaagagggccttccgccccctgacacctcacatcgccatcgacggcaatgagctggatgccctgaccatcctggtgaacctgacagacaagaccgacgatcagaaggacctgctggatcgggccaagtgtaagcagaagctgagagatgagaagtggtgggcctcctgcatcaactgcgtgaactacaggcagtctcacaacccaaagttccccgacatccgcagcgagggcgtgatcagaacacaggccctgggcgagctgcccagctttctgctgtctagctccaagatcccaccctaccactggtcttatagccacgactctaagtatgtgaataagagcgccttcctgaccaacgagttttgctgggatggcgagatcagctgtctgggcgagctgctgaaggacgccgatcaccctctgtggaacacactgaagaagctgggctgctcccagaaaacctgtaaggcaatggccaagcagctggccgacatcacactgaccacaatcaatgtgaccctggcccccaactacctgacacagatctctctgcctgactccgatacatcttatatctccctgtctcctgtggccagcctgtccatgcagagccacttccaccagaggctccaggatgagaacaggcactccgccatcacccggttcagccggaccacaaatatgggagtgacagcaatgacctgcggaggagccttcaggatgctgaaaagcggcgccaagttttctagccctccacaccaccggctgaacagcaagagatcctggctgacctccgagcatgtgcagtctctgaagcagtaccagcggctgaataagagcctgatcccagagaactccagaatcgccctgcggagaaagtataagatcgagctgcaaaatatggtgcgctcttggttcgccatgcaggaccacacactggatagcaatatcctgatccagcacctgaaccacgacctgtcctacctgggcgccaccaagcggttcgcctatgatcccgccatgacaaagctgtttaccgagctgctgaagagagagctgtctaacagcatcaacaatggcgagcagcacaccaatggcagctttctggtgctgcctaacatcagagtgtgcggagcaaccgccctgtcctctcctgtgacagtgggcatcccatccctgaccgccttctttggcttcgtgcacgcctttgagaggaatatcaaccgcaccacaagctccttcagggtggagagctttgccatctgcgtgcaccagctgcatgtggagaagcgcggcctgacagccgagttcgtggagaagggcgacggaacaatctccgccccagcaaccagggacgattggcagtgtgatgtggtgttctctctgatcctgaataccaactttgcccagcacatcgaccaggatacactcgtcacctctctgccaaagaggctggcaaggggaagcgccaagatcgccatcgacgatttcaagcacatcaactccttttctacactggaaaccgcaatcgagagcctgccaatcgaggcaggcagatggctgagtctgtacgcccagtccaacaataacctgtctgacctgctggccgccatgacagaggatcaccagctgatggccagctgcgtgggctaccacctgctggaggagcctaaagacaagccaaactccctcagaggctataagcacgccatcgccgagtgtatcatcggcctgatcaattccatcaccttctctagcgagacagatcccaacaccatcttttggagcctgaagaattaccagaactatctggtggtgcagcctcgctccatcaatgacgaaaccaccgataagtcctctctgtgatctagagggcccgtttaaacccgctgatcagcctcgactgtgccttctagttgccagccatctgttgtttgcccctcccccgtgccttccttgaccctggaaggtgccactcccactgtcctttcctaataaaatgaggaaattgcatcgcattgtctgagtaggtgtcattctattctggggggtggggtggggcaggacagcaagggggaggattgggaaagacaatagcaggcatgctggggatgcggtgggctctatggcttctgaggcggaaagaaccagctggggctctagggggtatccccacgcgccctgtagcggcgcattaagcgcggcgggtgtggtggttacgcgcagcgtgaccgctacacttgccagcgccctagcgcccgctcctttcgctttcttcccttcctttctcgccacgttcgccggctttccccgtcaagctctaaatcgggggctccctttagggttccgatttagtgctttacggcacctcgaccccaaaaaacttgattagggtgatggttcacgtagtgggccatcgccctgatagacggtttttcgccctttgacgttggagtccacgttctttaatagtggactcttgttccaaactggaacaacactcaaccctatctcggtctattcttttgatttataagggattttgccgatttcggcctattggttaaaaaatgagctgatttaacaaaaatttaacgcgaattaattctgtggaatgtgtgtcagttagggtgtggaaagtccccaggctccccagcaggcagaagtatgcaaagcatgcatctcaattagtcagcaaccaggtgtggaaagtccccaggctccccagcaggcagaagtatgcaaagcatgcatctcaattagtcagcaaccatagtcccgcccctaactccgcccatcccgcccctaactccgcccagttccgcccattctccgccccatggctgactaattttttttatttatgcagaggccgaggccgcctctgcctctgagctattccagaagtagtgaggaggcttttttggaggcctaggcttttgcaaaaagctcccgggagcttgtatatccattttcggatctgatcaagagacaggatgaggatcgtttcgcatgattgaacaagatggattgcacgcaggttctccggccgcttgggtggagaggctattcggctatgactgggcacaacagacaatcggctgctctgatgccgccgtgttccggctgtcagcgcaggggcgcccggttctttttgtcaagaccgacctgtccggtgccctgaatgaactgcaggacgaggcagcgcggctatcgtggctggccacgacgggcgttccttgcgcagctgtgctcgacgttgtcactgaagcgggaagggactggctgctattgggcgaagtgccggggcaggatctcctgtcatctcaccttgctcctgccgagaaagtatccatcatggctgatgcaatgcggcggctgcatacgcttgatccggctacctgcccattcgaccaccaagcgaaacatcgcatcgagcgagcacgtactcggatggaagccggtcttgtcgatcaggatgatctggacgaagagcatcaggggctcgcgccagccgaactgttcgccaggctcaaggcgcgcatgcccgacggcgaggatctcgtcgtgacccatggcgatgcctgcttgccgaatatcatggtggaaaatggccgcttttctggattcatcgactgtggccggctgggtgtggcggaccgctatcaggacatagcgttggctacccgtgatattgctgaagagcttggcggcgaatgggctgaccgcttcctcgtgctttacggtatcgccgctcccgattcgcagcgcatcgccttctatcgccttcttgacgagttcttctgagcgggactctggggttcgaaatgaccgaccaagcgacgcccaacctgccatcacgagatttcgattccaccgccgccttctatgaaaggttgggcttcggaatcgttttccgggacgccggctggatgatcctccagcgcggggatctcatgctggagttcttcgcccaccccaacttgtttattgcagcttataatggttacaaataaagcaatagcatcacaaatttcacaaataaagcatttttttcactgcattctagttgtggtttgtccaaactcatcaatgtatcttatcatgtctgtataccgtcgacctctagctagagcttggcgtaatcatggtcatagctgtttcctgtgtgaaattgttatccgctcacaattccacacaacatacgagccggaagcataaagtgtaaagcctggggtgcctaatgagtgagctaactcacattaattgcgttgcgctcactgcccgctttccagtcgggaaacctgtcgtgccagctgcattaatgaatcggccaacgcgcggggagaggcggtttgcgtattgggcgctcttccgcttcctcgctcactgactcgctgcgctcggtcgttcggctgcggcgagcggtatcagctcactcaaaggcggtaatacggttatccacagaatcaggggataacgcaggaaagaacatgtgagcaaaaggccagcaaaaggccaggaaccgtaaaaaggccgcgttgctggcgtttttccataggctccgcccccctgacgagcatcacaaaaatcgacgctcaagtcagaggtggcgaaacccgacaggactataaagataccaggcgtttccccctggaagctccctcgtgcgctctcctgttccgaccctgccgcttaccggatacctgtccgcctttctcccttcgggaagcgtggcgctttctcatagctcacgctgtaggtatctcagttcggtgtaggtcgttcgctccaagctgggctgtgtgcacgaaccccccgttcagcccgaccgctgcgccttatccggtaactatcgtcttgagtccaacccggtaagacacgacttatcgccactggcagcagccactggtaacaggattagcagagcgaggtatgtaggcggtgctacagagttcttgaagtggtggcctaactacggctacactagaagaacagtatttggtatctgcgctctgctgaagccagttaccttcggaaaaagagttggtagctcttgatccggcaaacaaaccaccgctggtagcggtttttttgtttgcaagcagcagattacgcgcagaaaaaaaggatctcaagaagatcctttgatcttttctacggggtctgacgctcagtggaacgaaaactcacgttaagggattttggtcatgagattatcaaaaaggatcttcacctagatccttttaaattaaaaatgaagttttaaatcaatctaaagtatatatgagtaaacttggtctgacagttaccaatgcttaatcagtgaggcacctatctcagcgatctgtctatttcgttcatccatagttgcctgactccccgtcgtgtagataactacgatacgggagggcttaccatctggccccagtgctgcaatgataccgcgagacccacgctcaccggctccagatttatcagcaataaaccagccagccggaagggccgagcgcagaagtggtcctgcaactttatccgcctccatccagtctattaattgttgccgggaagctagagtaagtagttcgccagttaatagtttgcgcaacgttgttgccattgctacaggcatcgtggtgtcacgctcgtcgtttggtatggcttcattcagctccggttcccaacgatcaaggcgagttacatgatcccccatgttgtgcaaaaaagcggttagctccttcggtcctccgatcgttgtcagaagtaagttggccgcagtgttatcactcatggttatggcagcactgcataattctcttactgtcatgccatccgtaagatgcttttctgtgactggtgagtactcaaccaagtcattctgagaatagtgtatgcggcgaccgagttgctcttgcccggcgtcaatacgggataataccgcgccacatagcagaactttaaaagtgctcatcattggaaaacgttcttcggggcgaaaactctcaagg

SEQ ID NO: 921 - DNA, 10896 bp, Synthetic construct
  source 1..10896: mol_type = other DNA
atcttaccgctgttgagatccagttcgatgtaacccactcgtgcacccaactgatcttcagcatcttttactttcaccagcgtttctgggtgagcaaaaacaggaaggcaaaatgccgcaaaaaagggaataagggcgacacggaaatgttgaatactcatactcttcctttttcaatattattgaagcatttatcagggttattgtctcatgagcggatacatatttgaatgtatttagaaaaataaacaaataggggttccgcgcacatttccccgaaaagtgccacctgacgtcgacggatcgggagatctcccgatcccctatggtgcactctcagtacaatctgctctgatgccgcatagttaagccagtatctgctccctgcttgtgtgttggagggcctatttcccatgattccttcatatttgcatatacgatacaaggctgttagagagataattagaattaatttgactgtaaacacaaagatattagtacaaaatacgtgacgtagaaagtaataatttcttgggtagtttgcagttttaaaattatgttttaaaatggactatcatatgcttaccgtaacttgaaagtatttcgatttcttggctttatatatcttgtggaaaggacgaaacaccgtaatacgactcactatagggtctagaattcctgtgaactgccgagtaggtagctgataactcggggaacctgttctgttaggttccgccagggtgaactgccgagtaggtagctgataacgttgcagcggccgctttttttcttctgaggcggaaagaaccagctggggctctagggggtatccccacgcgccctgtagcggcgaggtcgctgagtagtgcgcgagcaaaatttaagctacaacaaggcaaggcttgaccgacaattgcatgaagaatctgcttagggttaggcgttttgcgctgcttcgcgatgtacgggccagatatacgcgttgacattgattattgactagttattaatagtaatcaattacggggtcattagttcatagcccatatatggagttccgcgttacataacttacggtaaatggcccgcctggctgaccgcccaacgacccccgcccattgacgtcaataatgacgtatgttcccatagtaacgccaatagggactttccattgacgtcaatgggtggagtatttacggtaaactgcccacttggcagtacatcaagtgtatcatatgccaagtacgccccctattgacgtcaatgacggtaaatggcccgcctggcattatgcccagtacatgaccttatgggactttcctacttggcagtacatctacgtattagtcatcgctattaccatggtgatgcggttttggcagtacatcaatgggcgtggatagcggtttgactcacggggatttccaagtctccaccccattgacgtcaatgggagtttgttttggcaccaaaatcaacgggactttccaaaatgtcgtaacaactccgccccattgacgcaaatgggcggtaggcgtgtacggtgggaggtctatataagcagagctctctggctaactagagaacccactgcttactggcttatcgaaattaatacgactcactatagggagacccaagctggctagcgtttaaacttaagcttgccaccatggggcccaagaagaaaaggaaggtcggctcagccatgaagctgccaaccaacctggcctacgagcggagcatcgaccccagcgacgtgtgcttcttcgtggtgtggccagacgataggaaaacccccctgacatacaattcccgcacactgctgggacagatggaggcagccagcctggcatacgacgtgtccggccagcctatcaagtctgccaccgcagaggccctggcacagggcaaccctcaccaggtggatttctgccatgtgccatacggcgccagccacatcgagtgtagcttctccgtgtcttttagctccgagctgcggcagccatataagtgtaattctagcaaggtgaagcagacactggtgcagctggtggagctgtacgaaaccaagatcggctggacagagctggccacccggtatctgatgaatatctgcaacggcaagtggctgtggaagaatacaagaaaggcctactgttggaacatcgtgctgaccccctggccttggaatggcgagaaagtgggcttcgaggacatcaggaccaactatacatcccgccaggacttcaagaacaataagaattggtctgccatcgtggagatgatcaagacagccttctcctctaccgacggcctggccatctttgaggtgagggccacactgcacctgccaaccaacgcaatggtgcgccctagccaggtgttcacagagaaggagagcggctccaagtctaagagcaagacccagaactctagggtgttccagagcaccacaatcgatggagagcggagcccaatcctgggagcctttaagacaggcgccgccatcgccaccatcgacgattggtatccagaggcaaccgagcctctgagggtgggccgctttggagtgcacagggaggacgtgacatgctacagacacccatctaccggcaaggatttctttagcatcctccagcaggccgagcactatatcgaggtgctgagtgccaacaagacacccgcccaggaaaccatcaatgacatgcacttcctgatggccaacctgatcaagggcggcatgtttcagcacaagggcgacgggtccggagagggaaggggctctctgctgacctgcggcgacgtggaggagaaccctggacctggaccgaaaaagaagcgaaaagttggatccggcatgttcctccagaggccaaagccctacagcgacgagtccctggagtctttctttatcagagtggccaataagaacggctatggcgatgtgcacaggttcctggaggccaccaagcggttcctccaggacatcgatcacaacggctaccagacctttccaacagacatcaccaggatcaatccctatagcgccaagaacagctcctctgcccgcacagcctccttcctgaagctggcccagctgacctttaatgagccacctgagctgctgggactggccatcaatcggacaaacatgaagtactccccttctaccagcgccgtggtgagaggagcagaggtgttcccacggtccctgctgagaacccacagcatcccatgctgtcccctgtgcctgagagagaacggctacgccagctatctgtggcacttccagggctacgagtattgtcactcccacaatgtgcctctgatcaccacatgctcttgtggcaaggagtttgactacagggtgagcggcctgaagggcatctgctgtaagtgcaaggagccaatcaccctgacaagccgcgagaatggccacgaggccgcctgtaccgtgtccaactggctggccggccacgagtctaagcctctgccaaacctgcccaagtcctatagatggggactggtgcactggtggatgggcatcaaggactccgagttcgatcacttctcttttgtgcagttctttagcaactggcctcggagcttccactccatcatcgaggacgaggtggagtttaatctggagcacgccgtggtgtccacctctgagctgcggctgaaggatctgctgggcagactgttctttggcagcatcaggctgccagagcgcaatctccagcacaacatcatcctgggcgagctgctgtgctacctggagaaccgcctgtggcaggacaagggcctgatcgccaatctgaagatgaacgccctggaggccacagtgatgctgaattgttccctggatcagatcgcctctatggtggagcagcgcatcctgaagcccaatagaaagtccaagcctaactctccactggacgtgaccgattacctgttccactttggcgacatcttctgcctgtggctggccgagtttcagtccgatgagttcaaccggagcttctacgtgagccggtggggctcgagcgagggaaggggctccctgctgacttgtggcgacgtggaggagaaccctggacctagcccaaaaaagaaacgcaaggtgggcaccggtgtgaagtggtactataagaccatcacattcctgcctgagctgtgcaacaatgagtctctggcagcaaagtgtctgcgggtgctgcacggcttcaattaccagtatgagacaagaaacatcggcgtgtcctttccactgtggtgcgacgccaccgtgggcaagaagatctctttcgtgagcaagaacaagatcgagctggatctgctgctgaagcagcactacttcgtgcagatggagcagctccagtattttcacatcagcaatacagtgctggtgcccgaggactgcacctacgtgagctttcggagatgtcagtccatcgataagctgaccgcagcaggactggcaagaaagatcaggcgcctggagaagcgggccctgtccagaggcgagcagttcgacccatctagctttgcccagaaggagcacacagccatcgcccactaccactctctgggcgagtcctctaagcagaccaatcggaacttcagactgaacatcaggatgctgagtgagcagccaagggagggcaattccatcttcagctcctatggcctgagcaattccgagaactcttttcagcccgtgcctctgatcggtaaccaggagggaagaggctccctgctgacatgtggcgacgtggaagaaaaccctggacctggccctaaaaaaaagcggaaggtaggtaccggcatgcagaccctgaaggagctgatcgccagcaaccccgacgatctgaccacagagctgaagagggccttccgccccctgacacctcacatcgccatcgacggcaatgagctggatgccctgaccatcctggtgaacctgacagacaagaccgacgatcagaaggacctgctggatcgggccaagtgtaagcagaagctgagagatgagaagtggtgggcctcctgcatcaactgcgtgaactacaggcagtctcacaacccaaagttccccgacatccgcagcgagggcgtgatcagaacacaggccctgggcgagctgcccagctttctgctgtctagctccaagatcccaccctaccactggtcttatagccacgactctaagtatgtgaataagagcgccttcctgaccaacgagttttgctgggatggcgagatcagctgtctgggcgagctgctgaaggacgccgatcaccctctgtggaacacactgaagaagctgggctgctcccagaaaacctgtaaggcaatggccaagcagctggccgacatcacactgaccacaatcaatgtgaccctggcccccaactacctgacacagatctctctgcctgactccgatacatcttatatctccctgtctcctgtggccagcctgtccatgcagagccacttccaccagaggctccaggatgagaacaggcactccgccatcacccggttcagccggaccacaaatatgggagtgacagcaatgacctgcggaggagccttcaggatgctgaaaagcggcgccaagttttctagccctccacaccaccggctgaacagcaagagatcctggctgacctccgagcatgtgcagtctctgaagcagtaccagcggctgaataagagcctgatcccagagaactccagaatcgccctgcggagaaagtataagatcgagctgcaaaatatggtgcgctcttggttcgccatgcaggaccacacactggatagcaatatcctgatccagcacctgaaccacgacctgtcctacctgggcgccaccaagcggttcgcctatgatcccgccatgacaaagctgtttaccgagctgctgaagagagagctgtctaacagcatcaacaatggcgagcagcacaccaatggcagctttctggtgctgcctaacatcagagtgtgcggagcaaccgccctgtcctctcctgtgacagtgggcatcccatccctgaccgccttctttggcttcgtgcacgcctttgagaggaatatcaaccgcaccacaagctccttcagggtggagagctttgccatctgcgtgcaccagctgcatgtggagaagcgcggcctgacagccgagttcgtggagaagggcgacggaacaatctccgccccagcaaccagggacgattggcagtgtgatgtggtgttctctctgatcctgaataccaactttgcccagcacatcgaccaggatacactcgtcacctctctgccaaagaggctggcaaggggaagcgccaagatcgccatcgacgatttcaagcacatcaactccttttctacactggaaaccgcaatcgagagcctgccaatcgaggcaggcagatggctgagtctgtacgcccagtccaacaataacctgtctgacctgctggccgccatgacagaggatcaccagctgatggccagctgcgtgggctaccacctgctggaggagcctaaagacaagccaaactccctcagaggctataagcacgccatcgccgagtgtatcatcggcctgatcaattccatcaccttctctagcgagacagatcccaacaccatcttttggagcctgaagaattaccagaactatctggtggtgcagcctcgctccatcaatgacgaaaccaccgataagtcctctctgtgatctagagggcccgtttaaacccgctgatcagcctcgactgtgccttctagttgccagccatctgttgtttgcccctcccccgtgccttccttgaccctggaaggtgccactcccactgtcctttcctaataaaatgaggaaattgcatcgcattgtctgagtaggtgtcattctattctggggggtggggtggggcaggacagcaagggggaggattgggaaagacaatagcaggcatgctggggatgcggtgggctctatggcttctgaggcggaaagaaccagctggggctctagggggtatccccacgcgccctgtagcggcgcattaagcgcggcgggtgtggtggttacgcgcagcgtgaccgctacacttgccagcgccctagcgcccgctcctttcgctttcttcccttcctttctcgccacgttcgccggctttccccgtcaagctctaaatcgggggctccctttagggttccgatttagtgctttacggcacctcgaccccaaaaaacttgattagggtgatggttcacgtagtgggccatcgccctgatagacggtttttcgccctttgacgttggagtccacgttctttaatagtggactcttgttccaaactggaacaacactcaaccctatctcggtctattcttttgatttataagggattttgccgatttcggcctattggttaaaaaatgagctgatttaacaaaaatttaacgcgaattaattctgtggaatgtgtgtcagttagggtgtggaaagtccccaggctccccagcaggcagaagtatgcaaagcatgcatctcaattagtcagcaaccaggtgtggaaagtccccaggctccccagcaggcagaagtatgcaaagcatgcatctcaattagtcagcaaccatagtcccgcccctaactccgcccatcccgcccctaactccgcccagttccgcccattctccgccccatggctgactaattttttttatttatgcagaggccgaggccgcctctgcctctgagctattccagaagtagtgaggaggcttttttggaggcctaggcttttgcaaaaagctcccgggagcttgtatatccattttcggatctgatcaagagacaggatgaggatcgtttcgcatgattgaacaagatggattgcacgcaggttctccggccgcttgggtggagaggctattcggctatgactgggcacaacagacaatcggctgctctgatgccgccgtgttccggctgtcagcgcaggggcgcccggttctttttgtcaagaccgacctgtccggtgccctgaatgaactgcaggacgaggcagcgcggctatcgtggctggccacgacgggcgttccttgcgcagctgtgctcgacgttgtcactgaagcgggaagggactggctgctattgggcgaagtgccggggcaggatctcctgtcatctcaccttgctcctgccgagaaagtatccatcatggctgatgcaatgcggcggctgcatacgcttgatccggctacctgcccattcgaccaccaagcgaaacatcgcatcgagcgagcacgtactcggatggaagccggtcttgtcgatcaggatgatctggacgaagagcatcaggggctcgcgccagccgaactgttcgccaggctcaaggcgcgcatgcccgacggcgaggatctcgtcgtgacccatggcgatgcctgcttgccgaatatcatggtggaaaatggccgcttttctggattcatcgactgtggccggctgggtgtggcggaccgctatcaggacatagcgttggctacccgtgatattgctgaagagcttggcggcgaatgggctgaccgcttcctcgtgctttacggtatcgccgctcccgattcgcagcgcatcgccttctatcgccttcttgacgagttcttctgagcgggactctggggttcgaaatgaccgaccaagcgacgcccaacctgccatcacgagatttcgattccaccgccgccttctatgaaaggttgggcttcggaatcgttttccgggacgccggctggatgatcctccagcgcggggatctcatgctggagttcttcgcccaccccaacttgtttattgcagcttataatggttacaaataaagcaatagcatcacaaatttcacaaataaagcatttttttcactgcattctagttgtggtttgtccaaactcatcaatgtatcttatcatgtctgtataccgtcgacctctagctagagcttggcgtaatcatggtcatagctgtttcctgtgtgaaattgttatccgctcacaattccacacaacatacgagccggaagcataaagtgtaaagcctggggtgcctaatgagtgagctaactcacattaattgcgttgcgctcactgcccgctttccagtcgggaaacctgtcgtgccagctgcattaatgaatcggccaacgcgcggggagaggcggtttgcgtattgggcgctcttccgcttcctcgctcactgactcgctgcgctcggtcgttcggctgcggcgagcggtatcagctcactcaaaggcggtaatacggttatccacagaatcaggggataacgcaggaaagaacatgtgagcaaaaggccagcaaaaggccaggaaccgtaaaaaggccgcgttgctggcgtttttccataggctccgcccccctgacgagcatcacaaaaatcgacgctcaagtcagaggtggcgaaacccgacaggactataaagataccaggcgtttccccctggaagctccctcgtgcgctctcctgttccgaccctgccgcttaccggatacctgtccgcctttctcccttcgggaagcgtggcgctttctcatagctcacgctgtaggtatctcagttcggtgtaggtcgttcgctccaagctgggctgtgtgcacgaaccccccgttcagcccgaccgctgcgccttatccggtaactatcgtcttgagtccaacccggtaagacacgacttatcgccactggcagcagccactggtaacaggattagcagagcgaggtatgtaggcggtgctacagagttcttgaagtggtggcctaactacggctacactagaagaacagtatttggtatctgcgctctgctgaagccagttaccttcggaaaaagagttggtagctcttgatccggcaaacaaaccaccgctggtagcggtttttttgtttgcaagcagcagattacgcgcagaaaaaaaggatctcaagaagatcctttgatcttttctacggggtctgacgctcagtggaacgaaaactcacgttaagggattttggtcatgagattatcaaaaaggatcttcacctagatccttttaaattaaaaatgaagttttaaatcaatctaaagtatatatgagtaaacttggtctgacagttaccaatgcttaatcagtgaggcacctatctcagcgatctgtctatttcgttcatccatagttgcctgactccccgtcgtgtagataactacgatacgggagggcttaccatctggccccagtgctgcaatgataccgcgagacccacgctcaccggctccagatttatcagcaataaaccagccagccggaagggccgagcgcagaagtggtcctgcaactttatccgcctccatccagtctattaattgttgccgggaagctagagtaagtagttcgccagttaatagtttgcgcaacgttgttgccattgctacaggcatcgtggtgtcacgctcgtcgtttggtatggcttcattcagctccggttcccaacgatcaaggcgagttacatgatcccccatgttgtgcaaaaaagcggttagctccttcggtcctccgatcgttgtcagaagtaagttggccgcagtgttatcactcatggttatggcagcactgcataattctcttactgtcatgccatccgtaagatgcttttctgtgactggtgagtactcaaccaagtcattctgagaatagtgtatgcggcgaccgagttgctcttgcccggcgtcaatacgggataataccgcgccacatagcagaactttaaaagtgctcatcattggaaaacgttcttcggggcgaaaactctcaagg

SEQ ID NO: 922 - DNA, 10896 bp, Synthetic construct
  source 1..10896: mol_type = other DNA
atcttaccgctgttgagatccagttcgatgtaacccactcgtgcacccaactgatcttcagcatcttttactttcaccagcgtttctgggtgagcaaaaacaggaaggcaaaatgccgcaaaaaagggaataagggcgacacggaaatgttgaatactcatactcttcctttttcaatattattgaagcatttatcagggttattgtctcatgagcggatacatatttgaatgtatttagaaaaataaacaaataggggttccgcgcacatttccccgaaaagtgccacctgacgtcgacggatcgggagatctcccgatcccctatggtgcactctcagtacaatctgctctgatgccgcatagttaagccagtatctgctccctgcttgtgtgttggagggcctatttcccatgattccttcatatttgcatatacgatacaaggctgttagagagataattagaattaatttgactgtaaacacaaagatattagtacaaaatacgtgacgtagaaagtaataatttcttgggtagtttgcagttttaaaattatgttttaaaatggactatcatatgcttaccgtaacttgaaagtatttcgatttcttggctttatatatcttgtggaaaggacgaaacaccgtaatacgactcactatagggtctagaattcctgtgaactgccgagtaggtagctgataacggccgctgggcgtagctgcgactcggcggagtgtgaactgccgagtaggtagctgataacgttgcagcggccgctttttttcttctgaggcggaaagaaccagctggggctctagggggtatccccacgcgccctgtagcggcgaggtcgctgagtagtgcgcgagcaaaatttaagctacaacaaggcaaggcttgaccgacaattgcatgaagaatctgcttagggttaggcgttttgcgctgcttcgcgatgtacgggccagatatacgcgttgacattgattattgactagttattaatagtaatcaattacggggtcattagttcatagcccatatatggagttccgcgttacataacttacggtaaatggcccgcctggctgaccgcccaacgacccccgcccattgacgtcaataatgacgtatgttcccatagtaacgccaatagggactttccattgacgtcaatgggtggagtatttacggtaaactgcccacttggcagtacatcaagtgtatcatatgccaagtacgccccctattgacgtcaatgacggtaaatggcccgcctggcattatgcccagtacatgaccttatgggactttcctacttggcagtacatctacgtattagtcatcgctattaccatggtgatgcggttttggcagtacatcaatgggcgtggatagcggtttgactcacggggatttccaagtctccaccccattgacgtcaatgggagtttgttttggcaccaaaatcaacgggactttccaaaatgtcgtaacaactccgccccattgacgcaaatgggcggtaggcgtgtacggtgggaggtctatataagcagagctctctggctaactagagaacccactgcttactggcttatcgaaattaatacgactcactatagggagacccaagctggctagcgtttaaacttaagcttgccaccatggggcccaagaagaaaaggaaggtcggctcagccatgaagctgccaaccaacctggcctacgagcggagcatcgaccccagcgacgtgtgcttcttcgtggtgtggccagacgataggaaaacccccctgacatacaattcccgcacactgctgggacagatggaggcagccagcctggcatacgacgtgtccggccagcctatcaagtctgccaccgcagaggccctggcacagggcaaccctcaccaggtggatttctgccatgtgccatacggcgccagccacatcgagtgtagcttctccgtgtcttttagctccgagctgcggcagccatataagtgtaattctagcaaggtgaagcagacactggtgcagctggtggagctgtacgaaaccaagatcggctggacagagctggccacccggtatctgatgaatatctgcaacggcaagtggctgtggaagaatacaagaaaggcctactgttggaacatcgtgctgaccccctggccttggaatggcgagaaagtgggcttcgaggacatcaggaccaactatacatcccgccaggacttcaagaacaataagaattggtctgccatcgtggagatgatcaagacagccttctcctctaccgacggcctggccatctttgaggtgagggccacactgcacctgccaaccaacgcaatggtgcgccctagccaggtgttcacagagaaggagagcggctccaagtctaagagcaagacccagaactctagggtgttccagagcaccacaatcgatggagagcggagcccaatcctgggagcctttaagacaggcgccgccatcgccaccatcgacgattggtatccagaggcaaccgagcctctgagggtgggccgctttggagtgcacagggaggacgtgacatgctacagacacccatctaccggcaaggatttctttagcatcctccagcaggccgagcactatatcgaggtgctgagtgccaacaagacacccgcccaggaaaccatcaatgacatgcacttcctgatggccaacctgatcaagggcggcatgtttcagcacaagggcgacgggtccggagagggaaggggctctctgctgacctgcggcgacgtggaggagaaccctggacctggaccgaaaaagaagcgaaaagttggatccggcatgttcctccagaggccaaagccctacagcgacgagtccctggagtctttctttatcagagtggccaataagaacggctatggcgatgtgcacaggttcctggaggccaccaagcggttcctccaggacatcgatcacaacggctaccagacctttccaacagacatcaccaggatcaatccctatagcgccaagaacagctcctctgcccgcacagcctccttcctgaagctggcccagctgacctttaatgagccacctgagctgctgggactggccatcaatcggacaaacatgaagtactccccttctaccagcgccgtggtgagaggagcagaggtgttcccacggtccctgctgagaacccacagcatcccatgctgtcccctgtgcctgagagagaacggctacgccagctatctgtggcacttccagggctacgagtattgtcactcccacaatgtgcctctgatcaccacatgctcttgtggcaaggagtttgactacagggtgagcggcctgaagggcatctgctgtaagtgcaaggagccaatcaccctgacaagccgcgagaatggccacgaggccgcctgtaccgtgtccaactggctggccggccacgagtctaagcctctgccaaacctgcccaagtcctatagatggggactggtgcactggtggatgggcatcaaggactccgagttcgatcacttctcttttgtgcagttctttagcaactggcctcggagcttccactccatcatcgaggacgaggtggagtttaatctggagcacgccgtggtgtccacctctgagctgcggctgaaggatctgctgggcagactgttctttggcagcatcaggctgccagagcgcaatctccagcacaacatcatcctgggcgagctgctgtgctacctggagaaccgcctgtggcaggacaagggcctgatcgccaatctgaagatgaacgccctggaggccacagtgatgctgaattgttccctggatcagatcgcctctatggtggagcagcgcatcctgaagcccaatagaaagtccaagcctaactctccactggacgtgaccgattacctgttccactttggcgacatcttctgcctgtggctggccgagtttcagtccgatgagttcaaccggagcttctacgtgagccggtggggctcgagcgagggaaggggctccctgctgacttgtggcgacgtggaggagaaccctggacctagcccaaaaaagaaacgcaaggtgggcaccggtgtgaagtggtactataagaccatcacattcctgcctgagctgtgcaacaatgagtctctggcagcaaagtgtctgcgggtgctgcacggcttcaattaccagtatgagacaagaaacatcggcgtgtcctttccactgtggtgcgacgccaccgtgggcaagaagatctctttcgtgagcaagaacaagatcgagctggatctgctgctgaagcagcactacttcgtgcagatggagcagctccagtattttcacatcagcaatacagtgctggtgcccgaggactgcacctacgtgagctttcggagatgtcagtccatcgataagctgaccgcagcaggactggcaagaaagatcaggcgcctggagaagcgggccctgtccagaggcgagcagttcgacccatctagctttgcccagaaggagcacacagccatcgcccactaccactctctgggcgagtcctctaagcagaccaatcggaacttcagactgaacatcaggatgctgagtgagcagccaagggagggcaattccatcttcagctcctatggcctgagcaattccgagaactcttttcagcccgtgcctctgatcggtaaccaggagggaagaggctccctgctgacatgtggcgacgtggaagaaaaccctggacctggccctaaaaaaaagcggaaggtaggtaccggcatgcagaccctgaaggagctgatcgccagcaaccccgacgatctgaccacagagctgaagagggccttccgccccctgacacctcacatcgccatcgacggcaatgagctggatgccctgaccatcctggtgaacctgacagacaagaccgacgatcagaaggacctgctggatcgggccaagtgtaagcagaagctgagagatgagaagtggtgggcctcctgcatcaactgcgtgaactacaggcagtctcacaacccaaagttccccgacatccgcagcgagggcgtgatcagaacacaggccctgggcgagctgcccagctttctgctgtctagctccaagatcccaccctaccactggtcttatagccacgactctaagtatgtgaataagagcgccttcctgaccaacgagttttgctgggatggcgagatcagctgtctgggcgagctgctgaaggacgccgatcaccctctgtggaacacactgaagaagctgggctgctcccagaaaacctgtaaggcaatggccaagcagctggccgacatcacactgaccacaatcaatgtgaccctggcccccaactacctgacacagatctctctgcctgactccgatacatcttatatctccctgtctcctgtggccagcctgtccatgcagagccacttccaccagaggctccaggatgagaacaggcactccgccatcacccggttcagccggaccacaaatatgggagtgacagcaatgacctgcggaggagccttcaggatgctgaaaagcggcgccaagttttctagccctccacaccaccggctgaacagcaagagatcctggctgacctccgagcatgtgcagtctctgaagcagtaccagcggctgaataagagcctgatcccagagaactccagaatcgccctgcggagaaagtataagatcgagctgcaaaatatggtgcgctcttggttcgccatgcaggaccacacactggatagcaatatcctgatccagcacctgaaccacgacctgtcctacctgggcgccaccaagcggttcgcctatgatcccgccatgacaaagctgtttaccgagctgctgaagagagagctgtctaacagcatcaacaatggcgagcagcacaccaatggcagctttctggtgctgcctaacatcagagtgtgcggagcaaccgccctgtcctctcctgtgacagtgggcatcccatccctgaccgccttctttggcttcgtgcacgcctttgagaggaatatcaaccgcaccacaagctccttcagggtggagagctttgccatctgcgtgcaccagctgcatgtggagaagcgcggcctgacagccgagttcgtggagaagggcgacggaacaatctccgccccagcaaccagggacgattggcagtgtgatgtggtgttctctctgatcctgaataccaactttgcccagcacatcgaccaggatacactcgtcacctctctgccaaagaggctggcaaggggaagcgccaagatcgccatcgacgatttcaagcacatcaactccttttctacactggaaaccgcaatcgagagcctgccaatcgaggcaggcagatggctgagtctgtacgcccagtccaacaataacctgtctgacctgctggccgccatgacagaggatcaccagctgatggccagctgcgtgggctaccacctgctggaggagcctaaagacaagccaaactccctcagaggctataagcacgccatcgccgagtgtatcatcggcctgatcaattccatcaccttctctagcgagacagatcccaacaccatcttttggagcctgaagaattaccagaactatctggtggtgcagcctcgctccatcaatgacgaaaccaccgataagtcctctctgtgatctagagggcccgtttaaacccgctgatcagcctcgactgtgccttctagttgccagccatctgttgtttgcccctcccccgtgccttccttgaccctggaaggtgccactcccactgtcctttcctaataaaatgaggaaattgcatcgcattgtctgagtaggtgtcattctattctggggggtggggtggggcaggacagcaagggggaggattgggaaagacaatagcaggcatgctggggatgcggtgggctctatggcttctgaggcggaaagaaccagctggggctctagggggtatccccacgcgccctgtagcggcgcattaagcgcggcgggtgtggtggttacgcgcagcgtgaccgctacacttgccagcgccctagcgcccgctcctttcgctttcttcccttcctttctcgccacgttcgccggctttccccgtcaagctctaaatcgggggctccctttagggttccgatttagtgctttacggcacctcgaccccaaaaaacttgattagggtgatggttcacgtagtgggccatcgccctgatagacggtttttcgccctttgacgttggagtccacgttctttaatagtggactcttgttccaaactggaacaacactcaaccctatctcggtctattcttttgatttataagggattttgccgatttcggcctattggttaaaaaatgagctgatttaacaaaaatttaacgcgaattaattctgtggaatgtgtgtcagttagggtgtggaaagtccccaggctccccagcaggcagaagtatgcaaagcatgcatctcaattagtcagcaaccaggtgtggaaagtccccaggctccccagcaggcagaagtatgcaaagcatgcatctcaattagtcagcaaccatagtcccgcccctaactccgcccatcccgcccctaactccgcccagttccgcccattctccgccccatggctgactaattttttttatttatgcagaggccgaggccgcctctgcctctgagctattccagaagtagtgaggaggcttttttggaggcctaggcttttgcaaaaagctcccgggagcttgtatatccattttcggatctgatcaagagacaggatgaggatcgtttcgcatgattgaacaagatggattgcacgcaggttctccggccgcttgggtggagaggctattcggctatgactgggcacaacagacaatcggctgctctgatgccgccgtgttccggctgtcagcgcaggggcgcccggttctttttgtcaagaccgacctgtccggtgccctgaatgaactgcaggacgaggcagcgcggctatcgtggctggccacgacgggcgttccttgcgcagctgtgctcgacgttgtcactgaagcgggaagggactggctgctattgggcgaagtgccggggcaggatctcctgtcatctcaccttgctcctgccgagaaagtatccatcatggctgatgcaatgcggcggctgcatacgcttgatccggctacctgcccattcgaccaccaagcgaaacatcgcatcgagcgagcacgtactcggatggaagccggtcttgtcgatcaggatgatctggacgaagagcatcaggggctcgcgccagccgaactgttcgccaggctcaaggcgcgcatgcccgacggcgaggatctcgtcgtgacccatggcgatgcctgcttgccgaatatcatggtggaaaatggccgcttttctggattcatcgactgtggccggctgggtgtggcggaccgctatcaggacatagcgttggctacccgtgatattgctgaagagcttggcggcgaatgggctgaccgcttcctcgtgctttacggtatcgccgctcccgattcgcagcgcatcgccttctatcgccttcttgacgagttcttctgagcgggactctggggttcgaaatgaccgaccaagcgacgcccaacctgccatcacgagatttcgattccaccgccgccttctatgaaaggttgggcttcggaatcgttttccgggacgccggctggatgatcctccagcgcggggatctcatgctggagttcttcgcccaccccaacttgtttattgcagcttataatggttacaaataaagcaatagcatcacaaatttcacaaataaagcatttttttcactgcattctagttgtggtttgtccaaactcatcaatgtatcttatcatgtctgtataccgtcgacctctagctagagcttggcgtaatcatggtcatagctgtttcctgtgtgaaattgttatccgctcacaattccacacaacatacgagccggaagcataaagtgtaaagcctggggtgcctaatgagtgagctaactcacattaattgcgttgcgctcactgcccgctttccagtcgggaaacctgtcgtgccagctgcattaatgaatcggccaacgcgcggggagaggcggtttgcgtattgggcgctcttccgcttcctcgctcactgactcgctgcgctcggtcgttcggctgcggcgagcggtatcagctcactcaaaggcggtaatacggttatccacagaatcaggggataacgcaggaaagaacatgtgagcaaaaggccagcaaaaggccaggaaccgtaaaaaggccgcgttgctggcgtttttccataggctccgcccccctgacgagcatcacaaaaatcgacgctcaagtcagaggtggcgaaacccgacaggactataaagataccaggcgtttccccctggaagctccctcgtgcgctctcctgttccgaccctgccgcttaccggatacctgtccgcctttctcccttcgggaagcgtggcgctttctcatagctcacgctgtaggtatctcagttcggtgtaggtcgttcgctccaagctgggctgtgtgcacgaaccccccgttcagcccgaccgctgcgccttatccggtaactatcgtcttgagtccaacccggtaagacacgacttatcgccactggcagcagccactggtaacaggattagcagagcgaggtatgtaggcggtgctacagagttcttgaagtggtggcctaactacggctacactagaagaacagtatttggtatctgcgctctgctgaagccagttaccttcggaaaaagagttggtagctcttgatccggcaaacaaaccaccgctggtagcggtttttttgtttgcaagcagcagattacgcgcagaaaaaaaggatctcaagaagatcctttgatcttttctacggggtctgacgctcagtggaacgaaaactcacgttaagggattttggtcatgagattatcaaaaaggatcttcacctagatccttttaaattaaaaatgaagttttaaatcaatctaaagtatatatgagtaaacttggtctgacagttaccaatgcttaatcagtgaggcacctatctcagcgatctgtctatttcgttcatccatagttgcctgactccccgtcgtgtagataactacgatacgggagggcttaccatctggccccagtgctgcaatgataccgcgagacccacgctcaccggctccagatttatcagcaataaaccagccagccggaagggccgagcgcagaagtggtcctgcaactttatccgcctccatccagtctattaattgttgccgggaagctagagtaagtagttcgccagttaatagtttgcgcaacgttgttgccattgctacaggcatcgtggtgtcacgctcgtcgtttggtatggcttcattcagctccggttcccaacgatcaaggcgagttacatgatcccccatgttgtgcaaaaaagcggttagctccttcggtcctccgatcgttgtcagaagtaagttggccgcagtgttatcactcatggttatggcagcactgcataattctcttactgtcatgccatccgtaagatgcttttctgtgactggtgagtactcaaccaagtcattctgagaatagtgtatgcggcgaccgagttgctcttgcccggcgtcaatacgggataataccgcgccacatagcagaactttaaaagtgctcatcattggaaaacgttcttcggggcgaaaactctcaagg

SEQ ID NO: 923 - DNA, 10896 bp, Synthetic construct
  source 1..10896: mol_type = other DNA
atcttaccgctgttgagatccagttcgatgtaacccactcgtgcacccaactgatcttcagcatcttttactttcaccagcgtttctgggtgagcaaaaacaggaaggcaaaatgccgcaaaaaagggaataagggcgacacggaaatgttgaatactcatactcttcctttttcaatattattgaagcatttatcagggttattgtctcatgagcggatacatatttgaatgtatttagaaaaataaacaaataggggttccgcgcacatttccccgaaaagtgccacctgacgtcgacggatcgggagatctcccgatcccctatggtgcactctcagtacaatctgctctgatgccgcatagttaagccagtatctgctccctgcttgtgtgttggagggcctatttcccatgattccttcatatttgcatatacgatacaaggctgttagagagataattagaattaatttgactgtaaacacaaagatattagtacaaaatacgtgacgtagaaagtaataatttcttgggtagtttgcagttttaaaattatgttttaaaatggactatcatatgcttaccgtaacttgaaagtatttcgatttcttggctttatatatcttgtggaaaggacgaaacaccgtaatacgactcactatagggtctagaattcctgtgaactgccgagtaggtagctgataaccggcggcgcgtccttgttctaacccggcgcgcgtgaactgccgagtaggtagctgataacgttgcagcggccgctttttttcttctgaggcggaaagaaccagctggggctctagggggtatccccacgcgccctgtagcggcgaggtcgctgagtagtgcgcgagcaaaatttaagctacaacaaggcaaggcttgaccgacaattgcatgaagaatctgcttagggttaggcgttttgcgctgcttcgcgatgtacgggccagatatacgcgttgacattgattattgactagttattaatagtaatcaattacggggtcattagttcatagcccatatatggagttccgcgttacataacttacggtaaatggcccgcctggctgaccgcccaacgacccccgcccattgacgtcaataatgacgtatgttcccatagtaacgccaatagggactttccattgacgtcaatgggtggagtatttacggtaaactgcccacttggcagtacatcaagtgtatcatatgccaagtacgccccctattgacgtcaatgacggtaaatggcccgcctggcattatgcccagtacatgaccttatgggactttcctacttggcagtacatctacgtattagtcatcgctattaccatggtgatgcggttttggcagtacatcaatgggcgtggatagcggtttgactcacggggatttccaagtctccaccccattgacgtcaatgggagtttgttttggcaccaaaatcaacgggactttccaaaatgtcgtaacaactccgccccattgacgcaaatgggcggtaggcgtgtacggtgggaggtctatataagcagagctctctggctaactagagaacccactgcttactggcttatcgaaattaatacgactcactatagggagacccaagctggctagcgtttaaacttaagcttgccaccatggggcccaagaagaaaaggaaggtcggctcagccatgaagctgccaaccaacctggcctacgagcggagcatcgaccccagcgacgtgtgcttcttcgtggtgtggccagacgataggaaaacccccctgacatacaattcccgcacactgctgggacagatggaggcagccagcctggcatacgacgtgtccggccagcctatcaagtctgccaccgcagaggccctggcacagggcaaccctcaccaggtggatttctgccatgtgccatacggcgccagccacatcgagtgtagcttctccgtgtcttttagctccgagctgcggcagccatataagtgtaattctagcaaggtgaagcagacactggtgcagctggtggagctgtacgaaaccaagatcggctggacagagctggccacccggtatctgatgaatatctgcaacggcaagtggctgtggaagaatacaagaaaggcctactgttggaacatcgtgctgaccccctggccttggaatggcgagaaagtgggcttcgaggacatcaggaccaactatacatcccgccaggacttcaagaacaataagaattggtctgccatcgtggagatgatcaagacagccttctcctctaccgacggcctggccatctttgaggtgagggccacactgcacctgccaaccaacgcaatggtgcgccctagccaggtgttcacagagaaggagagcggctccaagtctaagagcaagacccagaactctagggtgttccagagcaccacaatcgatggagagcggagcccaatcctgggagcctttaagacaggcgccgccatcgccaccatcgacgattggtatccagaggcaaccgagcctctgagggtgggccgctttggagtgcacagggaggacgtgacatgctacagacacccatctaccggcaaggatttctttagcatcctccagcaggccgagcactatatcgaggtgctgagtgccaacaagacacccgcccaggaaaccatcaatgacatgcacttcctgatggccaacctgatcaagggcggcatgtttcagcacaagggcgacgggtccggagagggaaggggctctctgctgacctgcggcgacgtggaggagaaccctggacctggaccgaaaaagaagcgaaaagttggatccggcatgttcctccagaggccaaagccctacagcgacgagtccctggagtctttctttatcagagtggccaataagaacggctatggcgatgtgcacaggttcctggaggccaccaagcggttcctccaggacatcgatcacaacggctaccagacctttccaacagacatcaccaggatcaatccctatagcgccaagaacagctcctctgcccgcacagcctccttcctgaagctggcccagctgacctttaatgagccacctgagctgctgggactggccatcaatcggacaaacatgaagtactccccttctaccagcgccgtggtgagaggagcagaggtgttcccacggtccctgctgagaacccacagcatcccatgctgtcccctgtgcctgagagagaacggctacgccagctatctgtggcacttccagggctacgagtattgtcactcccacaatgtgcctctgatcaccacatgctcttgtggcaaggagtttgactacagggtgagcggcctgaagggcatctgctgtaagtgcaaggagccaatcaccctgacaagccgcgagaatggccacgaggccgcctgtaccgtgtccaactggctggccggccacgagtctaagcctctgccaaacctgcccaagtcctatagatggggactggtgcactggtggatgggcatcaaggactccgagttcgatcacttctcttttgtgcagttctttagcaactggcctcggagcttccactccatcatcgaggacgaggtggagtttaatctggagcacgccgtggtgtccacctctgagctgcggctgaaggatctgctgggcagactgttctttggcagcatcaggctgccagagcgcaatctccagcacaacatcatcctgggcgagctgctgtgctacctggagaaccgcctgtggcaggacaagggcctgatcgccaatctgaagatgaacgccctggaggccacagtgatgctgaattgttccctggatcagatcgcctctatggtggagcagcgcatcctgaagcccaatagaaagtccaagcctaactctccactggacgtgaccgattacctgttccactttggcgacatcttctgcctgtggctggccgagtttcagtccgatgagttcaaccggagcttctacgtgagccggtggggctcgagcgagggaaggggctccctgctgacttgtggcgacgtggaggagaaccctggacctagcccaaaaaagaaacgcaaggtgggcaccggtgtgaagtggtactataagaccatcacattcctgcctgagctgtgcaacaatgagtctctggcagcaaagtgtctgcgggtgctgcacggcttcaattaccagtatgagacaagaaacatcggcgtgtcctttccactgtggtgcgacgccaccgtgggcaagaagatctctttcgtgagcaagaacaagatcgagctggatctgctgctgaagcagcactacttcgtgcagatggagcagctccagtattttcacatcagcaatacagtgctggtgcccgaggactgcacctacgtgagctttcggagatgtcagtccatcgataagctgaccgcagcaggactggcaagaaagatcaggcgcctggagaagcgggccctgtccagaggcgagcagttcgacccatctagctttgcccagaaggagcacacagccatcgcccactaccactctctgggcgagtcctctaagcagaccaatcggaacttcagactgaacatcaggatgctgagtgagcagccaagggagggcaattccatcttcagctcctatggcctgagcaattccgagaactcttttcagcccgtgcctctgatcggtaaccaggagggaagaggctccctgctgacatgtggcgacgtggaagaaaaccctggacctggccctaaaaaaaagcggaaggtaggtaccggcatgcagaccctgaaggagctgatcgccagcaaccccgacgatctgaccacagagctgaagagggccttccgccccctgacacctcacatcgccatcgacggcaatgagctggatgccctgaccatcctggtgaacctgacagacaagaccgacgatcagaaggacctgctggatcgggccaagtgtaagcagaagctgagagatgagaagtggtgggcctcctgcatcaactgcgtgaactacaggcagtctcacaacccaaagttccccgacatccgcagcgagggcgtgatcagaacacaggccctgggcgagctgcccagctttctgctgtctagctccaagatcccaccctaccactggtcttatagccacgactctaagtatgtgaataagagcgccttcctgaccaacgagttttgctgggatggcgagatcagctgtctgggcgagctgctgaaggacgccgatcaccctctgtggaacacactgaagaagctgggctgctcccagaaaacctgtaaggcaatggccaagcagctggccgacatcacactgaccacaatcaatgtgaccctggcccccaactacctgacacagatctctctgcctgactccgatacatcttatatctccctgtctcctgtggccagcctgtccatgcagagccacttccaccagaggctccaggatgagaacaggcactccgccatcacccggttcagccggaccacaaatatgggagtgacagcaatgacctgcggaggagccttcaggatgctgaaaagcggcgccaagttttctagccctccacaccaccggctgaacagcaagagatcctggctgacctccgagcatgtgcagtctctgaagcagtaccagcggctgaataagagcctgatcccagagaactccagaatcgccctgcggagaaagtataagatcgagctgcaaaatatggtgcgctcttggttcgccatgcaggaccacacactggatagcaatatcctgatccagcacctgaaccacgacctgtcctacctgggcgccaccaagcggttcgcctatgatcccgccatgacaaagctgtttaccgagctgctgaagagagagctgtctaacagcatcaacaatggcgagcagcacaccaatggcagctttctggtgctgcctaacatcagagtgtgcggagcaaccgccctgtcctctcctgtgacagtgggcatcccatccctgaccgccttctttggcttcgtgcacgcctttgagaggaatatcaaccgcaccacaagctccttcagggtggagagctttgccatctgcgtgcaccagctgcatgtggagaagcgcggcctgacagccgagttcgtggagaagggcgacggaacaatctccgccccagcaaccagggacgattggcagtgtgatgtggtgttctctctgatcctgaataccaactttgcccagcacatcgaccaggatacactcgtcacctctctgccaaagaggctggcaaggggaagcgccaagatcgccatcgacgatttcaagcacatcaactccttttctacactggaaaccgcaatcgagagcctgccaatcgaggcaggcagatggctgagtctgtacgcccagtccaacaataacctgtctgacctgctggccgccatgacagaggatcaccagctgatggccagctgcgtgggctaccacctgctggaggagcctaaagacaagccaaactccctcagaggctataagcacgccatcgccgagtgtatcatcggcctgatcaattccatcaccttctctagcgagacagatcccaacaccatcttttggagcctgaagaattaccagaactatctggtggtgcagcctcgctccatcaatgacgaaaccaccgataagtcctctctgtgatctagagggcccgtttaaacccgctgatcagcctcgactgtgccttctagttgccagccatctgttgtttgcccctcccccgtgccttccttgaccctggaaggtgccactcccactgtcctttcctaataaaatgaggaaattgcatcgcattgtctgagtaggtgtcattctattctggggggtggggtggggcaggacagcaagggggaggattgggaaagacaatagcaggcatgctggggatgcggtgggctctatggcttctgaggcggaaagaaccagctggggctctagggggtatccccacgcgccctgtagcggcgcattaagcgcggcgggtgtggtggttacgcgcagcgtgaccgctacacttgccagcgccctagcgcccgctcctttcgctttcttcccttcctttctcgccacgttcgccggctttccccgtcaagctctaaatcgggggctccctttagggttccgatttagtgctttacggcacctcgaccccaaaaaacttgattagggtgatggttcacgtagtgggccatcgccctgatagacggtttttcgccctttgacgttggagtccacgttctttaatagtggactcttgttccaaactggaacaacactcaaccctatctcggtctattcttttgatttataagggattttgccgatttcggcctattggttaaaaaatgagctgatttaacaaaaatttaacgcgaattaattctgtggaatgtgtgtcagttagggtgtggaaagtccccaggctccccagcaggcagaagtatgcaaagcatgcatctcaattagtcagcaaccaggtgtggaaagtccccaggctccccagcaggcagaagtatgcaaagcatgcatctcaattagtcagcaaccatagtcccgcccctaactccgcccatcccgcccctaactccgcccagttccgcccattctccgccccatggctgactaattttttttatttatgcagaggccgaggccgcctctgcctctgagctattccagaagtagtgaggaggcttttttggaggcctaggcttttgcaaaaagctcccgggagcttgtatatccattttcggatctgatcaagagacaggatgaggatcgtttcgcatgattgaacaagatggattgcacgcaggttctccggccgcttgggtggagaggctattcggctatgactgggcacaacagacaatcggctgctctgatgccgccgtgttccggctgtcagcgcaggggcgcccggttctttttgtcaagaccgacctgtccggtgccctgaatgaactgcaggacgaggcagcgcggctatcgtggctggccacgacgggcgttccttgcgcagctgtgctcgacgttgtcactgaagcgggaagggactggctgctattgggcgaagtgccggggcaggatctcctgtcatctcaccttgctcctgccgagaaagtatccatcatggctgatgcaatgcggcggctgcatacgcttgatccggctacctgcccattcgaccaccaagcgaaacatcgcatcgagcgagcacgtactcggatggaagccggtcttgtcgatcaggatgatctggacgaagagcatcaggggctcgcgccagccgaactgttcgccaggctcaaggcgcgcatgcccgacggcgaggatctcgtcgtgacccatggcgatgcctgcttgccgaatatcatggtggaaaatggccgcttttctggattcatcgactgtggccggctgggtgtggcggaccgctatcaggacatagcgttggctacccgtgatattgctgaagagcttggcggcgaatgggctgaccgcttcctcgtgctttacggtatcgccgctcccgattcgcagcgcatcgccttctatcgccttcttgacgagttcttctgagcgggactctggggttcgaaatgaccgaccaagcgacgcccaacctgccatcacgagatttcgattccaccgccgccttctatgaaaggttgggcttcggaatcgttttccgggacgccggctggatgatcctccagcgcggggatctcatgctggagttcttcgcccaccccaacttgtttattgcagcttataatggttacaaataaagcaatagcatcacaaatttcacaaataaagcatttttttcactgcattctagttgtggtttgtccaaactcatcaatgtatcttatcatgtctgtataccgtcgacctctagctagagcttggcgtaatcatggtcatagctgtttcctgtgtgaaattgttatccgctcacaattccacacaacatacgagccggaagcataaagtgtaaagcctggggtgcctaatgagtgagctaactcacattaattgcgttgcgctcactgcccgctttccagtcgggaaacctgtcgtgccagctgcattaatgaatcggccaacgcgcggggagaggcggtttgcgtattgggcgctcttccgcttcctcgctcactgactcgctgcgctcggtcgttcggctgcggcgagcggtatcagctcactcaaaggcggtaatacggttatccacagaatcaggggataacgcaggaaagaacatgtgagcaaaaggccagcaaaaggccaggaaccgtaaaaaggccgcgttgctggcgtttttccataggctccgcccccctgacgagcatcacaaaaatcgacgctcaagtcagaggtggcgaaacccgacaggactataaagataccaggcgtttccccctggaagctccctcgtgcgctctcctgttccgaccctgccgcttaccggatacctgtccgcctttctcccttcgggaagcgtggcgctttctcatagctcacgctgtaggtatctcagttcggtgtaggtcgttcgctccaagctgggctgtgtgcacgaaccccccgttcagcccgaccgctgcgccttatccggtaactatcgtcttgagtccaacccggtaagacacgacttatcgccactggcagcagccactggtaacaggattagcagagcgaggtatgtaggcggtgctacagagttcttgaagtggtggcctaactacggctacactagaagaacagtatttggtatctgcgctctgctgaagccagttaccttcggaaaaagagttggtagctcttgatccggcaaacaaaccaccgctggtagcggtttttttgtttgcaagcagcagattacgcgcagaaaaaaaggatctcaagaagatcctttgatcttttctacggggtctgacgctcagtggaacgaaaactcacgttaagggattttggtcatgagattatcaaaaaggatcttcacctagatccttttaaattaaaaatgaagttttaaatcaatctaaagtatatatgagtaaacttggtctgacagttaccaatgcttaatcagtgaggcacctatctcagcgatctgtctatttcgttcatccatagttgcctgactccccgtcgtgtagataactacgatacgggagggcttaccatctggccccagtgctgcaatgataccgcgagacccacgctcaccggctccagatttatcagcaataaaccagccagccggaagggccgagcgcagaagtggtcctgcaactttatccgcctccatccagtctattaattgttgccgggaagctagagtaagtagttcgccagttaatagtttgcgcaacgttgttgccattgctacaggcatcgtggtgtcacgctcgtcgtttggtatggcttcattcagctccggttcccaacgatcaaggcgagttacatgatcccccatgttgtgcaaaaaagcggttagctccttcggtcctccgatcgttgtcagaagtaagttggccgcagtgttatcactcatggttatggcagcactgcataattctcttactgtcatgccatccgtaagatgcttttctgtgactggtgagtactcaaccaagtcattctgagaatagtgtatgcggcgaccgagttgctcttgcccggcgtcaatacgggataataccgcgccacatagcagaactttaaaagtgctcatcattggaaaacgttcttcggggcgaaaactctcaagg

SEQ ID NO: 924 - DNA, 10896 bp, Synthetic construct
  source 1..10896: mol_type = other DNA
atcttaccgctgttgagatccagttcgatgtaacccactcgtgcacccaactgatcttcagcatcttttactttcaccagcgtttctgggtgagcaaaaacaggaaggcaaaatgccgcaaaaaagggaataagggcgacacggaaatgttgaatactcatactcttcctttttcaatattattgaagcatttatcagggttattgtctcatgagcggatacatatttgaatgtatttagaaaaataaacaaataggggttccgcgcacatttccccgaaaagtgccacctgacgtcgacggatcgggagatctcccgatcccctatggtgcactctcagtacaatctgctctgatgccgcatagttaagccagtatctgctccctgcttgtgtgttggagggcctatttcccatgattccttcatatttgcatatacgatacaaggctgttagagagataattagaattaatttgactgtaaacacaaagatattagtacaaaatacgtgacgtagaaagtaataatttcttgggtagtttgcagttttaaaattatgttttaaaatggactatcatatgcttaccgtaacttgaaagtatttcgatttcttggctttatatatcttgtggaaaggacgaaacaccgtaatacgactcactatagggtctagaattcctgtgaactgccgagtaggtagctgataacaaagcactcatttaactggtattgcggagccagtgaactgccgagtaggtagctgataacgttgcagcggccgctttttttcttctgaggcggaaagaaccagctggggctctagggggtatccccacgcgccctgtagcggcgaggtcgctgagtagtgcgcgagcaaaatttaagctacaacaaggcaaggcttgaccgacaattgcatgaagaatctgcttagggttaggcgttttgcgctgcttcgcgatgtacgggccagatatacgcgttgacattgattattgactagttattaatagtaatcaattacggggtcattagttcatagcccatatatggagttccgcgttacataacttacggtaaatggcccgcctggctgaccgcccaacgacccccgcccattgacgtcaataatgacgtatgttcccatagtaacgccaatagggactttccattgacgtcaatgggtggagtatttacggtaaactgcccacttggcagtacatcaagtgtatcatatgccaagtacgccccctattgacgtcaatgacggtaaatggcccgcctggcattatgcccagtacatgaccttatgggactttcctacttggcagtacatctacgtattagtcatcgctattaccatggtgatgcggttttggcagtacatcaatgggcgtggatagcggtttgactcacggggatttccaagtctccaccccattgacgtcaatgggagtttgttttggcaccaaaatcaacgggactttccaaaatgtcgtaacaactccgccccattgacgcaaatgggcggtaggcgtgtacggtgggaggtctatataagcagagctctctggctaactagagaacccactgcttactggcttatcgaaattaatacgactcactatagggagacccaagctggctagcgtttaaacttaagcttgccaccatggggcccaagaagaaaaggaaggtcggctcagccatgaagctgccaaccaacctggcctacgagcggagcatcgaccccagcgacgtgtgcttcttcgtggtgtggccagacgataggaaaacccccctgacatacaattcccgcacactgctgggacagatggaggcagccagcctggcatacgacgtgtccggccagcctatcaagtctgccaccgcagaggccctggcacagggcaaccctcaccaggtggatttctgccatgtgccatacggcgccagccacatcgagtgtagcttctccgtgtcttttagctccgagctgcggcagccatataagtgtaattctagcaaggtgaagcagacactggtgcagctggtggagctgtacgaaaccaagatcggctggacagagctggccacccggtatctgatgaatatctgcaacggcaagtggctgtggaagaatacaagaaaggcctactgttggaacatcgtgctgaccccctggccttggaatggcgagaaagtgggcttcgaggacatcaggaccaactatacatcccgccaggacttcaagaacaataagaattggtctgccatcgtggagatgatcaagacagccttctcctctaccgacggcctggccatctttgaggtgagggccacactgcacctgccaaccaacgcaatggtgcgccctagccaggtgttcacagagaaggagagcggctccaagtctaagagcaagacccagaactctagggtgttccagagcaccacaatcgatggagagcggagcccaatcctgggagcctttaagacaggcgccgccatcgccaccatcgacgattggtatccagaggcaaccgagcctctgagggtgggccgctttggagtgcacagggaggacgtgacatgctacagacacccatctaccggcaaggatttctttagcatcctccagcaggccgagcactatatcgaggtgctgagtgccaacaagacacccgcccaggaaaccatcaatgacatgcacttcctgatggccaacctgatcaagggcggcatgtttcagcacaagggcgacgggtccggagagggaaggggctctctgctgacctgcggcgacgtggaggagaaccctggacctggaccgaaaaagaagcgaaaagttggatccggcatgttcctccagaggccaaagccctacagcgacgagtccctggagtctttctttatcagagtggccaataagaacggctatggcgatgtgcacaggttcctggaggccaccaagcggttcctccaggacatcgatcacaacggctaccagacctttccaacagacatcaccaggatcaatccctatagcgccaagaacagctcctctgcccgcacagcctccttcctgaagctggcccagctgacctttaatgagccacctgagctgctgggactggccatcaatcggacaaacatgaagtactccccttctaccagcgccgtggtgagaggagcagaggtgttcccacggtccctgctgagaacccacagcatcccatgctgtcccctgtgcctgagagagaacggctacgccagctatctgtggcacttccagggctacgagtattgtcactcccacaatgtgcctctgatcaccacatgctcttgtggcaaggagtttgactacagggtgagcggcctgaagggcatctgctgtaagtgcaaggagccaatcaccctgacaagccgcgagaatggccacgaggccgcctgtaccgtgtccaactggctggccggccacgagtctaagcctctgccaaacctgcccaagtcctatagatggggactggtgcactggtggatgggcatcaaggactccgagttcgatcacttctcttttgtgcagttctttagcaactggcctcggagcttccactccatcatcgaggacgaggtggagtttaatctggagcacgccgtggtgtccacctctgagctgcggctgaaggatctgctgggcagactgttctttggcagcatcaggctgccagagcgcaatctccagcacaacatcatcctgggcgagctgctgtgctacctggagaaccgcctgtggcaggacaagggcctgatcgccaatctgaagatgaacgccctggaggccacagtgatgctgaattgttccctggatcagatcgcctctatggtggagcagcgcatcctgaagcccaatagaaagtccaagcctaactctccactggacgtgaccgattacctgttccactttggcgacatcttctgcctgtggctggccgagtttcagtccgatgagttcaaccggagcttctacgtgagccggtggggctcgagcgagggaaggggctccctgctgacttgtggcgacgtggaggagaaccctggacctagcccaaaaaagaaacgcaaggtgggcaccggtgtgaagtggtactataagaccatcacattcctgcctgagctgtgcaacaatgagtctctggcagcaaagtgtctgcgggtgctgcacggcttcaattaccagtatgagacaagaaacatcggcgtgtcctttccactgtggtgcgacgccaccgtgggcaagaagatctctttcgtgagcaagaacaagatcgagctggatctgctgctgaagcagcactacttcgtgcagatggagcagctccagtattttcacatcagcaatacagtgctggtgcccgaggactgcacctacgtgagctttcggagatgtcagtccatcgataagctgaccgcagcaggactggcaagaaagatcaggcgcctggagaagcgggccctgtccagaggcgagcagttcgacccatctagctttgcccagaaggagcacacagccatcgcccactaccactctctgggcgagtcctctaagcagaccaatcggaacttcagactgaacatcaggatgctgagtgagcagccaagggagggcaattccatcttcagctcctatggcctgagcaattccgagaactcttttcagcccgtgcctctgatcggtaaccaggagggaagaggctccctgctgacatgtggcgacgtggaagaaaaccctggacctggccctaaaaaaaagcggaaggtaggtaccggcatgcagaccctgaaggagctgatcgccagcaaccccgacgatctgaccacagagctgaagagggccttccgccccctgacacctcacatcgccatcgacggcaatgagctggatgccctgaccatcctggtgaacctgacagacaagaccgacgatcagaaggacctgctggatcgggccaagtgtaagcagaagctgagagatgagaagtggtgggcctcctgcatcaactgcgtgaactacaggcagtctcacaacccaaagttccccgacatccgcagcgagggcgtgatcagaacacaggccctgggcgagctgcccagctttctgctgtctagctccaagatcccaccctaccactggtcttatagccacgactctaagtatgtgaataagagcgccttcctgaccaacgagttttgctgggatggcgagatcagctgtctgggcgagctgctgaaggacgccgatcaccctctgtggaacacactgaagaagctgggctgctcccagaaaacctgtaaggcaatggccaagcagctggccgacatcacactgaccacaatcaatgtgaccctggcccccaactacctgacacagatctctctgcctgactccgatacatcttatatctccctgtctcctgtggccagcctgtccatgcagagccacttccaccagaggctccaggatgagaacaggcactccgccatcacccggttcagccggaccacaaatatgggagtgacagcaatgacctgcggaggagccttcaggatgctgaaaagcggcgccaagttttctagccctccacaccaccggctgaacagcaagagatcctggctgacctccgagcatgtgcagtctctgaagcagtaccagcggctgaataagagcctgatcccagagaactccagaatcgccctgcggagaaagtataagatcgagctgcaaaatatggtgcgctcttggttcgccatgcaggaccacacactggatagcaatatcctgatccagcacctgaaccacgacctgtcctacctgggcgccaccaagcggttcgcctatgatcccgccatgacaaagctgtttaccgagctgctgaagagagagctgtctaacagcatcaacaatggcgagcagcacaccaatggcagctttctggtgctgcctaacatcagagtgtgcggagcaaccgccctgtcctctcctgtgacagtgggcatcccatccctgaccgccttctttggcttcgtgcacgcctttgagaggaatatcaaccgcaccacaagctccttcagggtggagagctttgccatctgcgtgcaccagctgcatgtggagaagcgcggcctgacagccgagttcgtggagaagggcgacggaacaatctccgccccagcaaccagggacgattggcagtgtgatgtggtgttctctctgatcctgaataccaactttgcccagcacatcgaccaggatacactcgtcacctctctgccaaagaggctggcaaggggaagcgccaagatcgccatcgacgatttcaagcacatcaactccttttctacactggaaaccgcaatcgagagcctgccaatcgaggcaggcagatggctgagtctgtacgcccagtccaacaataacctgtctgacctgctggccgccatgacagaggatcaccagctgatggccagctgcgtgggctaccacctgctggaggagcctaaagacaagccaaactccctcagaggctataagcacgccatcgccgagtgtatcatcggcctgatcaattccatcaccttctctagcgagacagatcccaacaccatcttttggagcctgaagaattaccagaactatctggtggtgcagcctcgctccatcaatgacgaaaccaccgataagtcctctctgtgatctagagggcccgtttaaacccgctgatcagcctcgactgtgccttctagttgccagccatctgttgtttgcccctcccccgtgccttccttgaccctggaaggtgccactcccactgtcctttcctaataaaatgaggaaattgcatcgcattgtctgagtaggtgtcattctattctggggggtggggtggggcaggacagcaagggggaggattgggaaagacaatagcaggcatgctggggatgcggtgggctctatggcttctgaggcggaaagaaccagctggggctctagggggtatccccacgcgccctgtagcggcgcattaagcgcggcgggtgtggtggttacgcgcagcgtgaccgctacacttgccagcgccctagcgcccgctcctttcgctttcttcccttcctttctcgccacgttcgccggctttccccgtcaagctctaaatcgggggctccctttagggttccgatttagtgctttacggcacctcgaccccaaaaaacttgattagggtgatggttcacgtagtgggccatcgccctgatagacggtttttcgccctttgacgttggagtccacgttctttaatagtggactcttgttccaaactggaacaacactcaaccctatctcggtctattcttttgatttataagggattttgccgatttcggcctattggttaaaaaatgagctgatttaacaaaaatttaacgcgaattaattctgtggaatgtgtgtcagttagggtgtggaaagtccccaggctccccagcaggcagaagtatgcaaagcatgcatctcaattagtcagcaaccaggtgtggaaagtccccaggctccccagcaggcagaagtatgcaaagcatgcatctcaattagtcagcaaccatagtcccgcccctaactccgcccatcccgcccctaactccgcccagttccgcccattctccgccccatggctgactaattttttttatttatgcagaggccgaggccgcctctgcctctgagctattccagaagtagtgaggaggcttttttggaggcctaggcttttgcaaaaagctcccgggagcttgtatatccattttcggatctgatcaagagacaggatgaggatcgtttcgcatgattgaacaagatggattgcacgcaggttctccggccgcttgggtggagaggctattcggctatgactgggcacaacagacaatcggctgctctgatgccgccgtgttccggctgtcagcgcaggggcgcccggttctttttgtcaagaccgacctgtccggtgccctgaatgaactgcaggacgaggcagcgcggctatcgtggctggccacgacgggcgttccttgcgcagctgtgctcgacgttgtcactgaagcgggaagggactggctgctattgggcgaagtgccggggcaggatctcctgtcatctcaccttgctcctgccgagaaagtatccatcatggctgatgcaatgcggcggctgcatacgcttgatccggctacctgcccattcgaccaccaagcgaaacatcgcatcgagcgagcacgtactcggatggaagccggtcttgtcgatcaggatgatctggacgaagagcatcaggggctcgcgccagccgaactgttcgccaggctcaaggcgcgcatgcccgacggcgaggatctcgtcgtgacccatggcgatgcctgcttgccgaatatcatggtggaaaatggccgcttttctggattcatcgactgtggccggctgggtgtggcggaccgctatcaggacatagcgttggctacccgtgatattgctgaagagcttggcggcgaatgggctgaccgcttcctcgtgctttacggtatcgccgctcccgattcgcagcgcatcgccttctatcgccttcttgacgagttcttctgagcgggactctggggttcgaaatgaccgaccaagcgacgcccaacctgccatcacgagatttcgattccaccgccgccttctatgaaaggttgggcttcggaatcgttttccgggacgccggctggatgatcctccagcgcggggatctcatgctggagttcttcgcccaccccaacttgtttattgcagcttataatggttacaaataaagcaatagcatcacaaatttcacaaataaagcatttttttcactgcattctagttgtggtttgtccaaactcatcaatgtatcttatcatgtctgtataccgtcgacctctagctagagcttggcgtaatcatggtcatagctgtttcctgtgtgaaattgttatccgctcacaattccacacaacatacgagccggaagcataaagtgtaaagcctggggtgcctaatgagtgagctaactcacattaattgcgttgcgctcactgcccgctttccagtcgggaaacctgtcgtgccagctgcattaatgaatcggccaacgcgcggggagaggcggtttgcgtattgggcgctcttccgcttcctcgctcactgactcgctgcgctcggtcgttcggctgcggcgagcggtatcagctcactcaaaggcggtaatacggttatccacagaatcaggggataacgcaggaaagaacatgtgagcaaaaggccagcaaaaggccaggaaccgtaaaaaggccgcgttgctggcgtttttccataggctccgcccccctgacgagcatcacaaaaatcgacgctcaagtcagaggtggcgaaacccgacaggactataaagataccaggcgtttccccctggaagctccctcgtgcgctctcctgttccgaccctgccgcttaccggatacctgtccgcctttctcccttcgggaagcgtggcgctttctcatagctcacgctgtaggtatctcagttcggtgtaggtcgttcgctccaagctgggctgtgtgcacgaaccccccgttcagcccgaccgctgcgccttatccggtaactatcgtcttgagtccaacccggtaagacacgacttatcgccactggcagcagccactggtaacaggattagcagagcgaggtatgtaggcggtgctacagagttcttgaagtggtggcctaactacggctacactagaagaacagtatttggtatctgcgctctgctgaagccagttaccttcggaaaaagagttggtagctcttgatccggcaaacaaaccaccgctggtagcggtttttttgtttgcaagcagcagattacgcgcagaaaaaaaggatctcaagaagatcctttgatcttttctacggggtctgacgctcagtggaacgaaaactcacgttaagggattttggtcatgagattatcaaaaaggatcttcacctagatccttttaaattaaaaatgaagttttaaatcaatctaaagtatatatgagtaaacttggtctgacagttaccaatgcttaatcagtgaggcacctatctcagcgatctgtctatttcgttcatccatagttgcctgactccccgtcgtgtagataactacgatacgggagggcttaccatctggccccagtgctgcaatgataccgcgagacccacgctcaccggctccagatttatcagcaataaaccagccagccggaagggccgagcgcagaagtggtcctgcaactttatccgcctccatccagtctattaattgttgccgggaagctagagtaagtagttcgccagttaatagtttgcgcaacgttgttgccattgctacaggcatcgtggtgtcacgctcgtcgtttggtatggcttcattcagctccggttcccaacgatcaaggcgagttacatgatcccccatgttgtgcaaaaaagcggttagctccttcggtcctccgatcgttgtcagaagtaagttggccgcagtgttatcactcatggttatggcagcactgcataattctcttactgtcatgccatccgtaagatgcttttctgtgactggtgagtactcaaccaagtcattctgagaatagtgtatgcggcgaccgagttgctcttgcccggcgtcaatacgggataataccgcgccacatagcagaactttaaaagtgctcatcattggaaaacgttcttcggggcgaaaactctcaagg

SEQ ID NO: 925 - DNA, 10896 bp, Synthetic construct
  source 1..10896: mol_type = other DNA
atcttaccgctgttgagatccagttcgatgtaacccactcgtgcacccaactgatcttcagcatcttttactttcaccagcgtttctgggtgagcaaaaacaggaaggcaaaatgccgcaaaaaagggaataagggcgacacggaaatgttgaatactcatactcttcctttttcaatattattgaagcatttatcagggttattgtctcatgagcggatacatatttgaatgtatttagaaaaataaacaaataggggttccgcgcacatttccccgaaaagtgccacctgacgtcgacggatcgggagatctcccgatcccctatggtgcactctcagtacaatctgctctgatgccgcatagttaagccagtatctgctccctgcttgtgtgttggagggcctatttcccatgattccttcatatttgcatatacgatacaaggctgttagagagataattagaattaatttgactgtaaacacaaagatattagtacaaaatacgtgacgtagaaagtaataatttcttgggtagtttgcagttttaaaattatgttttaaaatggactatcatatgcttaccgtaacttgaaagtatttcgatttcttggctttatatatcttgtggaaaggacgaaacaccgtaatacgactcactatagggtctagaattcctgtgaactgccgagtaggtagctgataacgtcttgtttgtcccacccttggtgacgcagaggtgaactgccgagtaggtagctgataacgttgcagcggccgctttttttcttctgaggcggaaagaaccagctggggctctagggggtatccccacgcgccctgtagcggcgaggtcgctgagtagtgcgcgagcaaaatttaagctacaacaaggcaaggcttgaccgacaattgcatgaagaatctgcttagggttaggcgttttgcgctgcttcgcgatgtacgggccagatatacgcgttgacattgattattgactagttattaatagtaatcaattacggggtcattagttcatagcccatatatggagttccgcgttacataacttacggtaaatggcccgcctggctgaccgcccaacgacccccgcccattgacgtcaataatgacgtatgttcccatagtaacgccaatagggactttccattgacgtcaatgggtggagtatttacggtaaactgcccacttggcagtacatcaagtgtatcatatgccaagtacgccccctattgacgtcaatgacggtaaatggcccgcctggcattatgcccagtacatgaccttatgggactttcctacttggcagtacatctacgtattagtcatcgctattaccatggtgatgcggttttggcagtacatcaatgggcgtggatagcggtttgactcacggggatttccaagtctccaccccattgacgtcaatgggagtttgttttggcaccaaaatcaacgggactttccaaaatgtcgtaacaactccgccccattgacgcaaatgggcggtaggcgtgtacggtgggaggtctatataagcagagctctctggctaactagagaacccactgcttactggcttatcgaaattaatacgactcactatagggagacccaagctggctagcgtttaaacttaagcttgccaccatggggcccaagaagaaaaggaaggtcggctcagccatgaagctgccaaccaacctggcctacgagcggagcatcgaccccagcgacgtgtgcttcttcgtggtgtggccagacgataggaaaacccccctgacatacaattcccgcacactgctgggacagatggaggcagccagcctggcatacgacgtgtccggccagcctatcaagtctgccaccgcagaggccctggcacagggcaaccctcaccaggtggatttctgccatgtgccatacggcgccagccacatcgagtgtagcttctccgtgtcttttagctccgagctgcggcagccatataagtgtaattctagcaaggtgaagcagacactggtgcagctggtggagctgtacgaaaccaagatcggctggacagagctggccacccggtatctgatgaatatctgcaacggcaagtggctgtggaagaatacaagaaaggcctactgttggaacatcgtgctgaccccctggccttggaatggcgagaaagtgggcttcgaggacatcaggaccaactatacatcccgccaggacttcaagaacaataagaattggtctgccatcgtggagatgatcaagacagccttctcctctaccgacggcctggccatctttgaggtgagggccacactgcacctgccaaccaacgcaatggtgcgccctagccaggtgttcacagagaaggagagcggctccaagtctaagagcaagacccagaactctagggtgttccagagcaccacaatcgatggagagcggagcccaatcctgggagcctttaagacaggcgccgccatcgccaccatcgacgattggtatccagaggcaaccgagcctctgagggtgggccgctttggagtgcacagggaggacgtgacatgctacagacacccatctaccggcaaggatttctttagcatcctccagcaggccgagcactatatcgaggtgctgagtgccaacaagacacccgcccaggaaaccatcaatgacatgcacttcctgatggccaacctgatcaagggcggcatgtttcagcacaagggcgacgggtccggagagggaaggggctctctgctgacctgcggcgacgtggaggagaaccctggacctggaccgaaaaagaagcgaaaagttggatccggcatgttcctccagaggccaaagccctacagcgacgagtccctggagtctttctttatcagagtggccaataagaacggctatggcgatgtgcacaggttcctggaggccaccaagcggttcctccaggacatcgatcacaacggctaccagacctttccaacagacatcaccaggatcaatccctatagcgccaagaacagctcctctgcccgcacagcctccttcctgaagctggcccagctgacctttaatgagccacctgagctgctgggactggccatcaatcggacaaacatgaagtactccccttctaccagcgccgtggtgagaggagcagaggtgttcccacggtccctgctgagaacccacagcatcccatgctgtcccctgtgcctgagagagaacggctacgccagctatctgtggcacttccagggctacgagtattgtcactcccacaatgtgcctctgatcaccacatgctcttgtggcaaggagtttgactacagggtgagcggcctgaagggcatctgctgtaagtgcaaggagccaatcaccctgacaagccgcgagaatggccacgaggccgcctgtaccgtgtccaactggctggccggccacgagtctaagcctctgccaaacctgcccaagtcctatagatggggactggtgcactggtggatgggcatcaaggactccgagttcgatcacttctcttttgtgcagttctttagcaactggcctcggagcttccactccatcatcgaggacgaggtggagtttaatctggagcacgccgtggtgtccacctctgagctgcggctgaaggatctgctgggcagactgttctttggcagcatcaggctgccagagcgcaatctccagcacaacatcatcctgggcgagctgctgtgctacctggagaaccgcctgtggcaggacaagggcctgatcgccaatctgaagatgaacgccctggaggccacagtgatgctgaattgttccctggatcagatcgcctctatggtggagcagcgcatcctgaagcccaatagaaagtccaagcctaactctccactggacgtgaccgattacctgttccactttggcgacatcttctgcctgtggctggccgagtttcagtccgatgagttcaaccggagcttctacgtgagccggtggggctcgagcgagggaaggggctccctgctgacttgtggcgacgtggaggagaaccctggacctagcccaaaaaagaaacgcaaggtgggcaccggtgtgaagtggtactataagaccatcacattcctgcctgagctgtgcaacaatgagtctctggcagcaaagtgtctgcgggtgctgcacggcttcaattaccagtatgagacaagaaacatcggcgtgtcctttccactgtggtgcgacgccaccgtgggcaagaagatctctttcgtgagcaagaacaagatcgagctggatctgctgctgaagcagcactacttcgtgcagatggagcagctccagtattttcacatcagcaatacagtgctggtgcccgaggactgcacctacgtgagctttcggagatgtcagtccatcgataagctgaccgcagcaggactggcaagaaagatcaggcgcctggagaagcgggccctgtccagaggcgagcagttcgacccatctagctttgcccagaaggagcacacagccatcgcccactaccactctctgggcgagtcctctaagcagaccaatcggaacttcagactgaacatcaggatgctgagtgagcagccaagggagggcaattccatcttcagctcctatggcctgagcaattccgagaactcttttcagcccgtgcctctgatcggtaaccaggagggaagaggctccctgctgacatgtggcgacgtggaagaaaaccctggacctggccctaaaaaaaagcggaaggtaggtaccggcatgcagaccctgaaggagctgatcgccagcaaccccgacgatctgaccacagagctgaagagggccttccgccccctgacacctcacatcgccatcgacggcaatgagctggatgccctgaccatcctggtgaacctgacagacaagaccgacgatcagaaggacctgctggatcgggccaagtgtaagcagaagctgagagatgagaagtggtgggcctcctgcatcaactgcgtgaactacaggcagtctcacaacccaaagttccccgacatccgcagcgagggcgtgatcagaacacaggccctgggcgagctgcccagctttctgctgtctagctccaagatcccaccctaccactggtcttatagccacgactctaagtatgtgaataagagcgccttcctgaccaacgagttttgctgggatggcgagatcagctgtctgggcgagctgctgaaggacgccgatcaccctctgtggaacacactgaagaagctgggctgctcccagaaaacctgtaaggcaatggccaagcagctggccgacatcacactgaccacaatcaatgtgaccctggcccccaactacctgacacagatctctctgcctgactccgatacatcttatatctccctgtctcctgtggccagcctgtccatgcagagccacttccaccagaggctccaggatgagaacaggcactccgccatcacccggttcagccggaccacaaatatgggagtgacagcaatgacctgcggaggagccttcaggatgctgaaaagcggcgccaagttttctagccctccacaccaccggctgaacagcaagagatcctggctgacctccgagcatgtgcagtctctgaagcagtaccagcggctgaataagagcctgatcccagagaactccagaatcgccctgcggagaaagtataagatcgagctgcaaaatatggtgcgctcttggttcgccatgcaggaccacacactggatagcaatatcctgatccagcacctgaaccacgacctgtcctacctgggcgccaccaagcggttcgcctatgatcccgccatgacaaagctgtttaccgagctgctgaagagagagctgtctaacagcatcaacaatggcgagcagcacaccaatggcagctttctggtgctgcctaacatcagagtgtgcggagcaaccgccctgtcctctcctgtgacagtgggcatcccatccctgaccgccttctttggcttcgtgcacgcctttgagaggaatatcaaccgcaccacaagctccttcagggtggagagctttgccatctgcgtgcaccagctgcatgtggagaagcgcggcctgacagccgagttcgtggagaagggcgacggaacaatctccgccccagcaaccagggacgattggcagtgtgatgtggtgttctctctgatcctgaataccaactttgcccagcacatcgaccaggatacactcgtcacctctctgccaaagaggctggcaaggggaagcgccaagatcgccatcgacgatttcaagcacatcaactccttttctacactggaaaccgcaatcgagagcctgccaatcgaggcaggcagatggctgagtctgtacgcccagtccaacaataacctgtctgacctgctggccgccatgacagaggatcaccagctgatggccagctgcgtgggctaccacctgctggaggagcctaaagacaagccaaactccctcagaggctataagcacgccatcgccgagtgtatcatcggcctgatcaattccatcaccttctctagcgagacagatcccaacaccatcttttggagcctgaagaattaccagaactatctggtggtgcagcctcgctccatcaatgacgaaaccaccgataagtcctctctgtgatctagagggcccgtttaaacccgctgatcagcctcgactgtgccttctagttgccagccatctgttgtttgcccctcccccgtgccttccttgaccctggaaggtgccactcccactgtcctttcctaataaaatgaggaaattgcatcgcattgtctgagtaggtgtcattctattctggggggtggggtggggcaggacagcaagggggaggattgggaaagacaatagcaggcatgctggggatgcggtgggctctatggcttctgaggcggaaagaaccagctggggctctagggggtatccccacgcgccctgtagcggcgcattaagcgcggcgggtgtggtggttacgcgcagcgtgaccgctacacttgccagcgccctagcgcccgctcctttcgctttcttcccttcctttctcgccacgttcgccggctttccccgtcaagctctaaatcgggggctccctttagggttccgatttagtgctttacggcacctcgaccccaaaaaacttgattagggtgatggttcacgtagtgggccatcgccctgatagacggtttttcgccctttgacgttggagtccacgttctttaatagtggactcttgttccaaactggaacaacactcaaccctatctcggtctattcttttgatttataagggattttgccgatttcggcctattggttaaaaaatgagctgatttaacaaaaatttaacgcgaattaattctgtggaatgtgtgtcagttagggtgtggaaagtccccaggctccccagcaggcagaagtatgcaaagcatgcatctcaattagtcagcaaccaggtgtggaaagtccccaggctccccagcaggcagaagtatgcaaagcatgcatctcaattagtcagcaaccatagtcccgcccctaactccgcccatcccgcccctaactccgcccagttccgcccattctccgccccatggctgactaattttttttatttatgcagaggccgaggccgcctctgcctctgagctattccagaagtagtgaggaggcttttttggaggcctaggcttttgcaaaaagctcccgggagcttgtatatccattttcggatctgatcaagagacaggatgaggatcgtttcgcatgattgaacaagatggattgcacgcaggttctccggccgcttgggtggagaggctattcggctatgactgggcacaacagacaatcggctgctctgatgccgccgtgttccggctgtcagcgcaggggcgcccggttctttttgtcaagaccgacctgtccggtgccctgaatgaactgcaggacgaggcagcgcggctatcgtggctggccacgacgggcgttccttgcgcagctgtgctcgacgttgtcactgaagcgggaagggactggctgctattgggcgaagtgccggggcaggatctcctgtcatctcaccttgctcctgccgagaaagtatccatcatggctgatgcaatgcggcggctgcatacgcttgatccggctacctgcccattcgaccaccaagcgaaacatcgcatcgagcgagcacgtactcggatggaagccggtcttgtcgatcaggatgatctggacgaagagcatcaggggctcgcgccagccgaactgttcgccaggctcaaggcgcgcatgcccgacggcgaggatctcgtcgtgacccatggcgatgcctgcttgccgaatatcatggtggaaaatggccgcttttctggattcatcgactgtggccggctgggtgtggcggaccgctatcaggacatagcgttggctacccgtgatattgctgaagagcttggcggcgaatgggctgaccgcttcctcgtgctttacggtatcgccgctcccgattcgcagcgcatcgccttctatcgccttcttgacgagttcttctgagcgggactctggggttcgaaatgaccgaccaagcgacgcccaacctgccatcacgagatttcgattccaccgccgccttctatgaaaggttgggcttcggaatcgttttccgggacgccggctggatgatcctccagcgcggggatctcatgctggagttcttcgcccaccccaacttgtttattgcagcttataatggttacaaataaagcaatagcatcacaaatttcacaaataaagcatttttttcactgcattctagttgtggtttgtccaaactcatcaatgtatcttatcatgtctgtataccgtcgacctctagctagagcttggcgtaatcatggtcatagctgtttcctgtgtgaaattgttatccgctcacaattccacacaacatacgagccggaagcataaagtgtaaagcctggggtgcctaatgagtgagctaactcacattaattgcgttgcgctcactgcccgctttccagtcgggaaacctgtcgtgccagctgcattaatgaatcggccaacgcgcggggagaggcggtttgcgtattgggcgctcttccgcttcctcgctcactgactcgctgcgctcggtcgttcggctgcggcgagcggtatcagctcactcaaaggcggtaatacggttatccacagaatcaggggataacgcaggaaagaacatgtgagcaaaaggccagcaaaaggccaggaaccgtaaaaaggccgcgttgctggcgtttttccataggctccgcccccctgacgagcatcacaaaaatcgacgctcaagtcagaggtggcgaaacccgacaggactataaagataccaggcgtttccccctggaagctccctcgtgcgctctcctgttccgaccctgccgcttaccggatacctgtccgcctttctcccttcgggaagcgtggcgctttctcatagctcacgctgtaggtatctcagttcggtgtaggtcgttcgctccaagctgggctgtgtgcacgaaccccccgttcagcccgaccgctgcgccttatccggtaactatcgtcttgagtccaacccggtaagacacgacttatcgccactggcagcagccactggtaacaggattagcagagcgaggtatgtaggcggtgctacagagttcttgaagtggtggcctaactacggctacactagaagaacagtatttggtatctgcgctctgctgaagccagttaccttcggaaaaagagttggtagctcttgatccggcaaacaaaccaccgctggtagcggtttttttgtttgcaagcagcagattacgcgcagaaaaaaaggatctcaagaagatcctttgatcttttctacggggtctgacgctcagtggaacgaaaactcacgttaagggattttggtcatgagattatcaaaaaggatcttcacctagatccttttaaattaaaaatgaagttttaaatcaatctaaagtatatatgagtaaacttggtctgacagttaccaatgcttaatcagtgaggcacctatctcagcgatctgtctatttcgttcatccatagttgcctgactccccgtcgtgtagataactacgatacgggagggcttaccatctggccccagtgctgcaatgataccgcgagacccacgctcaccggctccagatttatcagcaataaaccagccagccggaagggccgagcgcagaagtggtcctgcaactttatccgcctccatccagtctattaattgttgccgggaagctagagtaagtagttcgccagttaatagtttgcgcaacgttgttgccattgctacaggcatcgtggtgtcacgctcgtcgtttggtatggcttcattcagctccggttcccaacgatcaaggcgagttacatgatcccccatgttgtgcaaaaaagcggttagctccttcggtcctccgatcgttgtcagaagtaagttggccgcagtgttatcactcatggttatggcagcactgcataattctcttactgtcatgccatccgtaagatgcttttctgtgactggtgagtactcaaccaagtcattctgagaatagtgtatgcggcgaccgagttgctcttgcccggcgtcaatacgggataataccgcgccacatagcagaactttaaaagtgctcatcattggaaaacgttcttcggggcgaaaactctcaagg

SEQ ID NO: 926 - DNA, 10896 bp, Synthetic construct
  source 1..10896: mol_type = other DNA
atcttaccgctgttgagatccagttcgatgtaacccactcgtgcacccaactgatcttcagcatcttttactttcaccagcgtttctgggtgagcaaaaacaggaaggcaaaatgccgcaaaaaagggaataagggcgacacggaaatgttgaatactcatactcttcctttttcaatattattgaagcatttatcagggttattgtctcatgagcggatacatatttgaatgtatttagaaaaataaacaaataggggttccgcgcacatttccccgaaaagtgccacctgacgtcgacggatcgggagatctcccgatcccctatggtgcactctcagtacaatctgctctgatgccgcatagttaagccagtatctgctccctgcttgtgtgttggagggcctatttcccatgattccttcatatttgcatatacgatacaaggctgttagagagataattagaattaatttgactgtaaacacaaagatattagtacaaaatacgtgacgtagaaagtaataatttcttgggtagtttgcagttttaaaattatgttttaaaatggactatcatatgcttaccgtaacttgaaagtatttcgatttcttggctttatatatcttgtggaaaggacgaaacaccgtaatacgactcactatagggtctagaattcctgtgaactgccgagtaggtagctgataacgcgaggtattcggctccgcgacggaggctaaggtgaactgccgagtaggtagctgataacgttgcagcggccgctttttttcttctgaggcggaaagaaccagctggggctctagggggtatccccacgcgccctgtagcggcgaggtcgctgagtagtgcgcgagcaaaatttaagctacaacaaggcaaggcttgaccgacaattgcatgaagaatctgcttagggttaggcgttttgcgctgcttcgcgatgtacgggccagatatacgcgttgacattgattattgactagttattaatagtaatcaattacggggtcattagttcatagcccatatatggagttccgcgttacataacttacggtaaatggcccgcctggctgaccgcccaacgacccccgcccattgacgtcaataatgacgtatgttcccatagtaacgccaatagggactttccattgacgtcaatgggtggagtatttacggtaaactgcccacttggcagtacatcaagtgtatcatatgccaagtacgccccctattgacgtcaatgacggtaaatggcccgcctggcattatgcccagtacatgaccttatgggactttcctacttggcagtacatctacgtattagtcatcgctattaccatggtgatgcggttttggcagtacatcaatgggcgtggatagcggtttgactcacggggatttccaagtctccaccccattgacgtcaatgggagtttgttttggcaccaaaatcaacgggactttccaaaatgtcgtaacaactccgccccattgacgcaaatgggcggtaggcgtgtacggtgggaggtctatataagcagagctctctggctaactagagaacccactgcttactggcttatcgaaattaatacgactcactatagggagacccaagctggctagcgtttaaacttaagcttgccaccatggggcccaagaagaaaaggaaggtcggctcagccatgaagctgccaaccaacctggcctacgagcggagcatcgaccccagcgacgtgtgcttcttcgtggtgtggccagacgataggaaaacccccctgacatacaattcccgcacactgctgggacagatggaggcagccagcctggcatacgacgtgtccggccagcctatcaagtctgccaccgcagaggccctggcacagggcaaccctcaccaggtggatttctgccatgtgccatacggcgccagccacatcgagtgtagcttctccgtgtcttttagctccgagctgcggcagccatataagtgtaattctagcaaggtgaagcagacactggtgcagctggtggagctgtacgaaaccaagatcggctggacagagctggccacccggtatctgatgaatatctgcaacggcaagtggctgtggaagaatacaagaaaggcctactgttggaacatcgtgctgaccccctggccttggaatggcgagaaagtgggcttcgaggacatcaggaccaactatacatcccgccaggacttcaagaacaataagaattggtctgccatcgtggagatgatcaagacagccttctcctctaccgacggcctggccatctttgaggtgagggccacactgcacctgccaaccaacgcaatggtgcgccctagccaggtgttcacagagaaggagagcggctccaagtctaagagcaagacccagaactctagggtgttccagagcaccacaatcgatggagagcggagcccaatcctgggagcctttaagacaggcgccgccatcgccaccatcgacgattggtatccagaggcaaccgagcctctgagggtgggccgctttggagtgcacagggaggacgtgacatgctacagacacccatctaccggcaaggatttctttagcatcctccagcaggccgagcactatatcgaggtgctgagtgccaacaagacacccgcccaggaaaccatcaatgacatgcacttcctgatggccaacctgatcaagggcggcatgtttcagcacaagggcgacgggtccggagagggaaggggctctctgctgacctgcggcgacgtggaggagaaccctggacctggaccgaaaaagaagcgaaaagttggatccggcatgttcctccagaggccaaagccctacagcgacgagtccctggagtctttctttatcagagtggccaataagaacggctatggcgatgtgcacaggttcctggaggccaccaagcggttcctccaggacatcgatcacaacggctaccagacctttccaacagacatcaccaggatcaatccctatagcgccaagaacagctcctctgcccgcacagcctccttcctgaagctggcccagctgacctttaatgagccacctgagctgctgggactggccatcaatcggacaaacatgaagtactccccttctaccagcgccgtggtgagaggagcagaggtgttcccacggtccctgctgagaacccacagcatcccatgctgtcccctgtgcctgagagagaacggctacgccagctatctgtggcacttccagggctacgagtattgtcactcccacaatgtgcctctgatcaccacatgctcttgtggcaaggagtttgactacagggtgagcggcctgaagggcatctgctgtaagtgcaaggagccaatcaccctgacaagccgcgagaatggccacgaggccgcctgtaccgtgtccaactggctggccggccacgagtctaagcctctgccaaacctgcccaagtcctatagatggggactggtgcactggtggatgggcatcaaggactccgagttcgatcacttctcttttgtgcagttctttagcaactggcctcggagcttccactccatcatcgaggacgaggtggagtttaatctggagcacgccgtggtgtccacctctgagctgcggctgaaggatctgctgggcagactgttctttggcagcatcaggctgccagagcgcaatctccagcacaacatcatcctgggcgagctgctgtgctacctggagaaccgcctgtggcaggacaagggcctgatcgccaatctgaagatgaacgccctggaggccacagtgatgctgaattgttccctggatcagatcgcctctatggtggagcagcgcatcctgaagcccaatagaaagtccaagcctaactctccactggacgtgaccgattacctgttccactttggcgacatcttctgcctgtggctggccgagtttcagtccgatgagttcaaccggagcttctacgtgagccggtggggctcgagcgagggaaggggctccctgctgacttgtggcgacgtggaggagaaccctggacctagcccaaaaaagaaacgcaaggtgggcaccggtgtgaagtggtactataagaccatcacattcctgcctgagctgtgcaacaatgagtctctggcagcaaagtgtctgcgggtgctgcacggcttcaattaccagtatgagacaagaaacatcggcgtgtcctttccactgtggtgcgacgccaccgtgggcaagaagatctctttcgtgagcaagaacaagatcgagctggatctgctgctgaagcagcactacttcgtgcagatggagcagctccagtattttcacatcagcaatacagtgctggtgcccgaggactgcacctacgtgagctttcggagatgtcagtccatcgataagctgaccgcagcaggactggcaagaaagatcaggcgcctggagaagcgggccctgtccagaggcgagcagttcgacccatctagctttgcccagaaggagcacacagccatcgcccactaccactctctgggcgagtcctctaagcagaccaatcggaacttcagactgaacatcaggatgctgagtgagcagccaagggagggcaattccatcttcagctcctatggcctgagcaattccgagaactcttttcagcccgtgcctctgatcggtaaccaggagggaagaggctccctgctgacatgtggcgacgtggaagaaaaccctggacctggccctaaaaaaaagcggaaggtaggtaccggcatgcagaccctgaaggagctgatcgccagcaaccccgacgatctgaccacagagctgaagagggccttccgccccctgacacctcacatcgccatcgacggcaatgagctggatgccctgaccatcctggtgaacctgacagacaagaccgacgatcagaaggacctgctggatcgggccaagtgtaagcagaagctgagagatgagaagtggtgggcctcctgcatcaactgcgtgaactacaggcagtctcacaacccaaagttccccgacatccgcagcgagggcgtgatcagaacacaggccctgggcgagctgcccagctttctgctgtctagctccaagatcccaccctaccactggtcttatagccacgactctaagtatgtgaataagagcgccttcctgaccaacgagttttgctgggatggcgagatcagctgtctgggcgagctgctgaaggacgccgatcaccctctgtggaacacactgaagaagctgggctgctcccagaaaacctgtaaggcaatggccaagcagctggccgacatcacactgaccacaatcaatgtgaccctggcccccaactacctgacacagatctctctgcctgactccgatacatcttatatctccctgtctcctgtggccagcctgtccatgcagagccacttccaccagaggctccaggatgagaacaggcactccgccatcacccggttcagccggaccacaaatatgggagtgacagcaatgacctgcggaggagccttcaggatgctgaaaagcggcgccaagttttctagccctccacaccaccggctgaacagcaagagatcctggctgacctccgagcatgtgcagtctctgaagcagtaccagcggctgaataagagcctgatcccagagaactccagaatcgccctgcggagaaagtataagatcgagctgcaaaatatggtgcgctcttggttcgccatgcaggaccacacactggatagcaatatcctgatccagcacctgaaccacgacctgtcctacctgggcgccaccaagcggttcgcctatgatcccgccatgacaaagctgtttaccgagctgctgaagagagagctgtctaacagcatcaacaatggcgagcagcacaccaatggcagctttctggtgctgcctaacatcagagtgtgcggagcaaccgccctgtcctctcctgtgacagtgggcatcccatccctgaccgccttctttggcttcgtgcacgcctttgagaggaatatcaaccgcaccacaagctccttcagggtggagagctttgccatctgcgtgcaccagctgcatgtggagaagcgcggcctgacagccgagttcgtggagaagggcgacggaacaatctccgccccagcaaccagggacgattggcagtgtgatgtggtgttctctctgatcctgaataccaactttgcccagcacatcgaccaggatacactcgtcacctctctgccaaagaggctggcaaggggaagcgccaagatcgccatcgacgatttcaagcacatcaactccttttctacactggaaaccgcaatcgagagcctgccaatcgaggcaggcagatggctgagtctgtacgcccagtccaacaataacctgtctgacctgctggccgccatgacagaggatcaccagctgatggccagctgcgtgggctaccacctgctggaggagcctaaagacaagccaaactccctcagaggctataagcacgccatcgccgagtgtatcatcggcctgatcaattccatcaccttctctagcgagacagatcccaacaccatcttttggagcctgaagaattaccagaactatctggtggtgcagcctcgctccatcaatgacgaaaccaccgataagtcctctctgtgatctagagggcccgtttaaacccgctgatcagcctcgactgtgccttctagttgccagccatctgttgtttgcccctcccccgtgccttccttgaccctggaaggtgccactcccactgtcctttcctaataaaatgaggaaattgcatcgcattgtctgagtaggtgtcattctattctggggggtggggtggggcaggacagcaagggggaggattgggaaagacaatagcaggcatgctggggatgcggtgggctctatggcttctgaggcggaaagaaccagctggggctctagggggtatccccacgcgccctgtagcggcgcattaagcgcggcgggtgtggtggttacgcgcagcgtgaccgctacacttgccagcgccctagcgcccgctcctttcgctttcttcccttcctttctcgccacgttcgccggctttccccgtcaagctctaaatcgggggctccctttagggttccgatttagtgctttacggcacctcgaccccaaaaaacttgattagggtgatggttcacgtagtgggccatcgccctgatagacggtttttcgccctttgacgttggagtccacgttctttaatagtggactcttgttccaaactggaacaacactcaaccctatctcggtctattcttttgatttataagggattttgccgatttcggcctattggttaaaaaatgagctgatttaacaaaaatttaacgcgaattaattctgtggaatgtgtgtcagttagggtgtggaaagtccccaggctccccagcaggcagaagtatgcaaagcatgcatctcaattagtcagcaaccaggtgtggaaagtccccaggctccccagcaggcagaagtatgcaaagcatgcatctcaattagtcagcaaccatagtcccgcccctaactccgcccatcccgcccctaactccgcccagttccgcccattctccgccccatggctgactaattttttttatttatgcagaggccgaggccgcctctgcctctgagctattccagaagtagtgaggaggcttttttggaggcctaggcttttgcaaaaagctcccgggagcttgtatatccattttcggatctgatcaagagacaggatgaggatcgtttcgcatgattgaacaagatggattgcacgcaggttctccggccgcttgggtggagaggctattcggctatgactgggcacaacagacaatcggctgctctgatgccgccgtgttccggctgtcagcgcaggggcgcccggttctttttgtcaagaccgacctgtccggtgccctgaatgaactgcaggacgaggcagcgcggctatcgtggctggccacgacgggcgttccttgcgcagctgtgctcgacgttgtcactgaagcgggaagggactggctgctattgggcgaagtgccggggcaggatctcctgtcatctcaccttgctcctgccgagaaagtatccatcatggctgatgcaatgcggcggctgcatacgcttgatccggctacctgcccattcgaccaccaagcgaaacatcgcatcgagcgagcacgtactcggatggaagccggtcttgtcgatcaggatgatctggacgaagagcatcaggggctcgcgccagccgaactgttcgccaggctcaaggcgcgcatgcccgacggcgaggatctcgtcgtgacccatggcgatgcctgcttgccgaatatcatggtggaaaatggccgcttttctggattcatcgactgtggccggctgggtgtggcggaccgctatcaggacatagcgttggctacccgtgatattgctgaagagcttggcggcgaatgggctgaccgcttcctcgtgctttacggtatcgccgctcccgattcgcagcgcatcgccttctatcgccttcttgacgagttcttctgagcgggactctggggttcgaaatgaccgaccaagcgacgcccaacctgccatcacgagatttcgattccaccgccgccttctatgaaaggttgggcttcggaatcgttttccgggacgccggctggatgatcctccagcgcggggatctcatgctggagttcttcgcccaccccaacttgtttattgcagcttataatggttacaaataaagcaatagcatcacaaatttcacaaataaagcatttttttcactgcattctagttgtggtttgtccaaactcatcaatgtatcttatcatgtctgtataccgtcgacctctagctagagcttggcgtaatcatggtcatagctgtttcctgtgtgaaattgttatccgctcacaattccacacaacatacgagccggaagcataaagtgtaaagcctggggtgcctaatgagtgagctaactcacattaattgcgttgcgctcactgcccgctttccagtcgggaaacctgtcgtgccagctgcattaatgaatcggccaacgcgcggggagaggcggtttgcgtattgggcgctcttccgcttcctcgctcactgactcgctgcgctcggtcgttcggctgcggcgagcggtatcagctcactcaaaggcggtaatacggttatccacagaatcaggggataacgcaggaaagaacatgtgagcaaaaggccagcaaaaggccaggaaccgtaaaaaggccgcgttgctggcgtttttccataggctccgcccccctgacgagcatcacaaaaatcgacgctcaagtcagaggtggcgaaacccgacaggactataaagataccaggcgtttccccctggaagctccctcgtgcgctctcctgttccgaccctgccgcttaccggatacctgtccgcctttctcccttcgggaagcgtggcgctttctcatagctcacgctgtaggtatctcagttcggtgtaggtcgttcgctccaagctgggctgtgtgcacgaaccccccgttcagcccgaccgctgcgccttatccggtaactatcgtcttgagtccaacccggtaagacacgacttatcgccactggcagcagccactggtaacaggattagcagagcgaggtatgtaggcggtgctacagagttcttgaagtggtggcctaactacggctacactagaagaacagtatttggtatctgcgctctgctgaagccagttaccttcggaaaaagagttggtagctcttgatccggcaaacaaaccaccgctggtagcggtttttttgtttgcaagcagcagattacgcgcagaaaaaaaggatctcaagaagatcctttgatcttttctacggggtctgacgctcagtggaacgaaaactcacgttaagggattttggtcatgagattatcaaaaaggatcttcacctagatccttttaaattaaaaatgaagttttaaatcaatctaaagtatatatgagtaaacttggtctgacagttaccaatgcttaatcagtgaggcacctatctcagcgatctgtctatttcgttcatccatagttgcctgactccccgtcgtgtagataactacgatacgggagggcttaccatctggccccagtgctgcaatgataccgcgagacccacgctcaccggctccagatttatcagcaataaaccagccagccggaagggccgagcgcagaagtggtcctgcaactttatccgcctccatccagtctattaattgttgccgggaagctagagtaagtagttcgccagttaatagtttgcgcaacgttgttgccattgctacaggcatcgtggtgtcacgctcgtcgtttggtatggcttcattcagctccggttcccaacgatcaaggcgagttacatgatcccccatgttgtgcaaaaaagcggttagctccttcggtcctccgatcgttgtcagaagtaagttggccgcagtgttatcactcatggttatggcagcactgcataattctcttactgtcatgccatccgtaagatgcttttctgtgactggtgagtactcaaccaagtcattctgagaatagtgtatgcggcgaccgagttgctcttgcccggcgtcaatacgggataataccgcgccacatagcagaactttaaaagtgctcatcattggaaaacgttcttcggggcgaaaactctcaagg

SEQ ID NO: 927 - DNA, 10896 bp, Synthetic construct
  source 1..10896: mol_type = other DNA
atcttaccgctgttgagatccagttcgatgtaacccactcgtgcacccaactgatcttcagcatcttttactttcaccagcgtttctgggtgagcaaaaacaggaaggcaaaatgccgcaaaaaagggaataagggcgacacggaaatgttgaatactcatactcttcctttttcaatattattgaagcatttatcagggttattgtctcatgagcggatacatatttgaatgtatttagaaaaataaacaaataggggttccgcgcacatttccccgaaaagtgccacctgacgtcgacggatcgggagatctcccgatcccctatggtgcactctcagtacaatctgctctgatgccgcatagttaagccagtatctgctccctgcttgtgtgttggagggcctatttcccatgattccttcatatttgcatatacgatacaaggctgttagagagataattagaattaatttgactgtaaacacaaagatattagtacaaaatacgtgacgtagaaagtaataatttcttgggtagtttgcagttttaaaattatgttttaaaatggactatcatatgcttaccgtaacttgaaagtatttcgatttcttggctttatatatcttgtggaaaggacgaaacaccgtaatacgactcactatagggtctagaattcctgtgaactgccgagtaggtagctgataacgctttcacggaggttcgacgcgcttccgcggcgtgaactgccgagtaggtagctgataacgttgcagcggccgctttttttcttctgaggcggaaagaaccagctggggctctagggggtatccccacgcgccctgtagcggcgaggtcgctgagtagtgcgcgagcaaaatttaagctacaacaaggcaaggcttgaccgacaattgcatgaagaatctgcttagggttaggcgttttgcgctgcttcgcgatgtacgggccagatatacgcgttgacattgattattgactagttattaatagtaatcaattacggggtcattagttcatagcccatatatggagttccgcgttacataacttacggtaaatggcccgcctggctgaccgcccaacgacccccgcccattgacgtcaataatgacgtatgttcccatagtaacgccaatagggactttccattgacgtcaatgggtggagtatttacggtaaactgcccacttggcagtacatcaagtgtatcatatgccaagtacgccccctattgacgtcaatgacggtaaatggcccgcctggcattatgcccagtacatgaccttatgggactttcctacttggcagtacatctacgtattagtcatcgctattaccatggtgatgcggttttggcagtacatcaatgggcgtggatagcggtttgactcacggggatttccaagtctccaccccattgacgtcaatgggagtttgttttggcaccaaaatcaacgggactttccaaaatgtcgtaacaactccgccccattgacgcaaatgggcggtaggcgtgtacggtgggaggtctatataagcagagctctctggctaactagagaacccactgcttactggcttatcgaaattaatacgactcactatagggagacccaagctggctagcgtttaaacttaagcttgccaccatggggcccaagaagaaaaggaaggtcggctcagccatgaagctgccaaccaacctggcctacgagcggagcatcgaccccagcgacgtgtgcttcttcgtggtgtggccagacgataggaaaacccccctgacatacaattcccgcacactgctgggacagatggaggcagccagcctggcatacgacgtgtccggccagcctatcaagtctgccaccgcagaggccctggcacagggcaaccctcaccaggtggatttctgccatgtgccatacggcgccagccacatcgagtgtagcttctccgtgtcttttagctccgagctgcggcagccatataagtgtaattctagcaaggtgaagcagacactggtgcagctggtggagctgtacgaaaccaagatcggctggacagagctggccacccggtatctgatgaatatctgcaacggcaagtggctgtggaagaatacaagaaaggcctactgttggaacatcgtgctgaccccctggccttggaatggcgagaaagtgggcttcgaggacatcaggaccaactatacatcccgccaggacttcaagaacaataagaattggtctgccatcgtggagatgatcaagacagccttctcctctaccgacggcctggccatctttgaggtgagggccacactgcacctgccaaccaacgcaatggtgcgccctagccaggtgttcacagagaaggagagcggctccaagtctaagagcaagacccagaactctagggtgttccagagcaccacaatcgatggagagcggagcccaatcctgggagcctttaagacaggcgccgccatcgccaccatcgacgattggtatccagaggcaaccgagcctctgagggtgggccgctttggagtgcacagggaggacgtgacatgctacagacacccatctaccggcaaggatttctttagcatcctccagcaggccgagcactatatcgaggtgctgagtgccaacaagacacccgcccaggaaaccatcaatgacatgcacttcctgatggccaacctgatcaagggcggcatgtttcagcacaagggcgacgggtccggagagggaaggggctctctgctgacctgcggcgacgtggaggagaaccctggacctggaccgaaaaagaagcgaaaagttggatccggcatgttcctccagaggccaaagccctacagcgacgagtccctggagtctttctttatcagagtggccaataagaacggctatggcgatgtgcacaggttcctggaggccaccaagcggttcctccaggacatcgatcacaacggctaccagacctttccaacagacatcaccaggatcaatccctatagcgccaagaacagctcctctgcccgcacagcctccttcctgaagctggcccagctgacctttaatgagccacctgagctgctgggactggccatcaatcggacaaacatgaagtactccccttctaccagcgccgtggtgagaggagcagaggtgttcccacggtccctgctgagaacccacagcatcccatgctgtcccctgtgcctgagagagaacggctacgccagctatctgtggcacttccagggctacgagtattgtcactcccacaatgtgcctctgatcaccacatgctcttgtggcaaggagtttgactacagggtgagcggcctgaagggcatctgctgtaagtgcaaggagccaatcaccctgacaagccgcgagaatggccacgaggccgcctgtaccgtgtccaactggctggccggccacgagtctaagcctctgccaaacctgcccaagtcctatagatggggactggtgcactggtggatgggcatcaaggactccgagttcgatcacttctcttttgtgcagttctttagcaactggcctcggagcttccactccatcatcgaggacgaggtggagtttaatctggagcacgccgtggtgtccacctctgagctgcggctgaaggatctgctgggcagactgttctttggcagcatcaggctgccagagcgcaatctccagcacaacatcatcctgggcgagctgctgtgctacctggagaaccgcctgtggcaggacaagggcctgatcgccaatctgaagatgaacgccctggaggccacagtgatgctgaattgttccctggatcagatcgcctctatggtggagcagcgcatcctgaagcccaatagaaagtccaagcctaactctccactggacgtgaccgattacctgttccactttggcgacatcttctgcctgtggctggccgagtttcagtccgatgagttcaaccggagcttctacgtgagccggtggggctcgagcgagggaaggggctccctgctgacttgtggcgacgtggaggagaaccctggacctagcccaaaaaagaaacgcaaggtgggcaccggtgtgaagtggtactataagaccatcacattcctgcctgagctgtgcaacaatgagtctctggcagcaaagtgtctgcgggtgctgcacggcttcaattaccagtatgagacaagaaacatcggcgtgtcctttccactgtggtgcgacgccaccgtgggcaagaagatctctttcgtgagcaagaacaagatcgagctggatctgctgctgaagcagcactacttcgtgcagatggagcagctccagtattttcacatcagcaatacagtgctggtgcccgaggactgcacctacgtgagctttcggagatgtcagtccatcgataagctgaccgcagcaggactggcaagaaagatcaggcgcctggagaagcgggccctgtccagaggcgagcagttcgacccatctagctttgcccagaaggagcacacagccatcgcccactaccactctctgggcgagtcctctaagcagaccaatcggaacttcagactgaacatcaggatgctgagtgagcagccaagggagggcaattccatcttcagctcctatggcctgagcaattccgagaactcttttcagcccgtgcctctgatcggtaaccaggagggaagaggctccctgctgacatgtggcgacgtggaagaaaaccctggacctggccctaaaaaaaagcggaaggtaggtaccggcatgcagaccctgaaggagctgatcgccagcaaccccgacgatctgaccacagagctgaagagggccttccgccccctgacacctcacatcgccatcgacggcaatgagctggatgccctgaccatcctggtgaacctgacagacaagaccgacgatcagaaggacctgctggatcgggccaagtgtaagcagaagctgagagatgagaagtggtgggcctcctgcatcaactgcgtgaactacaggcagtctcacaacccaaagttccccgacatccgcagcgagggcgtgatcagaacacaggccctgggcgagctgcccagctttctgctgtctagctccaagatcccaccctaccactggtcttatagccacgactctaagtatgtgaataagagcgccttcctgaccaacgagttttgctgggatggcgagatcagctgtctgggcgagctgctgaaggacgccgatcaccctctgtggaacacactgaagaagctgggctgctcccagaaaacctgtaaggcaatggccaagcagctggccgacatcacactgaccacaatcaatgtgaccctggcccccaactacctgacacagatctctctgcctgactccgatacatcttatatctccctgtctcctgtggccagcctgtccatgcagagccacttccaccagaggctccaggatgagaacaggcactccgccatcacccggttcagccggaccacaaatatgggagtgacagcaatgacctgcggaggagccttcaggatgctgaaaagcggcgccaagttttctagccctccacaccaccggctgaacagcaagagatcctggctgacctccgagcatgtgcagtctctgaagcagtaccagcggctgaataagagcctgatcccagagaactccagaatcgccctgcggagaaagtataagatcgagctgcaaaatatggtgcgctcttggttcgccatgcaggaccacacactggatagcaatatcctgatccagcacctgaaccacgacctgtcctacctgggcgccaccaagcggttcgcctatgatcccgccatgacaaagctgtttaccgagctgctgaagagagagctgtctaacagcatcaacaatggcgagcagcacaccaatggcagctttctggtgctgcctaacatcagagtgtgcggagcaaccgccctgtcctctcctgtgacagtgggcatcccatccctgaccgccttctttggcttcgtgcacgcctttgagaggaatatcaaccgcaccacaagctccttcagggtggagagctttgccatctgcgtgcaccagctgcatgtggagaagcgcggcctgacagccgagttcgtggagaagggcgacggaacaatctccgccccagcaaccagggacgattggcagtgtgatgtggtgttctctctgatcctgaataccaactttgcccagcacatcgaccaggatacactcgtcacctctctgccaaagaggctggcaaggggaagcgccaagatcgccatcgacgatttcaagcacatcaactccttttctacactggaaaccgcaatcgagagcctgccaatcgaggcaggcagatggctgagtctgtacgcccagtccaacaataacctgtctgacctgctggccgccatgacagaggatcaccagctgatggccagctgcgtgggctaccacctgctggaggagcctaaagacaagccaaactccctcagaggctataagcacgccatcgccgagtgtatcatcggcctgatcaattccatcaccttctctagcgagacagatcccaacaccatcttttggagcctgaagaattaccagaactatctggtggtgcagcctcgctccatcaatgacgaaaccaccgataagtcctctctgtgatctagagggcccgtttaaacccgctgatcagcctcgactgtgccttctagttgccagccatctgttgtttgcccctcccccgtgccttccttgaccctggaaggtgccactcccactgtcctttcctaataaaatgaggaaattgcatcgcattgtctgagtaggtgtcattctattctggggggtggggtggggcaggacagcaagggggaggattgggaaagacaatagcaggcatgctggggatgcggtgggctctatggcttctgaggcggaaagaaccagctggggctctagggggtatccccacgcgccctgtagcggcgcattaagcgcggcgggtgtggtggttacgcgcagcgtgaccgctacacttgccagcgccctagcgcccgctcctttcgctttcttcccttcctttctcgccacgttcgccggctttccccgtcaagctctaaatcgggggctccctttagggttccgatttagtgctttacggcacctcgaccccaaaaaacttgattagggtgatggttcacgtagtgggccatcgccctgatagacggtttttcgccctttgacgttggagtccacgttctttaatagtggactcttgttccaaactggaacaacactcaaccctatctcggtctattcttttgatttataagggattttgccgatttcggcctattggttaaaaaatgagctgatttaacaaaaatttaacgcgaattaattctgtggaatgtgtgtcagttagggtgtggaaagtccccaggctccccagcaggcagaagtatgcaaagcatgcatctcaattagtcagcaaccaggtgtggaaagtccccaggctccccagcaggcagaagtatgcaaagcatgcatctcaattagtcagcaaccatagtcccgcccctaactccgcccatcccgcccctaactccgcccagttccgcccattctccgccccatggctgactaattttttttatttatgcagaggccgaggccgcctctgcctctgagctattccagaagtagtgaggaggcttttttggaggcctaggcttttgcaaaaagctcccgggagcttgtatatccattttcggatctgatcaagagacaggatgaggatcgtttcgcatgattgaacaagatggattgcacgcaggttctccggccgcttgggtggagaggctattcggctatgactgggcacaacagacaatcggctgctctgatgccgccgtgttccggctgtcagcgcaggggcgcccggttctttttgtcaagaccgacctgtccggtgccctgaatgaactgcaggacgaggcagcgcggctatcgtggctggccacgacgggcgttccttgcgcagctgtgctcgacgttgtcactgaagcgggaagggactggctgctattgggcgaagtgccggggcaggatctcctgtcatctcaccttgctcctgccgagaaagtatccatcatggctgatgcaatgcggcggctgcatacgcttgatccggctacctgcccattcgaccaccaagcgaaacatcgcatcgagcgagcacgtactcggatggaagccggtcttgtcgatcaggatgatctggacgaagagcatcaggggctcgcgccagccgaactgttcgccaggctcaaggcgcgcatgcccgacggcgaggatctcgtcgtgacccatggcgatgcctgcttgccgaatatcatggtggaaaatggccgcttttctggattcatcgactgtggccggctgggtgtggcggaccgctatcaggacatagcgttggctacccgtgatattgctgaagagcttggcggcgaatgggctgaccgcttcctcgtgctttacggtatcgccgctcccgattcgcagcgcatcgccttctatcgccttcttgacgagttcttctgagcgggactctggggttcgaaatgaccgaccaagcgacgcccaacctgccatcacgagatttcgattccaccgccgccttctatgaaaggttgggcttcggaatcgttttccgggacgccggctggatgatcctccagcgcggggatctcatgctggagttcttcgcccaccccaacttgtttattgcagcttataatggttacaaataaagcaatagcatcacaaatttcacaaataaagcatttttttcactgcattctagttgtggtttgtccaaactcatcaatgtatcttatcatgtctgtataccgtcgacctctagctagagcttggcgtaatcatggtcatagctgtttcctgtgtgaaattgttatccgctcacaattccacacaacatacgagccggaagcataaagtgtaaagcctggggtgcctaatgagtgagctaactcacattaattgcgttgcgctcactgcccgctttccagtcgggaaacctgtcgtgccagctgcattaatgaatcggccaacgcgcggggagaggcggtttgcgtattgggcgctcttccgcttcctcgctcactgactcgctgcgctcggtcgttcggctgcggcgagcggtatcagctcactcaaaggcggtaatacggttatccacagaatcaggggataacgcaggaaagaacatgtgagcaaaaggccagcaaaaggccaggaaccgtaaaaaggccgcgttgctggcgtttttccataggctccgcccccctgacgagcatcacaaaaatcgacgctcaagtcagaggtggcgaaacccgacaggactataaagataccaggcgtttccccctggaagctccctcgtgcgctctcctgttccgaccctgccgcttaccggatacctgtccgcctttctcccttcgggaagcgtggcgctttctcatagctcacgctgtaggtatctcagttcggtgtaggtcgttcgctccaagctgggctgtgtgcacgaaccccccgttcagcccgaccgctgcgccttatccggtaactatcgtcttgagtccaacccggtaagacacgacttatcgccactggcagcagccactggtaacaggattagcagagcgaggtatgtaggcggtgctacagagttcttgaagtggtggcctaactacggctacactagaagaacagtatttggtatctgcgctctgctgaagccagttaccttcggaaaaagagttggtagctcttgatccggcaaacaaaccaccgctggtagcggtttttttgtttgcaagcagcagattacgcgcagaaaaaaaggatctcaagaagatcctttgatcttttctacggggtctgacgctcagtggaacgaaaactcacgttaagggattttggtcatgagattatcaaaaaggatcttcacctagatccttttaaattaaaaatgaagttttaaatcaatctaaagtatatatgagtaaacttggtctgacagttaccaatgcttaatcagtgaggcacctatctcagcgatctgtctatttcgttcatccatagttgcctgactccccgtcgtgtagataactacgatacgggagggcttaccatctggccccagtgctgcaatgataccgcgagacccacgctcaccggctccagatttatcagcaataaaccagccagccggaagggccgagcgcagaagtggtcctgcaactttatccgcctccatccagtctattaattgttgccgggaagctagagtaagtagttcgccagttaatagtttgcgcaacgttgttgccattgctacaggcatcgtggtgtcacgctcgtcgtttggtatggcttcattcagctccggttcccaacgatcaaggcgagttacatgatcccccatgttgtgcaaaaaagcggttagctccttcggtcctccgatcgttgtcagaagtaagttggccgcagtgttatcactcatggttatggcagcactgcataattctcttactgtcatgccatccgtaagatgcttttctgtgactggtgagtactcaaccaagtcattctgagaatagtgtatgcggcgaccgagttgctcttgcccggcgtcaatacgggataataccgcgccacatagcagaactttaaaagtgctcatcattggaaaacgttcttcggggcgaaaactctcaagg

SEQ ID NO: 928 - DNA, 10896 bp, Synthetic construct
  source 1..10896: mol_type = other DNA
atcttaccgctgttgagatccagttcgatgtaacccactcgtgcacccaactgatcttcagcatcttttactttcaccagcgtttctgggtgagcaaaaacaggaaggcaaaatgccgcaaaaaagggaataagggcgacacggaaatgttgaatactcatactcttcctttttcaatattattgaagcatttatcagggttattgtctcatgagcggatacatatttgaatgtatttagaaaaataaacaaataggggttccgcgcacatttccccgaaaagtgccacctgacgtcgacggatcgggagatctcccgatcccctatggtgcactctcagtacaatctgctctgatgccgcatagttaagccagtatctgctccctgcttgtgtgttggagggcctatttcccatgattccttcatatttgcatatacgatacaaggctgttagagagataattagaattaatttgactgtaaacacaaagatattagtacaaaatacgtgacgtagaaagtaataatttcttgggtagtttgcagttttaaaattatgttttaaaatggactatcatatgcttaccgtaacttgaaagtatttcgatttcttggctttatatatcttgtggaaaggacgaaacaccgtaatacgactcactatagggtctagaattcctgtgaactgccgagtaggtagctgataacatgttgcagttcggctcgatatcgtttccgctgtgaactgccgagtaggtagctgataacgttgcagcggccgctttttttcttctgaggcggaaagaaccagctggggctctagggggtatccccacgcgccctgtagcggcgaggtcgctgagtagtgcgcgagcaaaatttaagctacaacaaggcaaggcttgaccgacaattgcatgaagaatctgcttagggttaggcgttttgcgctgcttcgcgatgtacgggccagatatacgcgttgacattgattattgactagttattaatagtaatcaattacggggtcattagttcatagcccatatatggagttccgcgttacataacttacggtaaatggcccgcctggctgaccgcccaacgacccccgcccattgacgtcaataatgacgtatgttcccatagtaacgccaatagggactttccattgacgtcaatgggtggagtatttacggtaaactgcccacttggcagtacatcaagtgtatcatatgccaagtacgccccctattgacgtcaatgacggtaaatggcccgcctggcattatgcccagtacatgaccttatgggactttcctacttggcagtacatctacgtattagtcatcgctattaccatggtgatgcggttttggcagtacatcaatgggcgtggatagcggtttgactcacggggatttccaagtctccaccccattgacgtcaatgggagtttgttttggcaccaaaatcaacgggactttccaaaatgtcgtaacaactccgccccattgacgcaaatgggcggtaggcgtgtacggtgggaggtctatataagcagagctctctggctaactagagaacccactgcttactggcttatcgaaattaatacgactcactatagggagacccaagctggctagcgtttaaacttaagcttgccaccatggggcccaagaagaaaaggaaggtcggctcagccatgaagctgccaaccaacctggcctacgagcggagcatcgaccccagcgacgtgtgcttcttcgtggtgtggccagacgataggaaaacccccctgacatacaattcccgcacactgctgggacagatggaggcagccagcctggcatacgacgtgtccggccagcctatcaagtctgccaccgcagaggccctggcacagggcaaccctcaccaggtggatttctgccatgtgccatacggcgccagccacatcgagtgtagcttctccgtgtcttttagctccgagctgcggcagccatataagtgtaattctagcaaggtgaagcagacactggtgcagctggtggagctgtacgaaaccaagatcggctggacagagctggccacccggtatctgatgaatatctgcaacggcaagtggctgtggaagaatacaagaaaggcctactgttggaacatcgtgctgaccccctggccttggaatggcgagaaagtgggcttcgaggacatcaggaccaactatacatcccgccaggacttcaagaacaataagaattggtctgccatcgtggagatgatcaagacagccttctcctctaccgacggcctggccatctttgaggtgagggccacactgcacctgccaaccaacgcaatggtgcgccctagccaggtgttcacagagaaggagagcggctccaagtctaagagcaagacccagaactctagggtgttccagagcaccacaatcgatggagagcggagcccaatcctgggagcctttaagacaggcgccgccatcgccaccatcgacgattggtatccagaggcaaccgagcctctgagggtgggccgctttggagtgcacagggaggacgtgacatgctacagacacccatctaccggcaaggatttctttagcatcctccagcaggccgagcactatatcgaggtgctgagtgccaacaagacacccgcccaggaaaccatcaatgacatgcacttcctgatggccaacctgatcaagggcggcatgtttcagcacaagggcgacgggtccggagagggaaggggctctctgctgacctgcggcgacgtggaggagaaccctggacctggaccgaaaaagaagcgaaaagttggatccggcatgttcctccagaggccaaagccctacagcgacgagtccctggagtctttctttatcagagtggccaataagaacggctatggcgatgtgcacaggttcctggaggccaccaagcggttcctccaggacatcgatcacaacggctaccagacctttccaacagacatcaccaggatcaatccctatagcgccaagaacagctcctctgcccgcacagcctccttcctgaagctggcccagctgacctttaatgagccacctgagctgctgggactggccatcaatcggacaaacatgaagtactccccttctaccagcgccgtggtgagaggagcagaggtgttcccacggtccctgctgagaacccacagcatcccatgctgtcccctgtgcctgagagagaacggctacgccagctatctgtggcacttccagggctacgagtattgtcactcccacaatgtgcctctgatcaccacatgctcttgtggcaaggagtttgactacagggtgagcggcctgaagggcatctgctgtaagtgcaaggagccaatcaccctgacaagccgcgagaatggccacgaggccgcctgtaccgtgtccaactggctggccggccacgagtctaagcctctgccaaacctgcccaagtcctatagatggggactggtgcactggtggatgggcatcaaggactccgagttcgatcacttctcttttgtgcagttctttagcaactggcctcggagcttccactccatcatcgaggacgaggtggagtttaatctggagcacgccgtggtgtccacctctgagctgcggctgaaggatctgctgggcagactgttctttggcagcatcaggctgccagagcgcaatctccagcacaacatcatcctgggcgagctgctgtgctacctggagaaccgcctgtggcaggacaagggcctgatcgccaatctgaagatgaacgccctggaggccacagtgatgctgaattgttccctggatcagatcgcctctatggtggagcagcgcatcctgaagcccaatagaaagtccaagcctaactctccactggacgtgaccgattacctgttccactttggcgacatcttctgcctgtggctggccgagtttcagtccgatgagttcaaccggagcttctacgtgagccggtggggctcgagcgagggaaggggctccctgctgacttgtggcgacgtggaggagaaccctggacctagcccaaaaaagaaacgcaaggtgggcaccggtgtgaagtggtactataagaccatcacattcctgcctgagctgtgcaacaatgagtctctggcagcaaagtgtctgcgggtgctgcacggcttcaattaccagtatgagacaagaaacatcggcgtgtcctttccactgtggtgcgacgccaccgtgggcaagaagatctctttcgtgagcaagaacaagatcgagctggatctgctgctgaagcagcactacttcgtgcagatggagcagctccagtattttcacatcagcaatacagtgctggtgcccgaggactgcacctacgtgagctttcggagatgtcagtccatcgataagctgaccgcagcaggactggcaagaaagatcaggcgcctggagaagcgggccctgtccagaggcgagcagttcgacccatctagctttgcccagaaggagcacacagccatcgcccactaccactctctgggcgagtcctctaagcagaccaatcggaacttcagactgaacatcaggatgctgagtgagcagccaagggagggcaattccatcttcagctcctatggcctgagcaattccgagaactcttttcagcccgtgcctctgatcggtaaccaggagggaagaggctccctgctgacatgtggcgacgtggaagaaaaccctggacctggccctaaaaaaaagcggaaggtaggtaccggcatgcagaccctgaaggagctgatcgccagcaaccccgacgatctgaccacagagctgaagagggccttccgccccctgacacctcacatcgccatcgacggcaatgagctggatgccctgaccatcctggtgaacctgacagacaagaccgacgatcagaaggacctgctggatcgggccaagtgtaagcagaagctgagagatgagaagtggtgggcctcctgcatcaactgcgtgaactacaggcagtctcacaacccaaagttccccgacatccgcagcgagggcgtgatcagaacacaggccctgggcgagctgcccagctttctgctgtctagctccaagatcccaccctaccactggtcttatagccacgactctaagtatgtgaataagagcgccttcctgaccaacgagttttgctgggatggcgagatcagctgtctgggcgagctgctgaaggacgccgatcaccctctgtggaacacactgaagaagctgggctgctcccagaaaacctgtaaggcaatggccaagcagctggccgacatcacactgaccacaatcaatgtgaccctggcccccaactacctgacacagatctctctgcctgactccgatacatcttatatctccctgtctcctgtggccagcctgtccatgcagagccacttccaccagaggctccaggatgagaacaggcactccgccatcacccggttcagccggaccacaaatatgggagtgacagcaatgacctgcggaggagccttcaggatgctgaaaagcggcgccaagttttctagccctccacaccaccggctgaacagcaagagatcctggctgacctccgagcatgtgcagtctctgaagcagtaccagcggctgaataagagcctgatcccagagaactccagaatcgccctgcggagaaagtataagatcgagctgcaaaatatggtgcgctcttggttcgccatgcaggaccacacactggatagcaatatcctgatccagcacctgaaccacgacctgtcctacctgggcgccaccaagcggttcgcctatgatcccgccatgacaaagctgtttaccgagctgctgaagagagagctgtctaacagcatcaacaatggcgagcagcacaccaatggcagctttctggtgctgcctaacatcagagtgtgcggagcaaccgccctgtcctctcctgtgacagtgggcatcccatccctgaccgccttctttggcttcgtgcacgcctttgagaggaatatcaaccgcaccacaagctccttcagggtggagagctttgccatctgcgtgcaccagctgcatgtggagaagcgcggcctgacagccgagttcgtggagaagggcgacggaacaatctccgccccagcaaccagggacgattggcagtgtgatgtggtgttctctctgatcctgaataccaactttgcccagcacatcgaccaggatacactcgtcacctctctgccaaagaggctggcaaggggaagcgccaagatcgccatcgacgatttcaagcacatcaactccttttctacactggaaaccgcaatcgagagcctgccaatcgaggcaggcagatggctgagtctgtacgcccagtccaacaataacctgtctgacctgctggccgccatgacagaggatcaccagctgatggccagctgcgtgggctaccacctgctggaggagcctaaagacaagccaaactccctcagaggctataagcacgccatcgccgagtgtatcatcggcctgatcaattccatcaccttctctagcgagacagatcccaacaccatcttttggagcctgaagaattaccagaactatctggtggtgcagcctcgctccatcaatgacgaaaccaccgataagtcctctctgtgatctagagggcccgtttaaacccgctgatcagcctcgactgtgccttctagttgccagccatctgttgtttgcccctcccccgtgccttccttgaccctggaaggtgccactcccactgtcctttcctaataaaatgaggaaattgcatcgcattgtctgagtaggtgtcattctattctggggggtggggtggggcaggacagcaagggggaggattgggaaagacaatagcaggcatgctggggatgcggtgggctctatggcttctgaggcggaaagaaccagctggggctctagggggtatccccacgcgccctgtagcggcgcattaagcgcggcgggtgtggtggttacgcgcagcgtgaccgctacacttgccagcgccctagcgcccgctcctttcgctttcttcccttcctttctcgccacgttcgccggctttccccgtcaagctctaaatcgggggctccctttagggttccgatttagtgctttacggcacctcgaccccaaaaaacttgattagggtgatggttcacgtagtgggccatcgccctgatagacggtttttcgccctttgacgttggagtccacgttctttaatagtggactcttgttccaaactggaacaacactcaaccctatctcggtctattcttttgatttataagggattttgccgatttcggcctattggttaaaaaatgagctgatttaacaaaaatttaacgcgaattaattctgtggaatgtgtgtcagttagggtgtggaaagtccccaggctccccagcaggcagaagtatgcaaagcatgcatctcaattagtcagcaaccaggtgtggaaagtccccaggctccccagcaggcagaagtatgcaaagcatgcatctcaattagtcagcaaccatagtcccgcccctaactccgcccatcccgcccctaactccgcccagttccgcccattctccgccccatggctgactaattttttttatttatgcagaggccgaggccgcctctgcctctgagctattccagaagtagtgaggaggcttttttggaggcctaggcttttgcaaaaagctcccgggagcttgtatatccattttcggatctgatcaagagacaggatgaggatcgtttcgcatgattgaacaagatggattgcacgcaggttctccggccgcttgggtggagaggctattcggctatgactgggcacaacagacaatcggctgctctgatgccgccgtgttccggctgtcagcgcaggggcgcccggttctttttgtcaagaccgacctgtccggtgccctgaatgaactgcaggacgaggcagcgcggctatcgtggctggccacgacgggcgttccttgcgcagctgtgctcgacgttgtcactgaagcgggaagggactggctgctattgggcgaagtgccggggcaggatctcctgtcatctcaccttgctcctgccgagaaagtatccatcatggctgatgcaatgcggcggctgcatacgcttgatccggctacctgcccattcgaccaccaagcgaaacatcgcatcgagcgagcacgtactcggatggaagccggtcttgtcgatcaggatgatctggacgaagagcatcaggggctcgcgccagccgaactgttcgccaggctcaaggcgcgcatgcccgacggcgaggatctcgtcgtgacccatggcgatgcctgcttgccgaatatcatggtggaaaatggccgcttttctggattcatcgactgtggccggctgggtgtggcggaccgctatcaggacatagcgttggctacccgtgatattgctgaagagcttggcggcgaatgggctgaccgcttcctcgtgctttacggtatcgccgctcccgattcgcagcgcatcgccttctatcgccttcttgacgagttcttctgagcgggactctggggttcgaaatgaccgaccaagcgacgcccaacctgccatcacgagatttcgattccaccgccgccttctatgaaaggttgggcttcggaatcgttttccgggacgccggctggatgatcctccagcgcggggatctcatgctggagttcttcgcccaccccaacttgtttattgcagcttataatggttacaaataaagcaatagcatcacaaatttcacaaataaagcatttttttcactgcattctagttgtggtttgtccaaactcatcaatgtatcttatcatgtctgtataccgtcgacctctagctagagcttggcgtaatcatggtcatagctgtttcctgtgtgaaattgttatccgctcacaattccacacaacatacgagccggaagcataaagtgtaaagcctggggtgcctaatgagtgagctaactcacattaattgcgttgcgctcactgcccgctttccagtcgggaaacctgtcgtgccagctgcattaatgaatcggccaacgcgcggggagaggcggtttgcgtattgggcgctcttccgcttcctcgctcactgactcgctgcgctcggtcgttcggctgcggcgagcggtatcagctcactcaaaggcggtaatacggttatccacagaatcaggggataacgcaggaaagaacatgtgagcaaaaggccagcaaaaggccaggaaccgtaaaaaggccgcgttgctggcgtttttccataggctccgcccccctgacgagcatcacaaaaatcgacgctcaagtcagaggtggcgaaacccgacaggactataaagataccaggcgtttccccctggaagctccctcgtgcgctctcctgttccgaccctgccgcttaccggatacctgtccgcctttctcccttcgggaagcgtggcgctttctcatagctcacgctgtaggtatctcagttcggtgtaggtcgttcgctccaagctgggctgtgtgcacgaaccccccgttcagcccgaccgctgcgccttatccggtaactatcgtcttgagtccaacccggtaagacacgacttatcgccactggcagcagccactggtaacaggattagcagagcgaggtatgtaggcggtgctacagagttcttgaagtggtggcctaactacggctacactagaagaacagtatttggtatctgcgctctgctgaagccagttaccttcggaaaaagagttggtagctcttgatccggcaaacaaaccaccgctggtagcggtttttttgtttgcaagcagcagattacgcgcagaaaaaaaggatctcaagaagatcctttgatcttttctacggggtctgacgctcagtggaacgaaaactcacgttaagggattttggtcatgagattatcaaaaaggatcttcacctagatccttttaaattaaaaatgaagttttaaatcaatctaaagtatatatgagtaaacttggtctgacagttaccaatgcttaatcagtgaggcacctatctcagcgatctgtctatttcgttcatccatagttgcctgactccccgtcgtgtagataactacgatacgggagggcttaccatctggccccagtgctgcaatgataccgcgagacccacgctcaccggctccagatttatcagcaataaaccagccagccggaagggccgagcgcagaagtggtcctgcaactttatccgcctccatccagtctattaattgttgccgggaagctagagtaagtagttcgccagttaatagtttgcgcaacgttgttgccattgctacaggcatcgtggtgtcacgctcgtcgtttggtatggcttcattcagctccggttcccaacgatcaaggcgagttacatgatcccccatgttgtgcaaaaaagcggttagctccttcggtcctccgatcgttgtcagaagtaagttggccgcagtgttatcactcatggttatggcagcactgcataattctcttactgtcatgccatccgtaagatgcttttctgtgactggtgagtactcaaccaagtcattctgagaatagtgtatgcggcgaccgagttgctcttgcccggcgtcaatacgggataataccgcgccacatagcagaactttaaaagtgctcatcattggaaaacgttcttcggggcgaaaactctcaagg

SEQ ID NO: 929 - DNA, 10896 bp, Synthetic construct
  source 1..10896: mol_type = other DNA
atcttaccgctgttgagatccagttcgatgtaacccactcgtgcacccaactgatcttcagcatcttttactttcaccagcgtttctgggtgagcaaaaacaggaaggcaaaatgccgcaaaaaagggaataagggcgacacggaaatgttgaatactcatactcttcctttttcaatattattgaagcatttatcagggttattgtctcatgagcggatacatatttgaatgtatttagaaaaataaacaaataggggttccgcgcacatttccccgaaaagtgccacctgacgtcgacggatcgggagatctcccgatcccctatggtgcactctcagtacaatctgctctgatgccgcatagttaagccagtatctgctccctgcttgtgtgttggagggcctatttcccatgattccttcatatttgcatatacgatacaaggctgttagagagataattagaattaatttgactgtaaacacaaagatattagtacaaaatacgtgacgtagaaagtaataatttcttgggtagtttgcagttttaaaattatgttttaaaatggactatcatatgcttaccgtaacttgaaagtatttcgatttcttggctttatatatcttgtggaaaggacgaaacaccgtaatacgactcactatagggtctagaattcctgtgaactgccgagtaggtagctgataacttcgggggggacggggcagggcggggttcggcgtgaactgccgagtaggtagctgataacgttgcagcggccgctttttttcttctgaggcggaaagaaccagctggggctctagggggtatccccacgcgccctgtagcggcgaggtcgctgagtagtgcgcgagcaaaatttaagctacaacaaggcaaggcttgaccgacaattgcatgaagaatctgcttagggttaggcgttttgcgctgcttcgcgatgtacgggccagatatacgcgttgacattgattattgactagttattaatagtaatcaattacggggtcattagttcatagcccatatatggagttccgcgttacataacttacggtaaatggcccgcctggctgaccgcccaacgacccccgcccattgacgtcaataatgacgtatgttcccatagtaacgccaatagggactttccattgacgtcaatgggtggagtatttacggtaaactgcccacttggcagtacatcaagtgtatcatatgccaagtacgccccctattgacgtcaatgacggtaaatggcccgcctggcattatgcccagtacatgaccttatgggactttcctacttggcagtacatctacgtattagtcatcgctattaccatggtgatgcggttttggcagtacatcaatgggcgtggatagcggtttgactcacggggatttccaagtctccaccccattgacgtcaatgggagtttgttttggcaccaaaatcaacgggactttccaaaatgtcgtaacaactccgccccattgacgcaaatgggcggtaggcgtgtacggtgggaggtctatataagcagagctctctggctaactagagaacccactgcttactggcttatcgaaattaatacgactcactatagggagacccaagctggctagcgtttaaacttaagcttgccaccatggggcccaagaagaaaaggaaggtcggctcagccatgaagctgccaaccaacctggcctacgagcggagcatcgaccccagcgacgtgtgcttcttcgtggtgtggccagacgataggaaaacccccctgacatacaattcccgcacactgctgggacagatggaggcagccagcctggcatacgacgtgtccggccagcctatcaagtctgccaccgcagaggccctggcacagggcaaccctcaccaggtggatttctgccatgtgccatacggcgccagccacatcgagtgtagcttctccgtgtcttttagctccgagctgcggcagccatataagtgtaattctagcaaggtgaagcagacactggtgcagctggtggagctgtacgaaaccaagatcggctggacagagctggccacccggtatctgatgaatatctgcaacggcaagtggctgtggaagaatacaagaaaggcctactgttggaacatcgtgctgaccccctggccttggaatggcgagaaagtgggcttcgaggacatcaggaccaactatacatcccgccaggacttcaagaacaataagaattggtctgccatcgtggagatgatcaagacagccttctcctctaccgacggcctggccatctttgaggtgagggccacactgcacctgccaaccaacgcaatggtgcgccctagccaggtgttcacagagaaggagagcggctccaagtctaagagcaagacccagaactctagggtgttccagagcaccacaatcgatggagagcggagcccaatcctgggagcctttaagacaggcgccgccatcgccaccatcgacgattggtatccagaggcaaccgagcctctgagggtgggccgctttggagtgcacagggaggacgtgacatgctacagacacccatctaccggcaaggatttctttagcatcctccagcaggccgagcactatatcgaggtgctgagtgccaacaagacacccgcccaggaaaccatcaatgacatgcacttcctgatggccaacctgatcaagggcggcatgtttcagcacaagggcgacgggtccggagagggaaggggctctctgctgacctgcggcgacgtggaggagaaccctggacctggaccgaaaaagaagcgaaaagttggatccggcatgttcctccagaggccaaagccctacagcgacgagtccctggagtctttctttatcagagtggccaataagaacggctatggcgatgtgcacaggttcctggaggccaccaagcggttcctccaggacatcgatcacaacggctaccagacctttccaacagacatcaccaggatcaatccctatagcgccaagaacagctcctctgcccgcacagcctccttcctgaagctggcccagctgacctttaatgagccacctgagctgctgggactggccatcaatcggacaaacatgaagtactccccttctaccagcgccgtggtgagaggagcagaggtgttcccacggtccctgctgagaacccacagcatcccatgctgtcccctgtgcctgagagagaacggctacgccagctatctgtggcacttccagggctacgagtattgtcactcccacaatgtgcctctgatcaccacatgctcttgtggcaaggagtttgactacagggtgagcggcctgaagggcatctgctgtaagtgcaaggagccaatcaccctgacaagccgcgagaatggccacgaggccgcctgtaccgtgtccaactggctggccggccacgagtctaagcctctgccaaacctgcccaagtcctatagatggggactggtgcactggtggatgggcatcaaggactccgagttcgatcacttctcttttgtgcagttctttagcaactggcctcggagcttccactccatcatcgaggacgaggtggagtttaatctggagcacgccgtggtgtccacctctgagctgcggctgaaggatctgctgggcagactgttctttggcagcatcaggctgccagagcgcaatctccagcacaacatcatcctgggcgagctgctgtgctacctggagaaccgcctgtggcaggacaagggcctgatcgccaatctgaagatgaacgccctggaggccacagtgatgctgaattgttccctggatcagatcgcctctatggtggagcagcgcatcctgaagcccaatagaaagtccaagcctaactctccactggacgtgaccgattacctgttccactttggcgacatcttctgcctgtggctggccgagtttcagtccgatgagttcaaccggagcttctacgtgagccggtggggctcgagcgagggaaggggctccctgctgacttgtggcgacgtggaggagaaccctggacctagcccaaaaaagaaacgcaaggtgggcaccggtgtgaagtggtactataagaccatcacattcctgcctgagctgtgcaacaatgagtctctggcagcaaagtgtctgcgggtgctgcacggcttcaattaccagtatgagacaagaaacatcggcgtgtcctttccactgtggtgcgacgccaccgtgggcaagaagatctctttcgtgagcaagaacaagatcgagctggatctgctgctgaagcagcactacttcgtgcagatggagcagctccagtattttcacatcagcaatacagtgctggtgcccgaggactgcacctacgtgagctttcggagatgtcagtccatcgataagctgaccgcagcaggactggcaagaaagatcaggcgcctggagaagcgggccctgtccagaggcgagcagttcgacccatctagctttgcccagaaggagcacacagccatcgcccactaccactctctgggcgagtcctctaagcagaccaatcggaacttcagactgaacatcaggatgctgagtgagcagccaagggagggcaattccatcttcagctcctatggcctgagcaattccgagaactcttttcagcccgtgcctctgatcggtaaccaggagggaagaggctccctgctgacatgtggcgacgtggaagaaaaccctggacctggccctaaaaaaaagcggaaggtaggtaccggcatgcagaccctgaaggagctgatcgccagcaaccccgacgatctgaccacagagctgaagagggccttccgccccctgacacctcacatcgccatcgacggcaatgagctggatgccctgaccatcctggtgaacctgacagacaagaccgacgatcagaaggacctgctggatcgggccaagtgtaagcagaagctgagagatgagaagtggtgggcctcctgcatcaactgcgtgaactacaggcagtctcacaacccaaagttccccgacatccgcagcgagggcgtgatcagaacacaggccctgggcgagctgcccagctttctgctgtctagctccaagatcccaccctaccactggtcttatagccacgactctaagtatgtgaataagagcgccttcctgaccaacgagttttgctgggatggcgagatcagctgtctgggcgagctgctgaaggacgccgatcaccctctgtggaacacactgaagaagctgggctgctcccagaaaacctgtaaggcaatggccaagcagctggccgacatcacactgaccacaatcaatgtgaccctggcccccaactacctgacacagatctctctgcctgactccgatacatcttatatctccctgtctcctgtggccagcctgtccatgcagagccacttccaccagaggctccaggatgagaacaggcactccgccatcacccggttcagccggaccacaaatatgggagtgacagcaatgacctgcggaggagccttcaggatgctgaaaagcggcgccaagttttctagccctccacaccaccggctgaacagcaagagatcctggctgacctccgagcatgtgcagtctctgaagcagtaccagcggctgaataagagcctgatcccagagaactccagaatcgccctgcggagaaagtataagatcgagctgcaaaatatggtgcgctcttggttcgccatgcaggaccacacactggatagcaatatcctgatccagcacctgaaccacgacctgtcctacctgggcgccaccaagcggttcgcctatgatcccgccatgacaaagctgtttaccgagctgctgaagagagagctgtctaacagcatcaacaatggcgagcagcacaccaatggcagctttctggtgctgcctaacatcagagtgtgcggagcaaccgccctgtcctctcctgtgacagtgggcatcccatccctgaccgccttctttggcttcgtgcacgcctttgagaggaatatcaaccgcaccacaagctccttcagggtggagagctttgccatctgcgtgcaccagctgcatgtggagaagcgcggcctgacagccgagttcgtggagaagggcgacggaacaatctccgccccagcaaccagggacgattggcagtgtgatgtggtgttctctctgatcctgaataccaactttgcccagcacatcgaccaggatacactcgtcacctctctgccaaagaggctggcaaggggaagcgccaagatcgccatcgacgatttcaagcacatcaactccttttctacactggaaaccgcaatcgagagcctgccaatcgaggcaggcagatggctgagtctgtacgcccagtccaacaataacctgtctgacctgctggccgccatgacagaggatcaccagctgatggccagctgcgtgggctaccacctgctggaggagcctaaagacaagccaaactccctcagaggctataagcacgccatcgccgagtgtatcatcggcctgatcaattccatcaccttctctagcgagacagatcccaacaccatcttttggagcctgaagaattaccagaactatctggtggtgcagcctcgctccatcaatgacgaaaccaccgataagtcctctctgtgatctagagggcccgtttaaacccgctgatcagcctcgactgtgccttctagttgccagccatctgttgtttgcccctcccccgtgccttccttgaccctggaaggtgccactcccactgtcctttcctaataaaatgaggaaattgcatcgcattgtctgagtaggtgtcattctattctggggggtggggtggggcaggacagcaagggggaggattgggaaagacaatagcaggcatgctggggatgcggtgggctctatggcttctgaggcggaaagaaccagctggggctctagggggtatccccacgcgccctgtagcggcgcattaagcgcggcgggtgtggtggttacgcgcagcgtgaccgctacacttgccagcgccctagcgcccgctcctttcgctttcttcccttcctttctcgccacgttcgccggctttccccgtcaagctctaaatcgggggctccctttagggttccgatttagtgctttacggcacctcgaccccaaaaaacttgattagggtgatggttcacgtagtgggccatcgccctgatagacggtttttcgccctttgacgttggagtccacgttctttaatagtggactcttgttccaaactggaacaacactcaaccctatctcggtctattcttttgatttataagggattttgccgatttcggcctattggttaaaaaatgagctgatttaacaaaaatttaacgcgaattaattctgtggaatgtgtgtcagttagggtgtggaaagtccccaggctccccagcaggcagaagtatgcaaagcatgcatctcaattagtcagcaaccaggtgtggaaagtccccaggctccccagcaggcagaagtatgcaaagcatgcatctcaattagtcagcaaccatagtcccgcccctaactccgcccatcccgcccctaactccgcccagttccgcccattctccgccccatggctgactaattttttttatttatgcagaggccgaggccgcctctgcctctgagctattccagaagtagtgaggaggcttttttggaggcctaggcttttgcaaaaagctcccgggagcttgtatatccattttcggatctgatcaagagacaggatgaggatcgtttcgcatgattgaacaagatggattgcacgcaggttctccggccgcttgggtggagaggctattcggctatgactgggcacaacagacaatcggctgctctgatgccgccgtgttccggctgtcagcgcaggggcgcccggttctttttgtcaagaccgacctgtccggtgccctgaatgaactgcaggacgaggcagcgcggctatcgtggctggccacgacgggcgttccttgcgcagctgtgctcgacgttgtcactgaagcgggaagggactggctgctattgggcgaagtgccggggcaggatctcctgtcatctcaccttgctcctgccgagaaagtatccatcatggctgatgcaatgcggcggctgcatacgcttgatccggctacctgcccattcgaccaccaagcgaaacatcgcatcgagcgagcacgtactcggatggaagccggtcttgtcgatcaggatgatctggacgaagagcatcaggggctcgcgccagccgaactgttcgccaggctcaaggcgcgcatgcccgacggcgaggatctcgtcgtgacccatggcgatgcctgcttgccgaatatcatggtggaaaatggccgcttttctggattcatcgactgtggccggctgggtgtggcggaccgctatcaggacatagcgttggctacccgtgatattgctgaagagcttggcggcgaatgggctgaccgcttcctcgtgctttacggtatcgccgctcccgattcgcagcgcatcgccttctatcgccttcttgacgagttcttctgagcgggactctggggttcgaaatgaccgaccaagcgacgcccaacctgccatcacgagatttcgattccaccgccgccttctatgaaaggttgggcttcggaatcgttttccgggacgccggctggatgatcctccagcgcggggatctcatgctggagttcttcgcccaccccaacttgtttattgcagcttataatggttacaaataaagcaatagcatcacaaatttcacaaataaagcatttttttcactgcattctagttgtggtttgtccaaactcatcaatgtatcttatcatgtctgtataccgtcgacctctagctagagcttggcgtaatcatggtcatagctgtttcctgtgtgaaattgttatccgctcacaattccacacaacatacgagccggaagcataaagtgtaaagcctggggtgcctaatgagtgagctaactcacattaattgcgttgcgctcactgcccgctttccagtcgggaaacctgtcgtgccagctgcattaatgaatcggccaacgcgcggggagaggcggtttgcgtattgggcgctcttccgcttcctcgctcactgactcgctgcgctcggtcgttcggctgcggcgagcggtatcagctcactcaaaggcggtaatacggttatccacagaatcaggggataacgcaggaaagaacatgtgagcaaaaggccagcaaaaggccaggaaccgtaaaaaggccgcgttgctggcgtttttccataggctccgcccccctgacgagcatcacaaaaatcgacgctcaagtcagaggtggcgaaacccgacaggactataaagataccaggcgtttccccctggaagctccctcgtgcgctctcctgttccgaccctgccgcttaccggatacctgtccgcctttctcccttcgggaagcgtggcgctttctcatagctcacgctgtaggtatctcagttcggtgtaggtcgttcgctccaagctgggctgtgtgcacgaaccccccgttcagcccgaccgctgcgccttatccggtaactatcgtcttgagtccaacccggtaagacacgacttatcgccactggcagcagccactggtaacaggattagcagagcgaggtatgtaggcggtgctacagagttcttgaagtggtggcctaactacggctacactagaagaacagtatttggtatctgcgctctgctgaagccagttaccttcggaaaaagagttggtagctcttgatccggcaaacaaaccaccgctggtagcggtttttttgtttgcaagcagcagattacgcgcagaaaaaaaggatctcaagaagatcctttgatcttttctacggggtctgacgctcagtggaacgaaaactcacgttaagggattttggtcatgagattatcaaaaaggatcttcacctagatccttttaaattaaaaatgaagttttaaatcaatctaaagtatatatgagtaaacttggtctgacagttaccaatgcttaatcagtgaggcacctatctcagcgatctgtctatttcgttcatccatagttgcctgactccccgtcgtgtagataactacgatacgggagggcttaccatctggccccagtgctgcaatgataccgcgagacccacgctcaccggctccagatttatcagcaataaaccagccagccggaagggccgagcgcagaagtggtcctgcaactttatccgcctccatccagtctattaattgttgccgggaagctagagtaagtagttcgccagttaatagtttgcgcaacgttgttgccattgctacaggcatcgtggtgtcacgctcgtcgtttggtatggcttcattcagctccggttcccaacgatcaaggcgagttacatgatcccccatgttgtgcaaaaaagcggttagctccttcggtcctccgatcgttgtcagaagtaagttggccgcagtgttatcactcatggttatggcagcactgcataattctcttactgtcatgccatccgtaagatgcttttctgtgactggtgagtactcaaccaagtcattctgagaatagtgtatgcggcgaccgagttgctcttgcccggcgtcaatacgggataataccgcgccacatagcagaactttaaaagtgctcatcattggaaaacgttcttcggggcgaaaactctcaagg

SEQ ID NO: 930 - DNA, 10896 bp, Synthetic construct
  source 1..10896: mol_type = other DNA
atcttaccgctgttgagatccagttcgatgtaacccactcgtgcacccaactgatcttcagcatcttttactttcaccagcgtttctgggtgagcaaaaacaggaaggcaaaatgccgcaaaaaagggaataagggcgacacggaaatgttgaatactcatactcttcctttttcaatattattgaagcatttatcagggttattgtctcatgagcggatacatatttgaatgtatttagaaaaataaacaaataggggttccgcgcacatttccccgaaaagtgccacctgacgtcgacggatcgggagatctcccgatcccctatggtgcactctcagtacaatctgctctgatgccgcatagttaagccagtatctgctccctgcttgtgtgttggagggcctatttcccatgattccttcatatttgcatatacgatacaaggctgttagagagataattagaattaatttgactgtaaacacaaagatattagtacaaaatacgtgacgtagaaagtaataatttcttgggtagtttgcagttttaaaattatgttttaaaatggactatcatatgcttaccgtaacttgaaagtatttcgatttcttggctttatatatcttgtggaaaggacgaaacaccgtaatacgactcactatagggtctagaattcctgtgaactgccgagtaggtagctgataacggcggctctagagcctctgctaaccatgttcagtgaactgccgagtaggtagctgataacgttgcagcggccgctttttttcttctgaggcggaaagaaccagctggggctctagggggtatccccacgcgccctgtagcggcgaggtcgctgagtagtgcgcgagcaaaatttaagctacaacaaggcaaggcttgaccgacaattgcatgaagaatctgcttagggttaggcgttttgcgctgcttcgcgatgtacgggccagatatacgcgttgacattgattattgactagttattaatagtaatcaattacggggtcattagttcatagcccatatatggagttccgcgttacataacttacggtaaatggcccgcctggctgaccgcccaacgacccccgcccattgacgtcaataatgacgtatgttcccatagtaacgccaatagggactttccattgacgtcaatgggtggagtatttacggtaaactgcccacttggcagtacatcaagtgtatcatatgccaagtacgccccctattgacgtcaatgacggtaaatggcccgcctggcattatgcccagtacatgaccttatgggactttcctacttggcagtacatctacgtattagtcatcgctattaccatggtgatgcggttttggcagtacatcaatgggcgtggatagcggtttgactcacggggatttccaagtctccaccccattgacgtcaatgggagtttgttttggcaccaaaatcaacgggactttccaaaatgtcgtaacaactccgccccattgacgcaaatgggcggtaggcgtgtacggtgggaggtctatataagcagagctctctggctaactagagaacccactgcttactggcttatcgaaattaatacgactcactatagggagacccaagctggctagcgtttaaacttaagcttgccaccatggggcccaagaagaaaaggaaggtcggctcagccatgaagctgccaaccaacctggcctacgagcggagcatcgaccccagcgacgtgtgcttcttcgtggtgtggccagacgataggaaaacccccctgacatacaattcccgcacactgctgggacagatggaggcagccagcctggcatacgacgtgtccggccagcctatcaagtctgccaccgcagaggccctggcacagggcaaccctcaccaggtggatttctgccatgtgccatacggcgccagccacatcgagtgtagcttctccgtgtcttttagctccgagctgcggcagccatataagtgtaattctagcaaggtgaagcagacactggtgcagctggtggagctgtacgaaaccaagatcggctggacagagctggccacccggtatctgatgaatatctgcaacggcaagtggctgtggaagaatacaagaaaggcctactgttggaacatcgtgctgaccccctggccttggaatggcgagaaagtgggcttcgaggacatcaggaccaactatacatcccgccaggacttcaagaacaataagaattggtctgccatcgtggagatgatcaagacagccttctcctctaccgacggcctggccatctttgaggtgagggccacactgcacctgccaaccaacgcaatggtgcgccctagccaggtgttcacagagaaggagagcggctccaagtctaagagcaagacccagaactctagggtgttccagagcaccacaatcgatggagagcggagcccaatcctgggagcctttaagacaggcgccgccatcgccaccatcgacgattggtatccagaggcaaccgagcctctgagggtgggccgctttggagtgcacagggaggacgtgacatgctacagacacccatctaccggcaaggatttctttagcatcctccagcaggccgagcactatatcgaggtgctgagtgccaacaagacacccgcccaggaaaccatcaatgacatgcacttcctgatggccaacctgatcaagggcggcatgtttcagcacaagggcgacgggtccggagagggaaggggctctctgctgacctgcggcgacgtggaggagaaccctggacctggaccgaaaaagaagcgaaaagttggatccggcatgttcctccagaggccaaagccctacagcgacgagtccctggagtctttctttatcagagtggccaataagaacggctatggcgatgtgcacaggttcctggaggccaccaagcggttcctccaggacatcgatcacaacggctaccagacctttccaacagacatcaccaggatcaatccctatagcgccaagaacagctcctctgcccgcacagcctccttcctgaagctggcccagctgacctttaatgagccacctgagctgctgggactggccatcaatcggacaaacatgaagtactccccttctaccagcgccgtggtgagaggagcagaggtgttcccacggtccctgctgagaacccacagcatcccatgctgtcccctgtgcctgagagagaacggctacgccagctatctgtggcacttccagggctacgagtattgtcactcccacaatgtgcctctgatcaccacatgctcttgtggcaaggagtttgactacagggtgagcggcctgaagggcatctgctgtaagtgcaaggagccaatcaccctgacaagccgcgagaatggccacgaggccgcctgtaccgtgtccaactggctggccggccacgagtctaagcctctgccaaacctgcccaagtcctatagatggggactggtgcactggtggatgggcatcaaggactccgagttcgatcacttctcttttgtgcagttctttagcaactggcctcggagcttccactccatcatcgaggacgaggtggagtttaatctggagcacgccgtggtgtccacctctgagctgcggctgaaggatctgctgggcagactgttctttggcagcatcaggctgccagagcgcaatctccagcacaacatcatcctgggcgagctgctgtgctacctggagaaccgcctgtggcaggacaagggcctgatcgccaatctgaagatgaacgccctggaggccacagtgatgctgaattgttccctggatcagatcgcctctatggtggagcagcgcatcctgaagcccaatagaaagtccaagcctaactctccactggacgtgaccgattacctgttccactttggcgacatcttctgcctgtggctggccgagtttcagtccgatgagttcaaccggagcttctacgtgagccggtggggctcgagcgagggaaggggctccctgctgacttgtggcgacgtggaggagaaccctggacctagcccaaaaaagaaacgcaaggtgggcaccggtgtgaagtggtactataagaccatcacattcctgcctgagctgtgcaacaatgagtctctggcagcaaagtgtctgcgggtgctgcacggcttcaattaccagtatgagacaagaaacatcggcgtgtcctttccactgtggtgcgacgccaccgtgggcaagaagatctctttcgtgagcaagaacaagatcgagctggatctgctgctgaagcagcactacttcgtgcagatggagcagctccagtattttcacatcagcaatacagtgctggtgcccgaggactgcacctacgtgagctttcggagatgtcagtccatcgataagctgaccgcagcaggactggcaagaaagatcaggcgcctggagaagcgggccctgtccagaggcgagcagttcgacccatctagctttgcccagaaggagcacacagccatcgcccactaccactctctgggcgagtcctctaagcagaccaatcggaacttcagactgaacatcaggatgctgagtgagcagccaagggagggcaattccatcttcagctcctatggcctgagcaattccgagaactcttttcagcccgtgcctctgatcggtaaccaggagggaagaggctccctgctgacatgtggcgacgtggaagaaaaccctggacctggccctaaaaaaaagcggaaggtaggtaccggcatgcagaccctgaaggagctgatcgccagcaaccccgacgatctgaccacagagctgaagagggccttccgccccctgacacctcacatcgccatcgacggcaatgagctggatgccctgaccatcctggtgaacctgacagacaagaccgacgatcagaaggacctgctggatcgggccaagtgtaagcagaagctgagagatgagaagtggtgggcctcctgcatcaactgcgtgaactacaggcagtctcacaacccaaagttccccgacatccgcagcgagggcgtgatcagaacacaggccctgggcgagctgcccagctttctgctgtctagctccaagatcccaccctaccactggtcttatagccacgactctaagtatgtgaataagagcgccttcctgaccaacgagttttgctgggatggcgagatcagctgtctgggcgagctgctgaaggacgccgatcaccctctgtggaacacactgaagaagctgggctgctcccagaaaacctgtaaggcaatggccaagcagctggccgacatcacactgaccacaatcaatgtgaccctggcccccaactacctgacacagatctctctgcctgactccgatacatcttatatctccctgtctcctgtggccagcctgtccatgcagagccacttccaccagaggctccaggatgagaacaggcactccgccatcacccggttcagccggaccacaaatatgggagtgacagcaatgacctgcggaggagccttcaggatgctgaaaagcggcgccaagttttctagccctccacaccaccggctgaacagcaagagatcctggctgacctccgagcatgtgcagtctctgaagcagtaccagcggctgaataagagcctgatcccagagaactccagaatcgccctgcggagaaagtataagatcgagctgcaaaatatggtgcgctcttggttcgccatgcaggaccacacactggatagcaatatcctgatccagcacctgaaccacgacctgtcctacctgggcgccaccaagcggttcgcctatgatcccgccatgacaaagctgtttaccgagctgctgaagagagagctgtctaacagcatcaacaatggcgagcagcacaccaatggcagctttctggtgctgcctaacatcagagtgtgcggagcaaccgccctgtcctctcctgtgacagtgggcatcccatccctgaccgccttctttggcttcgtgcacgcctttgagaggaatatcaaccgcaccacaagctccttcagggtggagagctttgccatctgcgtgcaccagctgcatgtggagaagcgcggcctgacagccgagttcgtggagaagggcgacggaacaatctccgccccagcaaccagggacgattggcagtgtgatgtggtgttctctctgatcctgaataccaactttgcccagcacatcgaccaggatacactcgtcacctctctgccaaagaggctggcaaggggaagcgccaagatcgccatcgacgatttcaagcacatcaactccttttctacactggaaaccgcaatcgagagcctgccaatcgaggcaggcagatggctgagtctgtacgcccagtccaacaataacctgtctgacctgctggccgccatgacagaggatcaccagctgatggccagctgcgtgggctaccacctgctggaggagcctaaagacaagccaaactccctcagaggctataagcacgccatcgccgagtgtatcatcggcctgatcaattccatcaccttctctagcgagacagatcccaacaccatcttttggagcctgaagaattaccagaactatctggtggtgcagcctcgctccatcaatgacgaaaccaccgataagtcctctctgtgatctagagggcccgtttaaacccgctgatcagcctcgactgtgccttctagttgccagccatctgttgtttgcccctcccccgtgccttccttgaccctggaaggtgccactcccactgtcctttcctaataaaatgaggaaattgcatcgcattgtctgagtaggtgtcattctattctggggggtggggtggggcaggacagcaagggggaggattgggaaagacaatagcaggcatgctggggatgcggtgggctctatggcttctgaggcggaaagaaccagctggggctctagggggtatccccacgcgccctgtagcggcgcattaagcgcggcgggtgtggtggttacgcgcagcgtgaccgctacacttgccagcgccctagcgcccgctcctttcgctttcttcccttcctttctcgccacgttcgccggctttccccgtcaagctctaaatcgggggctccctttagggttccgatttagtgctttacggcacctcgaccccaaaaaacttgattagggtgatggttcacgtagtgggccatcgccctgatagacggtttttcgccctttgacgttggagtccacgttctttaatagtggactcttgttccaaactggaacaacactcaaccctatctcggtctattcttttgatttataagggattttgccgatttcggcctattggttaaaaaatgagctgatttaacaaaaatttaacgcgaattaattctgtggaatgtgtgtcagttagggtgtggaaagtccccaggctccccagcaggcagaagtatgcaaagcatgcatctcaattagtcagcaaccaggtgtggaaagtccccaggctccccagcaggcagaagtatgcaaagcatgcatctcaattagtcagcaaccatagtcccgcccctaactccgcccatcccgcccctaactccgcccagttccgcccattctccgccccatggctgactaattttttttatttatgcagaggccgaggccgcctctgcctctgagctattccagaagtagtgaggaggcttttttggaggcctaggcttttgcaaaaagctcccgggagcttgtatatccattttcggatctgatcaagagacaggatgaggatcgtttcgcatgattgaacaagatggattgcacgcaggttctccggccgcttgggtggagaggctattcggctatgactgggcacaacagacaatcggctgctctgatgccgccgtgttccggctgtcagcgcaggggcgcccggttctttttgtcaagaccgacctgtccggtgccctgaatgaactgcaggacgaggcagcgcggctatcgtggctggccacgacgggcgttccttgcgcagctgtgctcgacgttgtcactgaagcgggaagggactggctgctattgggcgaagtgccggggcaggatctcctgtcatctcaccttgctcctgccgagaaagtatccatcatggctgatgcaatgcggcggctgcatacgcttgatccggctacctgcccattcgaccaccaagcgaaacatcgcatcgagcgagcacgtactcggatggaagccggtcttgtcgatcaggatgatctggacgaagagcatcaggggctcgcgccagccgaactgttcgccaggctcaaggcgcgcatgcccgacggcgaggatctcgtcgtgacccatggcgatgcctgcttgccgaatatcatggtggaaaatggccgcttttctggattcatcgactgtggccggctgggtgtggcggaccgctatcaggacatagcgttggctacccgtgatattgctgaagagcttggcggcgaatgggctgaccgcttcctcgtgctttacggtatcgccgctcccgattcgcagcgcatcgccttctatcgccttcttgacgagttcttctgagcgggactctggggttcgaaatgaccgaccaagcgacgcccaacctgccatcacgagatttcgattccaccgccgccttctatgaaaggttgggcttcggaatcgttttccgggacgccggctggatgatcctccagcgcggggatctcatgctggagttcttcgcccaccccaacttgtttattgcagcttataatggttacaaataaagcaatagcatcacaaatttcacaaataaagcatttttttcactgcattctagttgtggtttgtccaaactcatcaatgtatcttatcatgtctgtataccgtcgacctctagctagagcttggcgtaatcatggtcatagctgtttcctgtgtgaaattgttatccgctcacaattccacacaacatacgagccggaagcataaagtgtaaagcctggggtgcctaatgagtgagctaactcacattaattgcgttgcgctcactgcccgctttccagtcgggaaacctgtcgtgccagctgcattaatgaatcggccaacgcgcggggagaggcggtttgcgtattgggcgctcttccgcttcctcgctcactgactcgctgcgctcggtcgttcggctgcggcgagcggtatcagctcactcaaaggcggtaatacggttatccacagaatcaggggataacgcaggaaagaacatgtgagcaaaaggccagcaaaaggccaggaaccgtaaaaaggccgcgttgctggcgtttttccataggctccgcccccctgacgagcatcacaaaaatcgacgctcaagtcagaggtggcgaaacccgacaggactataaagataccaggcgtttccccctggaagctccctcgtgcgctctcctgttccgaccctgccgcttaccggatacctgtccgcctttctcccttcgggaagcgtggcgctttctcatagctcacgctgtaggtatctcagttcggtgtaggtcgttcgctccaagctgggctgtgtgcacgaaccccccgttcagcccgaccgctgcgccttatccggtaactatcgtcttgagtccaacccggtaagacacgacttatcgccactggcagcagccactggtaacaggattagcagagcgaggtatgtaggcggtgctacagagttcttgaagtggtggcctaactacggctacactagaagaacagtatttggtatctgcgctctgctgaagccagttaccttcggaaaaagagttggtagctcttgatccggcaaacaaaccaccgctggtagcggtttttttgtttgcaagcagcagattacgcgcagaaaaaaaggatctcaagaagatcctttgatcttttctacggggtctgacgctcagtggaacgaaaactcacgttaagggattttggtcatgagattatcaaaaaggatcttcacctagatccttttaaattaaaaatgaagttttaaatcaatctaaagtatatatgagtaaacttggtctgacagttaccaatgcttaatcagtgaggcacctatctcagcgatctgtctatttcgttcatccatagttgcctgactccccgtcgtgtagataactacgatacgggagggcttaccatctggccccagtgctgcaatgataccgcgagacccacgctcaccggctccagatttatcagcaataaaccagccagccggaagggccgagcgcagaagtggtcctgcaactttatccgcctccatccagtctattaattgttgccgggaagctagagtaagtagttcgccagttaatagtttgcgcaacgttgttgccattgctacaggcatcgtggtgtcacgctcgtcgtttggtatggcttcattcagctccggttcccaacgatcaaggcgagttacatgatcccccatgttgtgcaaaaaagcggttagctccttcggtcctccgatcgttgtcagaagtaagttggccgcagtgttatcactcatggttatggcagcactgcataattctcttactgtcatgccatccgtaagatgcttttctgtgactggtgagtactcaaccaagtcattctgagaatagtgtatgcggcgaccgagttgctcttgcccggcgtcaatacgggataataccgcgccacatagcagaactttaaaagtgctcatcattggaaaacgttcttcggggcgaaaactctcaagg

SEQ ID NO: 931 - DNA, 10896 bp, Synthetic construct
  source 1..10896: mol_type = other DNA
atcttaccgctgttgagatccagttcgatgtaacccactcgtgcacccaactgatcttcagcatcttttactttcaccagcgtttctgggtgagcaaaaacaggaaggcaaaatgccgcaaaaaagggaataagggcgacacggaaatgttgaatactcatactcttcctttttcaatattattgaagcatttatcagggttattgtctcatgagcggatacatatttgaatgtatttagaaaaataaacaaataggggttccgcgcacatttccccgaaaagtgccacctgacgtcgacggatcgggagatctcccgatcccctatggtgcactctcagtacaatctgctctgatgccgcatagttaagccagtatctgctccctgcttgtgtgttggagggcctatttcccatgattccttcatatttgcatatacgatacaaggctgttagagagataattagaattaatttgactgtaaacacaaagatattagtacaaaatacgtgacgtagaaagtaataatttcttgggtagtttgcagttttaaaattatgttttaaaatggactatcatatgcttaccgtaacttgaaagtatttcgatttcttggctttatatatcttgtggaaaggacgaaacaccgtaatacgactcactatagggtctagaattcctgtgaactgccgagtaggtagctgataactgggcaacgtgctggttattgtggccaccatggtgaactgccgagtaggtagctgataacgttgcagcggccgctttttttcttctgaggcggaaagaaccagctggggctctagggggtatccccacgcgccctgtagcggcgaggtcgctgagtagtgcgcgagcaaaatttaagctacaacaaggcaaggcttgaccgacaattgcatgaagaatctgcttagggttaggcgttttgcgctgcttcgcgatgtacgggccagatatacgcgttgacattgattattgactagttattaatagtaatcaattacggggtcattagttcatagcccatatatggagttccgcgttacataacttacggtaaatggcccgcctggctgaccgcccaacgacccccgcccattgacgtcaataatgacgtatgttcccatagtaacgccaatagggactttccattgacgtcaatgggtggagtatttacggtaaactgcccacttggcagtacatcaagtgtatcatatgccaagtacgccccctattgacgtcaatgacggtaaatggcccgcctggcattatgcccagtacatgaccttatgggactttcctacttggcagtacatctacgtattagtcatcgctattaccatggtgatgcggttttggcagtacatcaatgggcgtggatagcggtttgactcacggggatttccaagtctccaccccattgacgtcaatgggagtttgttttggcaccaaaatcaacgggactttccaaaatgtcgtaacaactccgccccattgacgcaaatgggcggtaggcgtgtacggtgggaggtctatataagcagagctctctggctaactagagaacccactgcttactggcttatcgaaattaatacgactcactatagggagacccaagctggctagcgtttaaacttaagcttgccaccatggggcccaagaagaaaaggaaggtcggctcagccatgaagctgccaaccaacctggcctacgagcggagcatcgaccccagcgacgtgtgcttcttcgtggtgtggccagacgataggaaaacccccctgacatacaattcccgcacactgctgggacagatggaggcagccagcctggcatacgacgtgtccggccagcctatcaagtctgccaccgcagaggccctggcacagggcaaccctcaccaggtggatttctgccatgtgccatacggcgccagccacatcgagtgtagcttctccgtgtcttttagctccgagctgcggcagccatataagtgtaattctagcaaggtgaagcagacactggtgcagctggtggagctgtacgaaaccaagatcggctggacagagctggccacccggtatctgatgaatatctgcaacggcaagtggctgtggaagaatacaagaaaggcctactgttggaacatcgtgctgaccccctggccttggaatggcgagaaagtgggcttcgaggacatcaggaccaactatacatcccgccaggacttcaagaacaataagaattggtctgccatcgtggagatgatcaagacagccttctcctctaccgacggcctggccatctttgaggtgagggccacactgcacctgccaaccaacgcaatggtgcgccctagccaggtgttcacagagaaggagagcggctccaagtctaagagcaagacccagaactctagggtgttccagagcaccacaatcgatggagagcggagcccaatcctgggagcctttaagacaggcgccgccatcgccaccatcgacgattggtatccagaggcaaccgagcctctgagggtgggccgctttggagtgcacagggaggacgtgacatgctacagacacccatctaccggcaaggatttctttagcatcctccagcaggccgagcactatatcgaggtgctgagtgccaacaagacacccgcccaggaaaccatcaatgacatgcacttcctgatggccaacctgatcaagggcggcatgtttcagcacaagggcgacgggtccggagagggaaggggctctctgctgacctgcggcgacgtggaggagaaccctggacctggaccgaaaaagaagcgaaaagttggatccggcatgttcctccagaggccaaagccctacagcgacgagtccctggagtctttctttatcagagtggccaataagaacggctatggcgatgtgcacaggttcctggaggccaccaagcggttcctccaggacatcgatcacaacggctaccagacctttccaacagacatcaccaggatcaatccctatagcgccaagaacagctcctctgcccgcacagcctccttcctgaagctggcccagctgacctttaatgagccacctgagctgctgggactggccatcaatcggacaaacatgaagtactccccttctaccagcgccgtggtgagaggagcagaggtgttcccacggtccctgctgagaacccacagcatcccatgctgtcccctgtgcctgagagagaacggctacgccagctatctgtggcacttccagggctacgagtattgtcactcccacaatgtgcctctgatcaccacatgctcttgtggcaaggagtttgactacagggtgagcggcctgaagggcatctgctgtaagtgcaaggagccaatcaccctgacaagccgcgagaatggccacgaggccgcctgtaccgtgtccaactggctggccggccacgagtctaagcctctgccaaacctgcccaagtcctatagatggggactggtgcactggtggatgggcatcaaggactccgagttcgatcacttctcttttgtgcagttctttagcaactggcctcggagcttccactccatcatcgaggacgaggtggagtttaatctggagcacgccgtggtgtccacctctgagctgcggctgaaggatctgctgggcagactgttctttggcagcatcaggctgccagagcgcaatctccagcacaacatcatcctgggcgagctgctgtgctacctggagaaccgcctgtggcaggacaagggcctgatcgccaatctgaagatgaacgccctggaggccacagtgatgctgaattgttccctggatcagatcgcctctatggtggagcagcgcatcctgaagcccaatagaaagtccaagcctaactctccactggacgtgaccgattacctgttccactttggcgacatcttctgcctgtggctggccgagtttcagtccgatgagttcaaccggagcttctacgtgagccggtggggctcgagcgagggaaggggctccctgctgacttgtggcgacgtggaggagaaccctggacctagcccaaaaaagaaacgcaaggtgggcaccggtgtgaagtggtactataagaccatcacattcctgcctgagctgtgcaacaatgagtctctggcagcaaagtgtctgcgggtgctgcacggcttcaattaccagtatgagacaagaaacatcggcgtgtcctttccactgtggtgcgacgccaccgtgggcaagaagatctctttcgtgagcaagaacaagatcgagctggatctgctgctgaagcagcactacttcgtgcagatggagcagctccagtattttcacatcagcaatacagtgctggtgcccgaggactgcacctacgtgagctttcggagatgtcagtccatcgataagctgaccgcagcaggactggcaagaaagatcaggcgcctggagaagcgggccctgtccagaggcgagcagttcgacccatctagctttgcccagaaggagcacacagccatcgcccactaccactctctgggcgagtcctctaagcagaccaatcggaacttcagactgaacatcaggatgctgagtgagcagccaagggagggcaattccatcttcagctcctatggcctgagcaattccgagaactcttttcagcccgtgcctctgatcggtaaccaggagggaagaggctccctgctgacatgtggcgacgtggaagaaaaccctggacctggccctaaaaaaaagcggaaggtaggtaccggcatgcagaccctgaaggagctgatcgccagcaaccccgacgatctgaccacagagctgaagagggccttccgccccctgacacctcacatcgccatcgacggcaatgagctggatgccctgaccatcctggtgaacctgacagacaagaccgacgatcagaaggacctgctggatcgggccaagtgtaagcagaagctgagagatgagaagtggtgggcctcctgcatcaactgcgtgaactacaggcagtctcacaacccaaagttccccgacatccgcagcgagggcgtgatcagaacacaggccctgggcgagctgcccagctttctgctgtctagctccaagatcccaccctaccactggtcttatagccacgactctaagtatgtgaataagagcgccttcctgaccaacgagttttgctgggatggcgagatcagctgtctgggcgagctgctgaaggacgccgatcaccctctgtggaacacactgaagaagctgggctgctcccagaaaacctgtaaggcaatggccaagcagctggccgacatcacactgaccacaatcaatgtgaccctggcccccaactacctgacacagatctctctgcctgactccgatacatcttatatctccctgtctcctgtggccagcctgtccatgcagagccacttccaccagaggctccaggatgagaacaggcactccgccatcacccggttcagccggaccacaaatatgggagtgacagcaatgacctgcggaggagccttcaggatgctgaaaagcggcgccaagttttctagccctccacaccaccggctgaacagcaagagatcctggctgacctccgagcatgtgcagtctctgaagcagtaccagcggctgaataagagcctgatcccagagaactccagaatcgccctgcggagaaagtataagatcgagctgcaaaatatggtgcgctcttggttcgccatgcaggaccacacactggatagcaatatcctgatccagcacctgaaccacgacctgtcctacctgggcgccaccaagcggttcgcctatgatcccgccatgacaaagctgtttaccgagctgctgaagagagagctgtctaacagcatcaacaatggcgagcagcacaccaatggcagctttctggtgctgcctaacatcagagtgtgcggagcaaccgccctgtcctctcctgtgacagtgggcatcccatccctgaccgccttctttggcttcgtgcacgcctttgagaggaatatcaaccgcaccacaagctccttcagggtggagagctttgccatctgcgtgcaccagctgcatgtggagaagcgcggcctgacagccgagttcgtggagaagggcgacggaacaatctccgccccagcaaccagggacgattggcagtgtgatgtggtgttctctctgatcctgaataccaactttgcccagcacatcgaccaggatacactcgtcacctctctgccaaagaggctggcaaggggaagcgccaagatcgccatcgacgatttcaagcacatcaactccttttctacactggaaaccgcaatcgagagcctgccaatcgaggcaggcagatggctgagtctgtacgcccagtccaacaataacctgtctgacctgctggccgccatgacagaggatcaccagctgatggccagctgcgtgggctaccacctgctggaggagcctaaagacaagccaaactccctcagaggctataagcacgccatcgccgagtgtatcatcggcctgatcaattccatcaccttctctagcgagacagatcccaacaccatcttttggagcctgaagaattaccagaactatctggtggtgcagcctcgctccatcaatgacgaaaccaccgataagtcctctctgtgatctagagggcccgtttaaacccgctgatcagcctcgactgtgccttctagttgccagccatctgttgtttgcccctcccccgtgccttccttgaccctggaaggtgccactcccactgtcctttcctaataaaatgaggaaattgcatcgcattgtctgagtaggtgtcattctattctggggggtggggtggggcaggacagcaagggggaggattgggaaagacaatagcaggcatgctggggatgcggtgggctctatggcttctgaggcggaaagaaccagctggggctctagggggtatccccacgcgccctgtagcggcgcattaagcgcggcgggtgtggtggttacgcgcagcgtgaccgctacacttgccagcgccctagcgcccgctcctttcgctttcttcccttcctttctcgccacgttcgccggctttccccgtcaagctctaaatcgggggctccctttagggttccgatttagtgctttacggcacctcgaccccaaaaaacttgattagggtgatggttcacgtagtgggccatcgccctgatagacggtttttcgccctttgacgttggagtccacgttctttaatagtggactcttgttccaaactggaacaacactcaaccctatctcggtctattcttttgatttataagggattttgccgatttcggcctattggttaaaaaatgagctgatttaacaaaaatttaacgcgaattaattctgtggaatgtgtgtcagttagggtgtggaaagtccccaggctccccagcaggcagaagtatgcaaagcatgcatctcaattagtcagcaaccaggtgtggaaagtccccaggctccccagcaggcagaagtatgcaaagcatgcatctcaattagtcagcaaccatagtcccgcccctaactccgcccatcccgcccctaactccgcccagttccgcccattctccgccccatggctgactaattttttttatttatgcagaggccgaggccgcctctgcctctgagctattccagaagtagtgaggaggcttttttggaggcctaggcttttgcaaaaagctcccgggagcttgtatatccattttcggatctgatcaagagacaggatgaggatcgtttcgcatgattgaacaagatggattgcacgcaggttctccggccgcttgggtggagaggctattcggctatgactgggcacaacagacaatcggctgctctgatgccgccgtgttccggctgtcagcgcaggggcgcccggttctttttgtcaagaccgacctgtccggtgccctgaatgaactgcaggacgaggcagcgcggctatcgtggctggccacgacgggcgttccttgcgcagctgtgctcgacgttgtcactgaagcgggaagggactggctgctattgggcgaagtgccggggcaggatctcctgtcatctcaccttgctcctgccgagaaagtatccatcatggctgatgcaatgcggcggctgcatacgcttgatccggctacctgcccattcgaccaccaagcgaaacatcgcatcgagcgagcacgtactcggatggaagccggtcttgtcgatcaggatgatctggacgaagagcatcaggggctcgcgccagccgaactgttcgccaggctcaaggcgcgcatgcccgacggcgaggatctcgtcgtgacccatggcgatgcctgcttgccgaatatcatggtggaaaatggccgcttttctggattcatcgactgtggccggctgggtgtggcggaccgctatcaggacatagcgttggctacccgtgatattgctgaagagcttggcggcgaatgggctgaccgcttcctcgtgctttacggtatcgccgctcccgattcgcagcgcatcgccttctatcgccttcttgacgagttcttctgagcgggactctggggttcgaaatgaccgaccaagcgacgcccaacctgccatcacgagatttcgattccaccgccgccttctatgaaaggttgggcttcggaatcgttttccgggacgccggctggatgatcctccagcgcggggatctcatgctggagttcttcgcccaccccaacttgtttattgcagcttataatggttacaaataaagcaatagcatcacaaatttcacaaataaagcatttttttcactgcattctagttgtggtttgtccaaactcatcaatgtatcttatcatgtctgtataccgtcgacctctagctagagcttggcgtaatcatggtcatagctgtttcctgtgtgaaattgttatccgctcacaattccacacaacatacgagccggaagcataaagtgtaaagcctggggtgcctaatgagtgagctaactcacattaattgcgttgcgctcactgcccgctttccagtcgggaaacctgtcgtgccagctgcattaatgaatcggccaacgcgcggggagaggcggtttgcgtattgggcgctcttccgcttcctcgctcactgactcgctgcgctcggtcgttcggctgcggcgagcggtatcagctcactcaaaggcggtaatacggttatccacagaatcaggggataacgcaggaaagaacatgtgagcaaaaggccagcaaaaggccaggaaccgtaaaaaggccgcgttgctggcgtttttccataggctccgcccccctgacgagcatcacaaaaatcgacgctcaagtcagaggtggcgaaacccgacaggactataaagataccaggcgtttccccctggaagctccctcgtgcgctctcctgttccgaccctgccgcttaccggatacctgtccgcctttctcccttcgggaagcgtggcgctttctcatagctcacgctgtaggtatctcagttcggtgtaggtcgttcgctccaagctgggctgtgtgcacgaaccccccgttcagcccgaccgctgcgccttatccggtaactatcgtcttgagtccaacccggtaagacacgacttatcgccactggcagcagccactggtaacaggattagcagagcgaggtatgtaggcggtgctacagagttcttgaagtggtggcctaactacggctacactagaagaacagtatttggtatctgcgctctgctgaagccagttaccttcggaaaaagagttggtagctcttgatccggcaaacaaaccaccgctggtagcggtttttttgtttgcaagcagcagattacgcgcagaaaaaaaggatctcaagaagatcctttgatcttttctacggggtctgacgctcagtggaacgaaaactcacgttaagggattttggtcatgagattatcaaaaaggatcttcacctagatccttttaaattaaaaatgaagttttaaatcaatctaaagtatatatgagtaaacttggtctgacagttaccaatgcttaatcagtgaggcacctatctcagcgatctgtctatttcgttcatccatagttgcctgactccccgtcgtgtagataactacgatacgggagggcttaccatctggccccagtgctgcaatgataccgcgagacccacgctcaccggctccagatttatcagcaataaaccagccagccggaagggccgagcgcagaagtggtcctgcaactttatccgcctccatccagtctattaattgttgccgggaagctagagtaagtagttcgccagttaatagtttgcgcaacgttgttgccattgctacaggcatcgtggtgtcacgctcgtcgtttggtatggcttcattcagctccggttcccaacgatcaaggcgagttacatgatcccccatgttgtgcaaaaaagcggttagctccttcggtcctccgatcgttgtcagaagtaagttggccgcagtgttatcactcatggttatggcagcactgcataattctcttactgtcatgccatccgtaagatgcttttctgtgactggtgagtactcaaccaagtcattctgagaatagtgtatgcggcgaccgagttgctcttgcccggcgtcaatacgggataataccgcgccacatagcagaactttaaaagtgctcatcattggaaaacgttcttcggggcgaaaactctcaagg

SEQ ID NO: 932 - DNA, 10896 bp, Synthetic construct
  source 1..10896: mol_type = other DNA
atcttaccgctgttgagatccagttcgatgtaacccactcgtgcacccaactgatcttcagcatcttttactttcaccagcgtttctgggtgagcaaaaacaggaaggcaaaatgccgcaaaaaagggaataagggcgacacggaaatgttgaatactcatactcttcctttttcaatattattgaagcatttatcagggttattgtctcatgagcggatacatatttgaatgtatttagaaaaataaacaaataggggttccgcgcacatttccccgaaaagtgccacctgacgtcgacggatcgggagatctcccgatcccctatggtgcactctcagtacaatctgctctgatgccgcatagttaagccagtatctgctccctgcttgtgtgttggagggcctatttcccatgattccttcatatttgcatatacgatacaaggctgttagagagataattagaattaatttgactgtaaacacaaagatattagtacaaaatacgtgacgtagaaagtaataatttcttgggtagtttgcagttttaaaattatgttttaaaatggactatcatatgcttaccgtaacttgaaagtatttcgatttcttggctttatatatcttgtggaaaggacgaaacaccgtaatacgactcactatagggtctagaattcctgtgaactgccgagtaggtagctgataacatggtgagcaagggcgaagaagataacatggcgtgaactgccgagtaggtagctgataacgttgcagcggccgctttttttcttctgaggcggaaagaaccagctggggctctagggggtatccccacgcgccctgtagcggcgaggtcgctgagtagtgcgcgagcaaaatttaagctacaacaaggcaaggcttgaccgacaattgcatgaagaatctgcttagggttaggcgttttgcgctgcttcgcgatgtacgggccagatatacgcgttgacattgattattgactagttattaatagtaatcaattacggggtcattagttcatagcccatatatggagttccgcgttacataacttacggtaaatggcccgcctggctgaccgcccaacgacccccgcccattgacgtcaataatgacgtatgttcccatagtaacgccaatagggactttccattgacgtcaatgggtggagtatttacggtaaactgcccacttggcagtacatcaagtgtatcatatgccaagtacgccccctattgacgtcaatgacggtaaatggcccgcctggcattatgcccagtacatgaccttatgggactttcctacttggcagtacatctacgtattagtcatcgctattaccatggtgatgcggttttggcagtacatcaatgggcgtggatagcggtttgactcacggggatttccaagtctccaccccattgacgtcaatgggagtttgttttggcaccaaaatcaacgggactttccaaaatgtcgtaacaactccgccccattgacgcaaatgggcggtaggcgtgtacggtgggaggtctatataagcagagctctctggctaactagagaacccactgcttactggcttatcgaaattaatacgactcactatagggagacccaagctggctagcgtttaaacttaagcttgccaccatggggcccaagaagaaaaggaaggtcggctcagccatgaagctgccaaccaacctggcctacgagcggagcatcgaccccagcgacgtgtgcttcttcgtggtgtggccagacgataggaaaacccccctgacatacaattcccgcacactgctgggacagatggaggcagccagcctggcatacgacgtgtccggccagcctatcaagtctgccaccgcagaggccctggcacagggcaaccctcaccaggtggatttctgccatgtgccatacggcgccagccacatcgagtgtagcttctccgtgtcttttagctccgagctgcggcagccatataagtgtaattctagcaaggtgaagcagacactggtgcagctggtggagctgtacgaaaccaagatcggctggacagagctggccacccggtatctgatgaatatctgcaacggcaagtggctgtggaagaatacaagaaaggcctactgttggaacatcgtgctgaccccctggccttggaatggcgagaaagtgggcttcgaggacatcaggaccaactatacatcccgccaggacttcaagaacaataagaattggtctgccatcgtggagatgatcaagacagccttctcctctaccgacggcctggccatctttgaggtgagggccacactgcacctgccaaccaacgcaatggtgcgccctagccaggtgttcacagagaaggagagcggctccaagtctaagagcaagacccagaactctagggtgttccagagcaccacaatcgatggagagcggagcccaatcctgggagcctttaagacaggcgccgccatcgccaccatcgacgattggtatccagaggcaaccgagcctctgagggtgggccgctttggagtgcacagggaggacgtgacatgctacagacacccatctaccggcaaggatttctttagcatcctccagcaggccgagcactatatcgaggtgctgagtgccaacaagacacccgcccaggaaaccatcaatgacatgcacttcctgatggccaacctgatcaagggcggcatgtttcagcacaagggcgacgggtccggagagggaaggggctctctgctgacctgcggcgacgtggaggagaaccctggacctggaccgaaaaagaagcgaaaagttggatccggcatgttcctccagaggccaaagccctacagcgacgagtccctggagtctttctttatcagagtggccaataagaacggctatggcgatgtgcacaggttcctggaggccaccaagcggttcctccaggacatcgatcacaacggctaccagacctttccaacagacatcaccaggatcaatccctatagcgccaagaacagctcctctgcccgcacagcctccttcctgaagctggcccagctgacctttaatgagccacctgagctgctgggactggccatcaatcggacaaacatgaagtactccccttctaccagcgccgtggtgagaggagcagaggtgttcccacggtccctgctgagaacccacagcatcccatgctgtcccctgtgcctgagagagaacggctacgccagctatctgtggcacttccagggctacgagtattgtcactcccacaatgtgcctctgatcaccacatgctcttgtggcaaggagtttgactacagggtgagcggcctgaagggcatctgctgtaagtgcaaggagccaatcaccctgacaagccgcgagaatggccacgaggccgcctgtaccgtgtccaactggctggccggccacgagtctaagcctctgccaaacctgcccaagtcctatagatggggactggtgcactggtggatgggcatcaaggactccgagttcgatcacttctcttttgtgcagttctttagcaactggcctcggagcttccactccatcatcgaggacgaggtggagtttaatctggagcacgccgtggtgtccacctctgagctgcggctgaaggatctgctgggcagactgttctttggcagcatcaggctgccagagcgcaatctccagcacaacatcatcctgggcgagctgctgtgctacctggagaaccgcctgtggcaggacaagggcctgatcgccaatctgaagatgaacgccctggaggccacagtgatgctgaattgttccctggatcagatcgcctctatggtggagcagcgcatcctgaagcccaatagaaagtccaagcctaactctccactggacgtgaccgattacctgttccactttggcgacatcttctgcctgtggctggccgagtttcagtccgatgagttcaaccggagcttctacgtgagccggtggggctcgagcgagggaaggggctccctgctgacttgtggcgacgtggaggagaaccctggacctagcccaaaaaagaaacgcaaggtgggcaccggtgtgaagtggtactataagaccatcacattcctgcctgagctgtgcaacaatgagtctctggcagcaaagtgtctgcgggtgctgcacggcttcaattaccagtatgagacaagaaacatcggcgtgtcctttccactgtggtgcgacgccaccgtgggcaagaagatctctttcgtgagcaagaacaagatcgagctggatctgctgctgaagcagcactacttcgtgcagatggagcagctccagtattttcacatcagcaatacagtgctggtgcccgaggactgcacctacgtgagctttcggagatgtcagtccatcgataagctgaccgcagcaggactggcaagaaagatcaggcgcctggagaagcgggccctgtccagaggcgagcagttcgacccatctagctttgcccagaaggagcacacagccatcgcccactaccactctctgggcgagtcctctaagcagaccaatcggaacttcagactgaacatcaggatgctgagtgagcagccaagggagggcaattccatcttcagctcctatggcctgagcaattccgagaactcttttcagcccgtgcctctgatcggtaaccaggagggaagaggctccctgctgacatgtggcgacgtggaagaaaaccctggacctggccctaaaaaaaagcggaaggtaggtaccggcatgcagaccctgaaggagctgatcgccagcaaccccgacgatctgaccacagagctgaagagggccttccgccccctgacacctcacatcgccatcgacggcaatgagctggatgccctgaccatcctggtgaacctgacagacaagaccgacgatcagaaggacctgctggatcgggccaagtgtaagcagaagctgagagatgagaagtggtgggcctcctgcatcaactgcgtgaactacaggcagtctcacaacccaaagttccccgacatccgcagcgagggcgtgatcagaacacaggccctgggcgagctgcccagctttctgctgtctagctccaagatcccaccctaccactggtcttatagccacgactctaagtatgtgaataagagcgccttcctgaccaacgagttttgctgggatggcgagatcagctgtctgggcgagctgctgaaggacgccgatcaccctctgtggaacacactgaagaagctgggctgctcccagaaaacctgtaaggcaatggccaagcagctggccgacatcacactgaccacaatcaatgtgaccctggcccccaactacctgacacagatctctctgcctgactccgatacatcttatatctccctgtctcctgtggccagcctgtccatgcagagccacttccaccagaggctccaggatgagaacaggcactccgccatcacccggttcagccggaccacaaatatgggagtgacagcaatgacctgcggaggagccttcaggatgctgaaaagcggcgccaagttttctagccctccacaccaccggctgaacagcaagagatcctggctgacctccgagcatgtgcagtctctgaagcagtaccagcggctgaataagagcctgatcccagagaactccagaatcgccctgcggagaaagtataagatcgagctgcaaaatatggtgcgctcttggttcgccatgcaggaccacacactggatagcaatatcctgatccagcacctgaaccacgacctgtcctacctgggcgccaccaagcggttcgcctatgatcccgccatgacaaagctgtttaccgagctgctgaagagagagctgtctaacagcatcaacaatggcgagcagcacaccaatggcagctttctggtgctgcctaacatcagagtgtgcggagcaaccgccctgtcctctcctgtgacagtgggcatcccatccctgaccgccttctttggcttcgtgcacgcctttgagaggaatatcaaccgcaccacaagctccttcagggtggagagctttgccatctgcgtgcaccagctgcatgtggagaagcgcggcctgacagccgagttcgtggagaagggcgacggaacaatctccgccccagcaaccagggacgattggcagtgtgatgtggtgttctctctgatcctgaataccaactttgcccagcacatcgaccaggatacactcgtcacctctctgccaaagaggctggcaaggggaagcgccaagatcgccatcgacgatttcaagcacatcaactccttttctacactggaaaccgcaatcgagagcctgccaatcgaggcaggcagatggctgagtctgtacgcccagtccaacaataacctgtctgacctgctggccgccatgacagaggatcaccagctgatggccagctgcgtgggctaccacctgctggaggagcctaaagacaagccaaactccctcagaggctataagcacgccatcgccgagtgtatcatcggcctgatcaattccatcaccttctctagcgagacagatcccaacaccatcttttggagcctgaagaattaccagaactatctggtggtgcagcctcgctccatcaatgacgaaaccaccgataagtcctctctgtgatctagagggcccgtttaaacccgctgatcagcctcgactgtgccttctagttgccagccatctgttgtttgcccctcccccgtgccttccttgaccctggaaggtgccactcccactgtcctttcctaataaaatgaggaaattgcatcgcattgtctgagtaggtgtcattctattctggggggtggggtggggcaggacagcaagggggaggattgggaaagacaatagcaggcatgctggggatgcggtgggctctatggcttctgaggcggaaagaaccagctggggctctagggggtatccccacgcgccctgtagcggcgcattaagcgcggcgggtgtggtggttacgcgcagcgtgaccgctacacttgccagcgccctagcgcccgctcctttcgctttcttcccttcctttctcgccacgttcgccggctttccccgtcaagctctaaatcgggggctccctttagggttccgatttagtgctttacggcacctcgaccccaaaaaacttgattagggtgatggttcacgtagtgggccatcgccctgatagacggtttttcgccctttgacgttggagtccacgttctttaatagtggactcttgttccaaactggaacaacactcaaccctatctcggtctattcttttgatttataagggattttgccgatttcggcctattggttaaaaaatgagctgatttaacaaaaatttaacgcgaattaattctgtggaatgtgtgtcagttagggtgtggaaagtccccaggctccccagcaggcagaagtatgcaaagcatgcatctcaattagtcagcaaccaggtgtggaaagtccccaggctccccagcaggcagaagtatgcaaagcatgcatctcaattagtcagcaaccatagtcccgcccctaactccgcccatcccgcccctaactccgcccagttccgcccattctccgccccatggctgactaattttttttatttatgcagaggccgaggccgcctctgcctctgagctattccagaagtagtgaggaggcttttttggaggcctaggcttttgcaaaaagctcccgggagcttgtatatccattttcggatctgatcaagagacaggatgaggatcgtttcgcatgattgaacaagatggattgcacgcaggttctccggccgcttgggtggagaggctattcggctatgactgggcacaacagacaatcggctgctctgatgccgccgtgttccggctgtcagcgcaggggcgcccggttctttttgtcaagaccgacctgtccggtgccctgaatgaactgcaggacgaggcagcgcggctatcgtggctggccacgacgggcgttccttgcgcagctgtgctcgacgttgtcactgaagcgggaagggactggctgctattgggcgaagtgccggggcaggatctcctgtcatctcaccttgctcctgccgagaaagtatccatcatggctgatgcaatgcggcggctgcatacgcttgatccggctacctgcccattcgaccaccaagcgaaacatcgcatcgagcgagcacgtactcggatggaagccggtcttgtcgatcaggatgatctggacgaagagcatcaggggctcgcgccagccgaactgttcgccaggctcaaggcgcgcatgcccgacggcgaggatctcgtcgtgacccatggcgatgcctgcttgccgaatatcatggtggaaaatggccgcttttctggattcatcgactgtggccggctgggtgtggcggaccgctatcaggacatagcgttggctacccgtgatattgctgaagagcttggcggcgaatgggctgaccgcttcctcgtgctttacggtatcgccgctcccgattcgcagcgcatcgccttctatcgccttcttgacgagttcttctgagcgggactctggggttcgaaatgaccgaccaagcgacgcccaacctgccatcacgagatttcgattccaccgccgccttctatgaaaggttgggcttcggaatcgttttccgggacgccggctggatgatcctccagcgcggggatctcatgctggagttcttcgcccaccccaacttgtttattgcagcttataatggttacaaataaagcaatagcatcacaaatttcacaaataaagcatttttttcactgcattctagttgtggtttgtccaaactcatcaatgtatcttatcatgtctgtataccgtcgacctctagctagagcttggcgtaatcatggtcatagctgtttcctgtgtgaaattgttatccgctcacaattccacacaacatacgagccggaagcataaagtgtaaagcctggggtgcctaatgagtgagctaactcacattaattgcgttgcgctcactgcccgctttccagtcgggaaacctgtcgtgccagctgcattaatgaatcggccaacgcgcggggagaggcggtttgcgtattgggcgctcttccgcttcctcgctcactgactcgctgcgctcggtcgttcggctgcggcgagcggtatcagctcactcaaaggcggtaatacggttatccacagaatcaggggataacgcaggaaagaacatgtgagcaaaaggccagcaaaaggccaggaaccgtaaaaaggccgcgttgctggcgtttttccataggctccgcccccctgacgagcatcacaaaaatcgacgctcaagtcagaggtggcgaaacccgacaggactataaagataccaggcgtttccccctggaagctccctcgtgcgctctcctgttccgaccctgccgcttaccggatacctgtccgcctttctcccttcgggaagcgtggcgctttctcatagctcacgctgtaggtatctcagttcggtgtaggtcgttcgctccaagctgggctgtgtgcacgaaccccccgttcagcccgaccgctgcgccttatccggtaactatcgtcttgagtccaacccggtaagacacgacttatcgccactggcagcagccactggtaacaggattagcagagcgaggtatgtaggcggtgctacagagttcttgaagtggtggcctaactacggctacactagaagaacagtatttggtatctgcgctctgctgaagccagttaccttcggaaaaagagttggtagctcttgatccggcaaacaaaccaccgctggtagcggtttttttgtttgcaagcagcagattacgcgcagaaaaaaaggatctcaagaagatcctttgatcttttctacggggtctgacgctcagtggaacgaaaactcacgttaagggattttggtcatgagattatcaaaaaggatcttcacctagatccttttaaattaaaaatgaagttttaaatcaatctaaagtatatatgagtaaacttggtctgacagttaccaatgcttaatcagtgaggcacctatctcagcgatctgtctatttcgttcatccatagttgcctgactccccgtcgtgtagataactacgatacgggagggcttaccatctggccccagtgctgcaatgataccgcgagacccacgctcaccggctccagatttatcagcaataaaccagccagccggaagggccgagcgcagaagtggtcctgcaactttatccgcctccatccagtctattaattgttgccgggaagctagagtaagtagttcgccagttaatagtttgcgcaacgttgttgccattgctacaggcatcgtggtgtcacgctcgtcgtttggtatggcttcattcagctccggttcccaacgatcaaggcgagttacatgatcccccatgttgtgcaaaaaagcggttagctccttcggtcctccgatcgttgtcagaagtaagttggccgcagtgttatcactcatggttatggcagcactgcataattctcttactgtcatgccatccgtaagatgcttttctgtgactggtgagtactcaaccaagtcattctgagaatagtgtatgcggcgaccgagttgctcttgcccggcgtcaatacgggataataccgcgccacatagcagaactttaaaagtgctcatcattggaaaacgttcttcggggcgaaaactctcaagg

SEQ ID NO: 933 - DNA, 10896 bp, Synthetic construct
  source 1..10896: mol_type = other DNA
atcttaccgctgttgagatccagttcgatgtaacccactcgtgcacccaactgatcttcagcatcttttactttcaccagcgtttctgggtgagcaaaaacaggaaggcaaaatgccgcaaaaaagggaataagggcgacacggaaatgttgaatactcatactcttcctttttcaatattattgaagcatttatcagggttattgtctcatgagcggatacatatttgaatgtatttagaaaaataaacaaataggggttccgcgcacatttccccgaaaagtgccacctgacgtcgacggatcgggagatctcccgatcccctatggtgcactctcagtacaatctgctctgatgccgcatagttaagccagtatctgctccctgcttgtgtgttggagggcctatttcccatgattccttcatatttgcatatacgatacaaggctgttagagagataattagaattaatttgactgtaaacacaaagatattagtacaaaatacgtgacgtagaaagtaataatttcttgggtagtttgcagttttaaaattatgttttaaaatggactatcatatgcttaccgtaacttgaaagtatttcgatttcttggctttatatatcttgtggaaaggacgaaacaccgtaatacgactcactatagggtctagaattcctgtgaactgccgagtaggtagctgataacgtgaacggccacgagttcgagatcgagggcgagtgaactgccgagtaggtagctgataacgttgcagcggccgctttttttcttctgaggcggaaagaaccagctggggctctagggggtatccccacgcgccctgtagcggcgaggtcgctgagtagtgcgcgagcaaaatttaagctacaacaaggcaaggcttgaccgacaattgcatgaagaatctgcttagggttaggcgttttgcgctgcttcgcgatgtacgggccagatatacgcgttgacattgattattgactagttattaatagtaatcaattacggggtcattagttcatagcccatatatggagttccgcgttacataacttacggtaaatggcccgcctggctgaccgcccaacgacccccgcccattgacgtcaataatgacgtatgttcccatagtaacgccaatagggactttccattgacgtcaatgggtggagtatttacggtaaactgcccacttggcagtacatcaagtgtatcatatgccaagtacgccccctattgacgtcaatgacggtaaatggcccgcctggcattatgcccagtacatgaccttatgggactttcctacttggcagtacatctacgtattagtcatcgctattaccatggtgatgcggttttggcagtacatcaatgggcgtggatagcggtttgactcacggggatttccaagtctccaccccattgacgtcaatgggagtttgttttggcaccaaaatcaacgggactttccaaaatgtcgtaacaactccgccccattgacgcaaatgggcggtaggcgtgtacggtgggaggtctatataagcagagctctctggctaactagagaacccactgcttactggcttatcgaaattaatacgactcactatagggagacccaagctggctagcgtttaaacttaagcttgccaccatggggcccaagaagaaaaggaaggtcggctcagccatgaagctgccaaccaacctggcctacgagcggagcatcgaccccagcgacgtgtgcttcttcgtggtgtggccagacgataggaaaacccccctgacatacaattcccgcacactgctgggacagatggaggcagccagcctggcatacgacgtgtccggccagcctatcaagtctgccaccgcagaggccctggcacagggcaaccctcaccaggtggatttctgccatgtgccatacggcgccagccacatcgagtgtagcttctccgtgtcttttagctccgagctgcggcagccatataagtgtaattctagcaaggtgaagcagacactggtgcagctggtggagctgtacgaaaccaagatcggctggacagagctggccacccggtatctgatgaatatctgcaacggcaagtggctgtggaagaatacaagaaaggcctactgttggaacatcgtgctgaccccctggccttggaatggcgagaaagtgggcttcgaggacatcaggaccaactatacatcccgccaggacttcaagaacaataagaattggtctgccatcgtggagatgatcaagacagccttctcctctaccgacggcctggccatctttgaggtgagggccacactgcacctgccaaccaacgcaatggtgcgccctagccaggtgttcacagagaaggagagcggctccaagtctaagagcaagacccagaactctagggtgttccagagcaccacaatcgatggagagcggagcccaatcctgggagcctttaagacaggcgccgccatcgccaccatcgacgattggtatccagaggcaaccgagcctctgagggtgggccgctttggagtgcacagggaggacgtgacatgctacagacacccatctaccggcaaggatttctttagcatcctccagcaggccgagcactatatcgaggtgctgagtgccaacaagacacccgcccaggaaaccatcaatgacatgcacttcctgatggccaacctgatcaagggcggcatgtttcagcacaagggcgacgggtccggagagggaaggggctctctgctgacctgcggcgacgtggaggagaaccctggacctggaccgaaaaagaagcgaaaagttggatccggcatgttcctccagaggccaaagccctacagcgacgagtccctggagtctttctttatcagagtggccaataagaacggctatggcgatgtgcacaggttcctggaggccaccaagcggttcctccaggacatcgatcacaacggctaccagacctttccaacagacatcaccaggatcaatccctatagcgccaagaacagctcctctgcccgcacagcctccttcctgaagctggcccagctgacctttaatgagccacctgagctgctgggactggccatcaatcggacaaacatgaagtactccccttctaccagcgccgtggtgagaggagcagaggtgttcccacggtccctgctgagaacccacagcatcccatgctgtcccctgtgcctgagagagaacggctacgccagctatctgtggcacttccagggctacgagtattgtcactcccacaatgtgcctctgatcaccacatgctcttgtggcaaggagtttgactacagggtgagcggcctgaagggcatctgctgtaagtgcaaggagccaatcaccctgacaagccgcgagaatggccacgaggccgcctgtaccgtgtccaactggctggccggccacgagtctaagcctctgccaaacctgcccaagtcctatagatggggactggtgcactggtggatgggcatcaaggactccgagttcgatcacttctcttttgtgcagttctttagcaactggcctcggagcttccactccatcatcgaggacgaggtggagtttaatctggagcacgccgtggtgtccacctctgagctgcggctgaaggatctgctgggcagactgttctttggcagcatcaggctgccagagcgcaatctccagcacaacatcatcctgggcgagctgctgtgctacctggagaaccgcctgtggcaggacaagggcctgatcgccaatctgaagatgaacgccctggaggccacagtgatgctgaattgttccctggatcagatcgcctctatggtggagcagcgcatcctgaagcccaatagaaagtccaagcctaactctccactggacgtgaccgattacctgttccactttggcgacatcttctgcctgtggctggccgagtttcagtccgatgagttcaaccggagcttctacgtgagccggtggggctcgagcgagggaaggggctccctgctgacttgtggcgacgtggaggagaaccctggacctagcccaaaaaagaaacgcaaggtgggcaccggtgtgaagtggtactataagaccatcacattcctgcctgagctgtgcaacaatgagtctctggcagcaaagtgtctgcgggtgctgcacggcttcaattaccagtatgagacaagaaacatcggcgtgtcctttccactgtggtgcgacgccaccgtgggcaagaagatctctttcgtgagcaagaacaagatcgagctggatctgctgctgaagcagcactacttcgtgcagatggagcagctccagtattttcacatcagcaatacagtgctggtgcccgaggactgcacctacgtgagctttcggagatgtcagtccatcgataagctgaccgcagcaggactggcaagaaagatcaggcgcctggagaagcgggccctgtccagaggcgagcagttcgacccatctagctttgcccagaaggagcacacagccatcgcccactaccactctctgggcgagtcctctaagcagaccaatcggaacttcagactgaacatcaggatgctgagtgagcagccaagggagggcaattccatcttcagctcctatggcctgagcaattccgagaactcttttcagcccgtgcctctgatcggtaaccaggagggaagaggctccctgctgacatgtggcgacgtggaagaaaaccctggacctggccctaaaaaaaagcggaaggtaggtaccggcatgcagaccctgaaggagctgatcgccagcaaccccgacgatctgaccacagagctgaagagggccttccgccccctgacacctcacatcgccatcgacggcaatgagctggatgccctgaccatcctggtgaacctgacagacaagaccgacgatcagaaggacctgctggatcgggccaagtgtaagcagaagctgagagatgagaagtggtgggcctcctgcatcaactgcgtgaactacaggcagtctcacaacccaaagttccccgacatccgcagcgagggcgtgatcagaacacaggccctgggcgagctgcccagctttctgctgtctagctccaagatcccaccctaccactggtcttatagccacgactctaagtatgtgaataagagcgccttcctgaccaacgagttttgctgggatggcgagatcagctgtctgggcgagctgctgaaggacgccgatcaccctctgtggaacacactgaagaagctgggctgctcccagaaaacctgtaaggcaatggccaagcagctggccgacatcacactgaccacaatcaatgtgaccctggcccccaactacctgacacagatctctctgcctgactccgatacatcttatatctccctgtctcctgtggccagcctgtccatgcagagccacttccaccagaggctccaggatgagaacaggcactccgccatcacccggttcagccggaccacaaatatgggagtgacagcaatgacctgcggaggagccttcaggatgctgaaaagcggcgccaagttttctagccctccacaccaccggctgaacagcaagagatcctggctgacctccgagcatgtgcagtctctgaagcagtaccagcggctgaataagagcctgatcccagagaactccagaatcgccctgcggagaaagtataagatcgagctgcaaaatatggtgcgctcttggttcgccatgcaggaccacacactggatagcaatatcctgatccagcacctgaaccacgacctgtcctacctgggcgccaccaagcggttcgcctatgatcccgccatgacaaagctgtttaccgagctgctgaagagagagctgtctaacagcatcaacaatggcgagcagcacaccaatggcagctttctggtgctgcctaacatcagagtgtgcggagcaaccgccctgtcctctcctgtgacagtgggcatcccatccctgaccgccttctttggcttcgtgcacgcctttgagaggaatatcaaccgcaccacaagctccttcagggtggagagctttgccatctgcgtgcaccagctgcatgtggagaagcgcggcctgacagccgagttcgtggagaagggcgacggaacaatctccgccccagcaaccagggacgattggcagtgtgatgtggtgttctctctgatcctgaataccaactttgcccagcacatcgaccaggatacactcgtcacctctctgccaaagaggctggcaaggggaagcgccaagatcgccatcgacgatttcaagcacatcaactccttttctacactggaaaccgcaatcgagagcctgccaatcgaggcaggcagatggctgagtctgtacgcccagtccaacaataacctgtctgacctgctggccgccatgacagaggatcaccagctgatggccagctgcgtgggctaccacctgctggaggagcctaaagacaagccaaactccctcagaggctataagcacgccatcgccgagtgtatcatcggcctgatcaattccatcaccttctctagcgagacagatcccaacaccatcttttggagcctgaagaattaccagaactatctggtggtgcagcctcgctccatcaatgacgaaaccaccgataagtcctctctgtgatctagagggcccgtttaaacccgctgatcagcctcgactgtgccttctagttgccagccatctgttgtttgcccctcccccgtgccttccttgaccctggaaggtgccactcccactgtcctttcctaataaaatgaggaaattgcatcgcattgtctgagtaggtgtcattctattctggggggtggggtggggcaggacagcaagggggaggattgggaaagacaatagcaggcatgctggggatgcggtgggctctatggcttctgaggcggaaagaaccagctggggctctagggggtatccccacgcgccctgtagcggcgcattaagcgcggcgggtgtggtggttacgcgcagcgtgaccgctacacttgccagcgccctagcgcccgctcctttcgctttcttcccttcctttctcgccacgttcgccggctttccccgtcaagctctaaatcgggggctccctttagggttccgatttagtgctttacggcacctcgaccccaaaaaacttgattagggtgatggttcacgtagtgggccatcgccctgatagacggtttttcgccctttgacgttggagtccacgttctttaatagtggactcttgttccaaactggaacaacactcaaccctatctcggtctattcttttgatttataagggattttgccgatttcggcctattggttaaaaaatgagctgatttaacaaaaatttaacgcgaattaattctgtggaatgtgtgtcagttagggtgtggaaagtccccaggctccccagcaggcagaagtatgcaaagcatgcatctcaattagtcagcaaccaggtgtggaaagtccccaggctccccagcaggcagaagtatgcaaagcatgcatctcaattagtcagcaaccatagtcccgcccctaactccgcccatcccgcccctaactccgcccagttccgcccattctccgccccatggctgactaattttttttatttatgcagaggccgaggccgcctctgcctctgagctattccagaagtagtgaggaggcttttttggaggcctaggcttttgcaaaaagctcccgggagcttgtatatccattttcggatctgatcaagagacaggatgaggatcgtttcgcatgattgaacaagatggattgcacgcaggttctccggccgcttgggtggagaggctattcggctatgactgggcacaacagacaatcggctgctctgatgccgccgtgttccggctgtcagcgcaggggcgcccggttctttttgtcaagaccgacctgtccggtgccctgaatgaactgcaggacgaggcagcgcggctatcgtggctggccacgacgggcgttccttgcgcagctgtgctcgacgttgtcactgaagcgggaagggactggctgctattgggcgaagtgccggggcaggatctcctgtcatctcaccttgctcctgccgagaaagtatccatcatggctgatgcaatgcggcggctgcatacgcttgatccggctacctgcccattcgaccaccaagcgaaacatcgcatcgagcgagcacgtactcggatggaagccggtcttgtcgatcaggatgatctggacgaagagcatcaggggctcgcgccagccgaactgttcgccaggctcaaggcgcgcatgcccgacggcgaggatctcgtcgtgacccatggcgatgcctgcttgccgaatatcatggtggaaaatggccgcttttctggattcatcgactgtggccggctgggtgtggcggaccgctatcaggacatagcgttggctacccgtgatattgctgaagagcttggcggcgaatgggctgaccgcttcctcgtgctttacggtatcgccgctcccgattcgcagcgcatcgccttctatcgccttcttgacgagttcttctgagcgggactctggggttcgaaatgaccgaccaagcgacgcccaacctgccatcacgagatttcgattccaccgccgccttctatgaaaggttgggcttcggaatcgttttccgggacgccggctggatgatcctccagcgcggggatctcatgctggagttcttcgcccaccccaacttgtttattgcagcttataatggttacaaataaagcaatagcatcacaaatttcacaaataaagcatttttttcactgcattctagttgtggtttgtccaaactcatcaatgtatcttatcatgtctgtataccgtcgacctctagctagagcttggcgtaatcatggtcatagctgtttcctgtgtgaaattgttatccgctcacaattccacacaacatacgagccggaagcataaagtgtaaagcctggggtgcctaatgagtgagctaactcacattaattgcgttgcgctcactgcccgctttccagtcgggaaacctgtcgtgccagctgcattaatgaatcggccaacgcgcggggagaggcggtttgcgtattgggcgctcttccgcttcctcgctcactgactcgctgcgctcggtcgttcggctgcggcgagcggtatcagctcactcaaaggcggtaatacggttatccacagaatcaggggataacgcaggaaagaacatgtgagcaaaaggccagcaaaaggccaggaaccgtaaaaaggccgcgttgctggcgtttttccataggctccgcccccctgacgagcatcacaaaaatcgacgctcaagtcagaggtggcgaaacccgacaggactataaagataccaggcgtttccccctggaagctccctcgtgcgctctcctgttccgaccctgccgcttaccggatacctgtccgcctttctcccttcgggaagcgtggcgctttctcatagctcacgctgtaggtatctcagttcggtgtaggtcgttcgctccaagctgggctgtgtgcacgaaccccccgttcagcccgaccgctgcgccttatccggtaactatcgtcttgagtccaacccggtaagacacgacttatcgccactggcagcagccactggtaacaggattagcagagcgaggtatgtaggcggtgctacagagttcttgaagtggtggcctaactacggctacactagaagaacagtatttggtatctgcgctctgctgaagccagttaccttcggaaaaagagttggtagctcttgatccggcaaacaaaccaccgctggtagcggtttttttgtttgcaagcagcagattacgcgcagaaaaaaaggatctcaagaagatcctttgatcttttctacggggtctgacgctcagtggaacgaaaactcacgttaagggattttggtcatgagattatcaaaaaggatcttcacctagatccttttaaattaaaaatgaagttttaaatcaatctaaagtatatatgagtaaacttggtctgacagttaccaatgcttaatcagtgaggcacctatctcagcgatctgtctatttcgttcatccatagttgcctgactccccgtcgtgtagataactacgatacgggagggcttaccatctggccccagtgctgcaatgataccgcgagacccacgctcaccggctccagatttatcagcaataaaccagccagccggaagggccgagcgcagaagtggtcctgcaactttatccgcctccatccagtctattaattgttgccgggaagctagagtaagtagttcgccagttaatagtttgcgcaacgttgttgccattgctacaggcatcgtggtgtcacgctcgtcgtttggtatggcttcattcagctccggttcccaacgatcaaggcgagttacatgatcccccatgttgtgcaaaaaagcggttagctccttcggtcctccgatcgttgtcagaagtaagttggccgcagtgttatcactcatggttatggcagcactgcataattctcttactgtcatgccatccgtaagatgcttttctgtgactggtgagtactcaaccaagtcattctgagaatagtgtatgcggcgaccgagttgctcttgcccggcgtcaatacgggataataccgcgccacatagcagaactttaaaagtgctcatcattggaaaacgttcttcggggcgaaaactctcaagg

SEQ ID NO: 934 - protein, 832 aa, Synthetic construct
MATSLPTPSAITTSALEYAFHTPARNLTKSRGKNIHRYVSVKMSKRITVESTLECDACYHFDFEPSIVRFCAQPIRFLYYLNGQSHSYVPDFLVQFDTNEFVLYEVKSAYAKNKPDFDVEWEAKVKAATELGLELELVEESDIRDTVVLNNLKRMHRYASKDELNNVHNSLLKIIKYNGAQSARCLGEQLGLKGRTVLPILCDLLSRCLLDTRLDKPLSLESRFELASYGAKKGFSSFHRKAVSSQDTLESIELVSSANCLESVTYQDISAFPETIAVEINFRLSILRFLARKCETIVAKSIEPHRVELQQNYSRKIPSAITIYRWWLAFRKSDYNPISLAPNIKDRGNRETKVSTVVDSIMEQAVERVISGRKVNVSSAYKRVRRKVRQYNLTHGTKYTYPKYESVRKRVKKKTPFELLAAGKGERVAKREFRRMGKKILTSSVLERVEIDHTVVDLFAVHEEYRIPLGRPWLTQLVDCYSKAVIGFYLGFEPPSYVSVSLALKNAIQRKDDLISSYESIENEWLCYGIPDLLVTDNGKEFLSKAFDQACESLLINVHQNKVETPDNKPHVERNYGTINTSLLDDLPGKSFSQYLQREGYDSVGEATLTLNEIREIYLIWLVDIYHKKPNQRGTNCPNVAWKKGCQEWEPEEFSGSKDELDFKFAIVDYKQLTKVGITVYKELSYSNDRLAEYRGKKGNHKVQFKYNPECMAVIWVLDEDMNEYFTVNAIDYEYASRVSLWQHKYNMKYQAELNSAEYDEDKEIDAEIKIEEIADRSIVKTNKIRARRRGARHQENSARAKSISNANPASIQKHEDEIVSADNDDWDIDYV

SEQ ID NO: 935 - DNA, 6860 bp, Synthetic construct
  source 1..6860: mol_type = other DNA
ttcagtgcaatttatctcttcaaatgtagcacctgaagtcagccccatacgatataagttgtaattctcatgttagtcatgccccgcgcccaccggaaggagctgactgggttgaaggctctcaagggcatcggtcgagatcccggtgcctaatgagtgagctaacttacattaattgcgttgcgctcactgcccgctttccagtcgggaaacctgtcgtgccagctgcattaatgaatcggccaacgcgcggggagaggcggtttgcgtattgggcgccagggtggtttttcttttcaccagtgagacgggcaacagctgattgcccttcaccgcctggccctgagagagttgcagcaagcggtccacgctggtttgccccagcaggcgaaaatcctgtttgatggtggttaacggcgggatataacatgagctgtcttcggtatcgtcgtatcccactaccgagatgtccgcaccaacgcgcagcccggactcggtaatggcgcgcattgcgcccagcgccatctgatcgttggcaaccagcatcgcagtgggaacgatgccctcattcagcatttgcatggtttgttgaaaaccggacatggcactccagtcgccttcccgttccgctatcggctgaatttgattgcgagtgagatatttatgccagccagccagacgcagacgcgccgagacagaacttaatgggcccgctaacagcgcgatttgctggtgacccaatgcgaccagatgctccacgcccagtcgcgtaccgtcttcatgggagaaaataatactgttgatgggtgtctggtcagagacatcaagaaataacgccggaacattagtgcaggcagcttccacagcaatggcatcctggtcatccagcggatagttaatgatcagcccactgacgcgttgcgcgagaagattgtgcaccgccgctttacaggcttcgacgccgcttcgttctaccatcgacaccaccacgctggcacccagttgatcggcgcgagatttaatcgccgcgacaatttgcgacggcgcgtgcagggccagactggaggtggcaacgccaatcagcaacgactgtttgcccgccagttgttgtgccacgcggttgggaatgtaattcagctccgccatcgccgcttccactttttcccgcgttttcgcagaaacgtggctggcctggttcaccacgcgggaaacggtctgataagagacaccggcatactctgcgacatcgtataacgttactggtttcacattcaccaccctgaattgactctcttccgggcgctatcatgccataccgcgaaaggttttgcgccattcgatggtgtccgggatctcgacgctctcccttatgcgactcctgcattaggaaattaatacgactcactataggggaattgtgagcggataacaattcccctgtagaaataattttgtttaactttaataaggagatataccatggcgacaagtttacctacgccctcagcaattacgacttcggcgttagagtatgcattccatactcccgctcgcaatctaacgaaatctcgcggaaaaaacattcatcgttatgtcagtgtaaagatgagtaagaggattacggtagaatctactctagagtgtgatgcctgctatcactttgattttgagccaagtattgttcgcttttgcgctcaaccgattcgatttttatattatctcaatggtcagtctcactcctatgttcctgactttctagttcaatttgataccaacgagtttgttctatatgaagtaaagtcagcttatgctaagaacaaacctgattttgatgttgaatgggaggcgaaagtaaaagcagcaactgaactagggctagaattggagcttgttgaagagagtgatattagggatacggttgtattaaataatcttaagcgcatgcatcgttatgcttcgaaagatgagctgaataacgtacataactctctcttaaaaataataaagtacaatggcgcccaatctgcaagatgcttgggagaacagttgggtttaaaaggccgaactgttttaccaattttgtgcgatttgctgtcaaggtgtttactcgatacacgtttggataagcctctatctcttgaatctcgatttgagttggccagttatggcgctaagaaagggttctcaagtttccatagaaaagcagtctcttcccaagatacgcttgaatcgatagagcttgtctctagcgctaattgtctagaaagtgttacgtatcaagatatatcagcatttcccgaaacaattgcggtagagattaatttccgattaagcattcttcgctttttagcgcgaaagtgcgaaaccattgtggccaaatcaattgaaccacatcgtgtagagctacagcaaaactatagtagaaaaatacccagtgcaataacgatatatcgatggtggcttgcttttcgaaaatcagactacaaccccattagcttagcacctaatatcaaggatagaggtaatagagagacaaaagtgtcaacagttgttgattctattatggaacaggcagttgaaagagttatatctggacgaaaagtcaatgttagctctgcatataaacgtgttcgacgaaaagttcgtcaatacaatctaactcatggaacgaaatacacgtatcctaagtacgaatctgtaagaaagcgagtaaaaaagaaaaccccatttgagttattagccgcagggaaaggggagagagtagctaagagagagtttcgccgaatgggaaaaaagatcctcacgtctagcgtgctagagagggttgaaatagatcacactgtcgttgacctttttgcagtacacgaagagtatcgaatcccattgggccgaccttggcttactcaattggttgattgttacagtaaagctgtaatcggtttttatttaggtttcgagcctcctagctatgtgtcggtttcccttgcacttaagaatgcaatacaacgcaaagatgacttaatctcctcgtatgaatcgatcgagaatgaatggctatgttatggcatcccagacctactcgtaactgataatggtaaagagtttttgtcgaaagcatttgatcaagcatgtgaatcactattgatcaatgtgcatcaaaataaagttgagacgcccgacaacaaacctcatgttgaacgtaactacgggactattaatacttctctgttagacgatttacctgggaaatccttcagccagtaccttcaaagagaagggtacgactctgtgggagaagctacccttacactcaatgagattagagaaatttacttaatttggttggtggatatttatcataaaaaacccaatcagagaggcactaattgtcctaatgttgcgtggaaaaagggttgtcaagaatgggaaccagaggagttctctggttctaaagacgaattagactttaaatttgctattgttgattacaaacaacttactaaagtagggataactgtctacaaagaactgagttatagcaatgaccgtttagctgaatatagagggaagaaaggaaaccataaagttcagttcaagtataaccctgagtgtatggcagttatttgggtgttggatgaggatatgaatgagtactttacagttaatgcgattgactacgaatatgcaagtagagtatcactttggcaacataaatataacatgaaatatcaagcagaactaaattcagcagaatatgatgaggacaaggaaattgatgcagaaataaaaattgaagaaatcgcagatcgttcaattgttaagactaacaaaatcagagctcggaggcgtggcgctaggcatcaagagaatagcgcaagggctaagtcaatcagtaatgcgaacccggcctcgatacaaaaacatgaagatgaaatcgttagtgcagataatgacgattgggatattgattatgtctgagaaatcgtcaaatgagtgaaacgcgtgaggctcgtatatcaagagctaaaagggcatttgtatccacaccgagcgttaggaaaatcttgagttacatggatagatgtagagatctatcagacctagagtctgagcctacatgcatgatggtctatggtgcttcgggtgtaggtaaaacgaccgtcatcaagaaatacttaaatcaaaacagaagagagtccgaagccgggggcgatataataccggttttgcatattgagttgccagacaatgcgaagccagtagatgcagcaagggaattgctggttgaaatgggtgacccgctagcactttatgaaactgacttagctagattgacgaaaagactgactgaattaatccctgcggtcggcgtgaagctgattattatcgatgagttccaacatttggtggaagaaaggtcaaatcgggttcttacccaagtaggtaattggctaaaaatgatacttaacaaaacgaaatgtccaattgttatatttggtatgccatactcaaaagttgtactgcaagcaaactcgcaacttcacgggcgattttccattcaggttgaactgcgcccctttagctaccagggaggtagaggtgtatttaaaacttttttggaataccttgataaagccctaccttttgaaaaacaggctggcttagccaacgaaagtttgcagaaaaaattgtatgcattctctcagggaaacatgcgttcgttgagaaaccttatttatcaagcatctatcgaagcaattgataatcagcatgagacgataaccgaagaagatttcgtttttgcatcgaagttgacatcgggcgataaacccaactcatggaaaaatccttttgaggagggtgttgaggtaacagaagatatgttacgaccgccaccaaaagatattggttgggaggactatttgagacattcaaccccgagagtgagtaaaccaggtagaaataaaaactttttcgaataacctaggctgctgccaccgctgagcaataactagcataaccccttggggcctctaaacgggtcttgaggggttttttgctgaaacctcaggcatttgagaagcacacggtcacactgcttccggtagtcaataaaccggtaaaccagcaatagacataagcggctatttaacgaccctgccctgaaccgacgacaagctgacgaccgggtctccgcaagtggcacttttcggggaaatgtgcgcggaacccctatttgtttatttttctaaatacattcaaatatgtatccgctcatgaattaattcttagaaaaactcatcgagcatcaaatgaaactgcaatttattcatatcaggattatcaataccatatttttgaaaaagccgtttctgtaatgaaggagaaaactcaccgaggcagttccataggatggcaagatcctggtatcggtctgcgattccgactcgtccaacatcaatacaacctattaatttcccctcgtcaaaaataaggttatcaagtgagaaatcaccatgagtgacgactgaatccggtgagaatggcaaaagtttatgcatttctttccagacttgttcaacaggccagccattacgctcgtcatcaaaatcactcgcatcaaccaaaccgttattcattcgtgattgcgcctgagcgagacgaaatacgcggtcgctgttaaaaggacaattacaaacaggaatcgaatgcaaccggcgcaggaacactgccagcgcatcaacaatattttcacctgaatcaggatattcttctaatacctggaatgctgttttcccggggatcgcagtggtgagtaaccatgcatcatcaggagtacggataaaatgcttgatggtcggaagaggcataaattccgtcagccagtttagtctgaccatctcatctgtaacatcattggcaacgctacctttgccatgtttcagaaacaactctggcgcatcgggcttcccatacaatcgatagattgtcgcacctgattgcccgacattatcgcgagcccatttatacccatataaatcagcatccatgttggaatttaatcgcggcctagagcaagacgtttcccgttgaatatggctcatactcttcctttttcaatattattgaagcatttatcagggttattgtctcatgagcggatacatatttgaatgtatttagaaaaataaacaaataggcatgctagcgcagaaacgtcctagaagatgccaggaggatacttagcagagagacaataaggccggagcgaagccgtttttccataggctccgcccccctgacgaacatcacgaaatctgacgctcaaatcagtggtggcgaaacccgacaggactataaagataccaggcgtttccccctgatggctccctcttgcgctctcctgttcccgtcctgcggcgtccgtgttgtggtggaggctttacccaaatcaccacgtcccgttccgtgtagacagttcgctccaagctgggctgtgtgcaagaaccccccgttcagcccgactgctgcgccttatccggtaactatcatcttgagtccaacccggaaagacacgacaaaacgccactggcagcagccattggtaactgagaattagtggatttagatatcgagagtcttgaagtggtggcctaacagaggctacactgaaaggacagtatttggtatctgcgctccactaaagccagttaccaggttaagcagttccccaactgacttaaccttcgatcaaaccgcctccccaggcggttttttcgtttacagagcaggagattacgacgatcgtaaaaggatctcaagaagatcctttacggattcccgacaccatcactctagat

SEQ ID NO: 936 - DNA, 20 bp, Synthetic construct
  source 1..20: mol_type = other DNA
caaccataaaatgataatta

SEQ ID NO: 937 - DNA, 20 bp, Synthetic construct
  source 1..20: mol_type = other DNA
cacccataaattgataatta

SEQ ID NO: 938 - DNA, 20 bp, Synthetic construct
  source 1..20: mol_type = other DNA
cacccataaattgatattgc

SEQ ID NO: 939 - DNA, 25 bp, Synthetic construct
  source 1..25: mol_type = other DNA
gtctaaacttcagtaagtttacgac

SEQ ID NO: 940 - DNA, 20 bp, Synthetic construct
  source 1..20: mol_type = other DNA
caaccataagttgatatttt

SEQ ID NO: 941 - DNA, 20 bp, Synthetic construct
  source 1..20: mol_type = other DNA
caaccatatattgatatctc

SEQ ID NO: 942 - DNA, 20 bp, Synthetic construct
  source 1..20: mol_type = other DNA
caaccataaagtgatattta

SEQ ID NO: 943 - DNA, 18 bp, Synthetic construct
  source 1..18: mol_type = other DNA
cctgatatgtcatgggat

SEQ ID NO: 944 - DNA, 18 bp, Synthetic construct
  source 1..18: mol_type = other DNA
cacatgattacgccaagc

SEQ ID NO: 945 - DNA, 18 bp, Synthetic construct
  source 1..18: mol_type = other DNA
ctcactcagatggaggat

SEQ ID NO: 946 - DNA, 18 bp, Synthetic construct
  source 1..18: mol_type = other DNA
gttctgctgtagtcaagc

SEQ ID NO: 947 - DNA, 18 bp, Synthetic construct
  source 1..18: mol_type = other DNA
cgatacgtgacacaggat

SEQ ID NO: 948 - DNA, 18 bp, Synthetic construct
  source 1..18: mol_type = other DNA
gctaccgtgatacaaagc

SEQ ID NO: 949 - DNA, 18 bp, Synthetic construct
  source 1..18: mol_type = other DNA
ccacagacttgagaggat

SEQ ID NO: 950 - DNA, 18 bp, Synthetic construct
  source 1..18: mol_type = other DNA
cagttcttggtcgaaagc

SEQ ID NO: 951 - DNA, 27 bp, Synthetic construct
  source 1..27: mol_type = other DNA
catggatccctaccatccatgatcacg

SEQ ID NO: 952 - DNA, 31 bp, Synthetic construct
  source 1..31: mol_type = other DNA
gccaagcttctgttgatacaaccataaaatg

SEQ ID NO: 953 - DNA, 18 bp, Synthetic construct
  source 1..18: mol_type = other DNA
ggaaaggtactcgaagct

SEQ ID NO: 954 - DNA, 18 bp, Synthetic construct
  source 1..18: mol_type = other DNA
ctactcagtgtcaaaccc

SEQ ID NO: 955 - DNA, 130 bp, Synthetic construct
  source 1..130: mol_type = other DNA
cacatgattacgccaagctttgttgatacaaccataaaatgataattacacccataaattgataattatcacacccataaattgatattgcctcttcatggtctaaacttggatcccatgacatatcagg

SEQ ID NO: 956 - DNA, 130 bp, Synthetic construct
  source 1..130: mol_type = other DNA
cacatgattacgccaagctttgttgatacacccataaattgataattacacccataaattgataattatcacacccataaattgatattgcctcttcatggtctaaacttggatcccatgacatatcagg

SEQ ID NO: 957 - DNA, 130 bp, Synthetic construct
  source 1..130: mol_type = other DNA
cacatgattacgccaagctttgttgatacacccataaattgatattgccacccataaattgataattatcacacccataaattgatattgcctcttcatggtctaaacttggatcccatgacatatcagg

SEQ ID NO: 958 - DNA, 130 bp, Synthetic construct
  source 1..130: mol_type = other DNA
cacatgattacgccaagctttgttgatagtctaaacttcagtaagtttacgaccacccataaattgataattatcacacccataaattgatattgcctcttcatggtctaggatcccatgacatatcagg

SEQ ID NO: 959 - DNA, 130 bp, Synthetic construct
  source 1..130: mol_type = other DNA
cacatgattacgccaagctttgttgatacaaccataagttgatattttcacccataaattgataattatcacacccataaattgatattgcctcttcatggtctaaacttggatcccatgacatatcagg

SEQ ID NO: 960 - DNA, 130 bp, Synthetic construct
  source 1..130: mol_type = other DNA
cacatgattacgccaagctttgttgatacaaccatatattgatatctccacccataaattgataattatcacacccataaattgatattgcctcttcatggtctaaacttggatcccatgacatatcagg

SEQ ID NO: 961 - DNA, 130 bp, Synthetic construct
  source 1..130: mol_type = other DNA
cacatgattacgccaagctttgttgatacaaccataaagtgatatttacacccataaattgataattatcacacccataaattgatattgcctcttcatggtctaaacttggatcccatgacatatcagg

SEQ ID NO: 962 - DNA, 130 bp, Synthetic construct
  source 1..130: mol_type = other DNA
cacatgattacgccaagctttgttgatacaaccataaaatgataattacacccataaattgatattgctcacacccataaattgatattgcctcttcatggtctaaacttggatcccatgacatatcagg

SEQ ID NO: 963 - DNA, 130 bp, Synthetic construct
  source 1..130: mol_type = other DNA
cacatgattacgccaagctttgttgatacacccataaattgataattacacccataaattgatattgctcacacccataaattgatattgcctcttcatggtctaaacttggatcccatgacatatcagg

SEQ ID NO: 964 - DNA, 130 bp, Synthetic construct
  source 1..130: mol_type = other DNA
cacatgattacgccaagctttgttgatacacccataaattgatattgccacccataaattgatattgctcacacccataaattgatattgcctcttcatggtctaaacttggatcccatgacatatcagg

SEQ ID NO: 965 - DNA, 130 bp, Synthetic construct
  source 1..130: mol_type = other DNA
cacatgattacgccaagctttgttgatagtctaaacttcagtaagtttacgaccacccataaattgatattgctcacacccataaattgatattgcctcttcatggtctaggatcccatgacatatcagg

SEQ ID NO: 966 - DNA, 130 bp, Synthetic construct
  source 1..130: mol_type = other DNA
cacatgattacgccaagctttgttgatacaaccataagttgatattttcacccataaattgatattgctcacacccataaattgatattgcctcttcatggtctaaacttggatcccatgacatatcagg

SEQ ID NO: 967 - DNA, 130 bp, Synthetic construct
  source 1..130: mol_type = other DNA
cacatgattacgccaagctttgttgatacaaccatatattgatatctccacccataaattgatattgctcacacccataaattgatattgcctcttcatggtctaaacttggatcccatgacatatcagg

SEQ ID NO: 968 - DNA, 130 bp, Synthetic construct
  source 1..130: mol_type = other DNA
cacatgattacgccaagctttgttgatacaaccataaagtgatatttacacccataaattgatattgctcacacccataaattgatattgcctcttcatggtctaaacttggatcccatgacatatcagg

SEQ ID NO: 969 - DNA, 130 bp, Synthetic construct
  source 1..130: mol_type = other DNA
cacatgattacgccaagctttgttgatacaaccataaaatgataattagtctaaacttcagtaagtttacgactcacacccataaattgatattgcctcttcatggtctaggatcccatgacatatcagg

SEQ ID NO: 970 - DNA, 130 bp, Synthetic construct
  source 1..130: mol_type = other DNA
cacatgattacgccaagctttgttgatacacccataaattgataattagtctaaacttcagtaagtttacgactcacacccataaattgatattgcctcttcatggtctaggatcccatgacatatcagg

SEQ ID NO: 971 - DNA, 130 bp, Synthetic construct
  source 1..130: mol_type = other DNA
cacatgattacgccaagctttgttgatacacccataaattgatattgcgtctaaacttcagtaagtttacgactcacacccataaattgatattgcctcttcatggtctaggatcccatgacatatcagg

SEQ ID NO: 972 - DNA, 130 bp, Synthetic construct
  source 1..130: mol_type = other DNA
cacatgattacgccaagctttgttgatagtctaaacttcagtaagtttacgacgtctaaacttcagtaagtttacgactcacacccataaattgatattgcctcttcatgggatcccatgacatatcagg

SEQ ID NO: 973 - DNA, 130 bp, Synthetic construct
  source 1..130: mol_type = other DNA
cacatgattacgccaagctttgttgatacaaccataagttgatattttgtctaaacttcagtaagtttacgactcacacccataaattgatattgcctcttcatggtctaggatcccatgacatatcagg

SEQ ID NO: 974 - DNA, 130 bp, Synthetic construct
  source 1..130: mol_type = other DNA
cacatgattacgccaagctttgttgatacaaccatatattgatatctcgtctaaacttcagtaagtttacgactcacacccataaattgatattgcctcttcatggtctaggatcccatgacatatcagg

SEQ ID NO: 975 - DNA, 130 bp, Synthetic construct
  source 1..130: mol_type = other DNA
cacatgattacgccaagctttgttgatacaaccataaagtgatatttagtctaaacttcagtaagtttacgactcacacccataaattgatattgcctcttcatggtctaggatcccatgacatatcagg

SEQ ID NO: 976 - DNA, 130 bp, Synthetic construct
  source 1..130: mol_type = other DNA
cacatgattacgccaagctttgttgatacaaccataaaatgataattacaaccataagttgatatttttcacacccataaattgatattgcctcttcatggtctaaacttggatcccatgacatatcagg

SEQ ID NO: 977 - DNA, 130 bp, Synthetic construct
  source 1..130: mol_type = other DNA
cacatgattacgccaagctttgttgatacacccataaattgataattacaaccataagttgatatttttcacacccataaattgatattgcctcttcatggtctaaacttggatcccatgacatatcagg

SEQ ID NO: 978 - DNA, 130 bp, Synthetic construct
  source 1..130: mol_type = other DNA
cacatgattacgccaagctttgttgatacacccataaattgatattgccaaccataagttgatatttttcacacccataaattgatattgcctcttcatggtctaaacttggatcccatgacatatcagg

SEQ ID NO: 979 - DNA, 130 bp, Synthetic construct
  source 1..130: mol_type = other DNA
cacatgattacgccaagctttgttgatagtctaaacttcagtaagtttacgaccaaccataagttgatatttttcacacccataaattgatattgcctcttcatggtctaggatcccatgacatatcagg

SEQ ID NO: 980 - DNA, 130 bp, Synthetic construct
  source 1..130: mol_type = other DNA
cacatgattacgccaagctttgttgatacaaccataagttgatattttcaaccataagttgatatttttcacacccataaattgatattgcctcttcatggtctaaacttggatcccatgacatatcagg

SEQ ID NO: 981 - DNA, 130 bp, Synthetic construct
  source 1..130: mol_type = other DNA
cacatgattacgccaagctttgttgatacaaccatatattgatatctccaaccataagttgatatttttcacacccataaattgatattgcctcttcatggtctaaacttggatcccatgacatatcagg

SEQ ID NO: 982 - DNA, 130 bp, Synthetic construct
  source 1..130: mol_type = other DNA
cacatgattacgccaagctttgttgatacaaccataaagtgatatttacaaccataagttgatatttttcacacccataaattgatattgcctcttcatggtctaaacttggatcccatgacatatcagg

SEQ ID NO: 983 - DNA, 130 bp, Synthetic construct
  source 1..130: mol_type = other DNA
cacatgattacgccaagctttgttgatacaaccataaaatgataattacaaccatatattgatatctctcacacccataaattgatattgcctcttcatggtctaaacttggatcccatgacatatcagg

SEQ ID NO: 984 - DNA, 130 bp, Synthetic construct
  source 1..130: mol_type = other DNA
cacatgattacgccaagctttgttgatacacccataaattgataattacaaccatatattgatatctctcacacccataaattgatattgcctcttcatggtctaaacttggatcccatgacatatcagg

SEQ ID NO: 985 - DNA, 130 bp, Synthetic construct
  source 1..130: mol_type = other DNA
cacatgattacgccaagctttgttgatacacccataaattgatattgccaaccatatattgatatctctcacacccataaattgatattgcctcttcatggtctaaacttggatcccatgacatatcagg

SEQ ID NO: 986 - DNA, 130 bp, Synthetic construct
  source 1..130: mol_type = other DNA
cacatgattacgccaagctttgttgatagtctaaacttcagtaagtttacgaccaaccatatattgatatctctcacacccataaattgatattgcctcttcatggtctaggatcccatgacatatcagg

SEQ ID NO: 987 - DNA, 130 bp, Synthetic construct
  source 1..130: mol_type = other DNA
cacatgattacgccaagctttgttgatacaaccataagttgatattttcaaccatatattgatatctctcacacccataaattgatattgcctcttcatggtctaaacttggatcccatgacatatcagg

SEQ ID NO: 988 - DNA, 130 bp, Synthetic construct
  source 1..130: mol_type = other DNA
cacatgattacgccaagctttgttgatacaaccatatattgatatctccaaccatatattgatatctctcacacccataaattgatattgcctcttcatggtctaaacttggatcccatgacatatcagg

SEQ ID NO: 989 - DNA, 130 bp, Synthetic construct
  source 1..130: mol_type = other DNA
cacatgattacgccaagctttgttgatacaaccataaagtgatatttacaaccatatattgatatctctcacacccataaattgatattgcctcttcatggtctaaacttggatcccatgacatatcagg

SEQ ID NO: 990 - DNA, 130 bp, Synthetic construct
  source 1..130: mol_type = other DNA
cacatgattacgccaagctttgttgatacaaccataaaatgataattacaaccataaagtgatatttatcacacccataaattgatattgcctcttcatggtctaaacttggatcccatgacatatcagg

SEQ ID NO: 991 - DNA, 130 bp, Synthetic construct
  source 1..130: mol_type = other DNA
cacatgattacgccaagctttgttgatacacccataaattgataattacaaccataaagtgatatttatcacacccataaattgatattgcctcttcatggtctaaacttggatcccatgacatatcagg

SEQ ID NO: 992 - DNA, 130 bp, Synthetic construct
  source 1..130: mol_type = other DNA
cacatgattacgccaagctttgttgatacacccataaattgatattgccaaccataaagtgatatttatcacacccataaattgatattgcctcttcatggtctaaacttggatcccatgacatatcagg

SEQ ID NO: 993 - DNA, 130 bp, Synthetic construct
  source 1..130: mol_type = other DNA
cacatgattacgccaagctttgttgatagtctaaacttcagtaagtttacgaccaaccataaagtgatatttatcacacccataaattgatattgcctcttcatggtctaggatcccatgacatatcagg

SEQ ID NO: 994 - DNA, 130 bp, Synthetic construct
  source 1..130: mol_type = other DNA
cacatgattacgccaagctttgttgatacaaccataagttgatattttcaaccataaagtgatatttatcacacccataaattgatattgcctcttcatggtctaaacttggatcccatgacatatcagg

SEQ ID NO: 995 - DNA, 130 bp, Synthetic construct
  source 1..130: mol_type = other DNA
cacatgattacgccaagctttgttgatacaaccatatattgatatctccaaccataaagtgatatttatcacacccataaattgatattgcctcttcatggtctaaacttggatcccatgacatatcagg

SEQ ID NO: 996 - DNA, 130 bp, Synthetic construct
  source 1..130: mol_type = other DNA
cacatgattacgccaagctttgttgatacaaccataaagtgatatttacaaccataaagtgatatttatcacacccataaattgatattgcctcttcatggtctaaacttggatcccatgacatatcagg

SEQ ID NO: 997 - DNA, 130 bp, Synthetic construct
  source 1..130: mol_type = other DNA
cacatgattacgccaagctttgttgatacaaccataaaatgataattacaaccataaaatgataattatcacacccataaattgatattgcctcttcatggtctaaacttggatcccatgacatatcagg

SEQ ID NO: 998 - DNA, 130 bp, Synthetic construct
  source 1..130: mol_type = other DNA
cacatgattacgccaagctttgttgatacacccataaattgataattacaaccataaaatgataattatcacacccataaattgatattgcctcttcatggtctaaacttggatcccatgacatatcagg

SEQ ID NO: 999 - DNA, 130 bp, Synthetic construct
  source 1..130: mol_type = other DNA
cacatgattacgccaagctttgttgatacacccataaattgatattgccaaccataaaatgataattatcacacccataaattgatattgcctcttcatggtctaaacttggatcccatgacatatcagg

SEQ ID NO: 1000 - DNA, 130 bp, Synthetic construct
  source 1..130: mol_type = other DNA
cacatgattacgccaagctttgttgatagtctaaacttcagtaagtttacgaccaaccataaaatgataattatcacacccataaattgatattgcctcttcatggtctaggatcccatgacatatcagg

SEQ ID NO: 1001 - DNA, 130 bp, Synthetic construct
  source 1..130: mol_type = other DNA
cacatgattacgccaagctttgttgatacaaccataagttgatattttcaaccataaaatgataattatcacacccataaattgatattgcctcttcatggtctaaacttggatcccatgacatatcagg

SEQ ID NO: 1002 - DNA, 130 bp, Synthetic construct
  source 1..130: mol_type = other DNA
cacatgattacgccaagctttgttgatacaaccatatattgatatctccaaccataaaatgataattatcacacccataaattgatattgcctcttcatggtctaaacttggatcccatgacatatcagg

SEQ ID NO: 1003 - DNA, 130 bp, Synthetic construct
  source 1..130: mol_type = other DNA
cacatgattacgccaagctttgttgatacaaccataaagtgatatttacaaccataaaatgataattatcacacccataaattgatattgcctcttcatggtctaaacttggatcccatgacatatcagg

SEQ ID NO: 1004 - DNA, 130 bp, Synthetic construct
  source 1..130: mol_type = other DNA
cacatgattacgccaagctttgttgatacaaccataaaatgataattacacccataaattgataattatcagtctaaacttcagtaagtttacgacctcttcatggtctaggatcccatgacatatcagg

SEQ ID NO: 1005 - DNA, 130 bp, Synthetic construct
  source 1..130: mol_type = other DNA
cacatgattacgccaagctttgttgatacacccataaattgataattacacccataaattgataattatcagtctaaacttcagtaagtttacgacctcttcatggtctaggatcccatgacatatcagg

SEQ ID NO: 1006 - DNA, 130 bp, Synthetic construct
  source 1..130: mol_type = other DNA
cacatgattacgccaagctttgttgatacacccataaattgatattgccacccataaattgataattatcagtctaaacttcagtaagtttacgacctcttcatggtctaggatcccatgacatatcagg

SEQ ID NO: 1007 - DNA, 130 bp, Synthetic construct
  source 1..130: mol_type = other DNA
cacatgattacgccaagctttgttgatagtctaaacttcagtaagtttacgaccacccataaattgataattatcagtctaaacttcagtaagtttacgacctcttcatgggatcccatgacatatcagg

SEQ ID NO: 1008 - DNA, 130 bp, Synthetic construct
  source 1..130: mol_type = other DNA
cacatgattacgccaagctttgttgatacaaccataagttgatattttcacccataaattgataattatcagtctaaacttcagtaagtttacgacctcttcatggtctaggatcccatgacatatcagg

SEQ ID NO: 1009 - DNA, 130 bp, Synthetic construct
  source 1..130: mol_type = other DNA
cacatgattacgccaagctttgttgatacaaccatatattgatatctccacccataaattgataattatcagtctaaacttcagtaagtttacgacctcttcatggtctaggatcccatgacatatcagg

SEQ ID NO: 1010 - DNA, 130 bp, Synthetic construct
  source 1..130: mol_type = other DNA
cacatgattacgccaagctttgttgatacaaccataaagtgatatttacacccataaattgataattatcagtctaaacttcagtaagtttacgacctcttcatggtctaggatcccatgacatatcagg

SEQ ID NO: 1011 - DNA, 130 bp, Synthetic construct
  source 1..130: mol_type = other DNA
cacatgattacgccaagctttgttgatacaaccataaaatgataattacacccataaattgatattgctcagtctaaacttcagtaagtttacgacctcttcatggtctaggatcccatgacatatcagg

SEQ ID NO: 1012 - DNA, 130 bp, Synthetic construct
  source 1..130: mol_type = other DNA
cacatgattacgccaagctttgttgatacacccataaattgataattacacccataaattgatattgctcagtctaaacttcagtaagtttacgacctcttcatggtctaggatcccatgacatatcagg

SEQ ID NO: 1013 - DNA, 130 bp, Synthetic construct
  source 1..130: mol_type = other DNA
cacatgattacgccaagctttgttgatacacccataaattgatattgccacccataaattgatattgctcagtctaaacttcagtaagtttacgacctcttcatggtctaggatcccatgacatatcagg

SEQ ID NO: 1014 - DNA, 130 bp, Synthetic construct
  source 1..130: mol_type = other DNA
cacatgattacgccaagctttgttgatagtctaaacttcagtaagtttacgaccacccataaattgatattgctcagtctaaacttcagtaagtttacgacctcttcatgggatcccatgacatatcagg

SEQ ID NO: 1015 - DNA, 130 bp, Synthetic construct
  source 1..130: mol_type = other DNA
cacatgattacgccaagctttgttgatacaaccataagttgatattttcacccataaattgatattgctcagtctaaacttcagtaagtttacgacctcttcatggtctaggatcccatgacatatcagg

SEQ ID NO: 1016 - DNA, 130 bp, Synthetic construct
  source 1..130: mol_type = other DNA
cacatgattacgccaagctttgttgatacaaccatatattgatatctccacccataaattgatattgctcagtctaaacttcagtaagtttacgacctcttcatggtctaggatcccatgacatatcagg

SEQ ID NO: 1017 - DNA, 130 bp, Synthetic construct
  source 1..130: mol_type = other DNA
cacatgattacgccaagctttgttgatacaaccataaagtgatatttacacccataaattgatattgctcagtctaaacttcagtaagtttacgacctcttcatggtctaggatcccatgacatatcagg

SEQ ID NO: 1018 - DNA, 130 bp, Synthetic construct
  source 1..130: mol_type = other DNA
cacatgattacgccaagctttgttgatacaaccataaaatgataattagtctaaacttcagtaagtttacgactcagtctaaacttcagtaagtttacgacctcttcatgggatcccatgacatatcagg

SEQ ID NO: 1019 - DNA, 130 bp, Synthetic construct
  source 1..130: mol_type = other DNA
cacatgattacgccaagctttgttgatacacccataaattgataattagtctaaacttcagtaagtttacgactcagtctaaacttcagtaagtttacgacctcttcatgggatcccatgacatatcagg

SEQ ID NO: 1020 - DNA, 130 bp, Synthetic construct
  source 1..130: mol_type = other DNA
cacatgattacgccaagctttgttgatacacccataaattgatattgcgtctaaacttcagtaagtttacgactcagtctaaacttcagtaagtttacgacctcttcatgggatcccatgacatatcagg

SEQ ID NO: 1021 - DNA, 130 bp, Synthetic construct
  source 1..130: mol_type = other DNA
cacatgattacgccaagctttgttgatagtctaaacttcagtaagtttacgacgtctaaacttcagtaagtttacgactcagtctaaacttcagtaagtttacgacctctggatcccatgacatatcagg

SEQ ID NO: 1022 - DNA, 130 bp, Synthetic construct
  source 1..130: mol_type = other DNA
cacatgattacgccaagctttgttgatacaaccataagttgatattttgtctaaacttcagtaagtttacgactcagtctaaacttcagtaagtttacgacctcttcatgggatcccatgacatatcagg

SEQ ID NO: 1023 - DNA, 130 bp, Synthetic construct
  source 1..130: mol_type = other DNA
cacatgattacgccaagctttgttgatacaaccatatattgatatctcgtctaaacttcagtaagtttacgactcagtctaaacttcagtaagtttacgacctcttcatgggatcccatgacatatcagg

SEQ ID NO: 1024 - DNA, 130 bp, Synthetic construct
  source 1..130: mol_type = other DNA
cacatgattacgccaagctttgttgatacaaccataaagtgatatttagtctaaacttcagtaagtttacgactcagtctaaacttcagtaagtttacgacctcttcatgggatcccatgacatatcagg

SEQ ID NO: 1025 - DNA, 130 bp, Synthetic construct
  source 1..130: mol_type = other DNA
cacatgattacgccaagctttgttgatacaaccataaaatgataattacaaccataagttgatatttttcagtctaaacttcagtaagtttacgacctcttcatggtctaggatcccatgacatatcagg

SEQ ID NO: 1026 - DNA, 130 bp, Synthetic construct
  source 1..130: mol_type = other DNA
cacatgattacgccaagctttgttgatacacccataaattgataattacaaccataagttgatatttttcagtctaaacttcagtaagtttacgacctcttcatggtctaggatcccatgacatatcagg

SEQ ID NO: 1027 - DNA, 130 bp, Synthetic construct
  source 1..130: mol_type = other DNA
cacatgattacgccaagctttgttgatacacccataaattgatattgccaaccataagttgatatttttcagtctaaacttcagtaagtttacgacctcttcatggtctaggatcccatgacatatcagg

SEQ ID NO: 1028 - DNA, 130 bp, Synthetic construct
  source 1..130: mol_type = other DNA
cacatgattacgccaagctttgttgatagtctaaacttcagtaagtttacgaccaaccataagttgatatttttcagtctaaacttcagtaagtttacgacctcttcatgggatcccatgacatatcagg

SEQ ID NO: 1029 - DNA, 130 bp, Synthetic construct
  source 1..130: mol_type = other DNA
cacatgattacgccaagctttgttgatacaaccataagttgatattttcaaccataagttgatatttttcagtctaaacttcagtaagtttacgacctcttcatggtctaggatcccatgacatatcagg

SEQ ID NO: 1030 - DNA, 130 bp, Synthetic construct
  source 1..130: mol_type = other DNA
cacatgattacgccaagctttgttgatacaaccatatattgatatctccaaccataagttgatatttttcagtctaaacttcagtaagtttacgacctcttcatggtctaggatcccatgacatatcagg

SEQ ID NO: 1031 - DNA, 130 bp, Synthetic construct
  source 1..130: mol_type = other DNA
cacatgattacgccaagctttgttgatacaaccataaagtgatatttacaaccataagttgatatttttcagtctaaacttcagtaagtttacgacctcttcatggtctaggatcccatgacatatcagg

SEQ ID NO: 1032 - DNA, 130 bp, Synthetic construct
  source 1..130: mol_type = other DNA
cacatgattacgccaagctttgttgatacaaccataaaatgataattacaaccatatattgatatctctcagtctaaacttcagtaagtttacgacctcttcatggtctaggatcccatgacatatcagg

SEQ ID NO: 1033 - DNA, 130 bp, Synthetic construct
  source 1..130: mol_type = other DNA
cacatgattacgccaagctttgttgatacacccataaattgataattacaaccatatattgatatctctcagtctaaacttcagtaagtttacgacctcttcatggtctaggatcccatgacatatcagg

SEQ ID NO: 1034 - DNA, 130 bp, Synthetic construct
  source 1..130: mol_type = other DNA
cacatgattacgccaagctttgttgatacacccataaattgatattgccaaccatatattgatatctctcagtctaaacttcagtaagtttacgacctcttcatggtctaggatcccatgacatatcagg

SEQ ID NO: 1035 - DNA, 130 bp, Synthetic construct
  source 1..130: mol_type = other DNA
cacatgattacgccaagctttgttgatagtctaaacttcagtaagtttacgaccaaccatatattgatatctctcagtctaaacttcagtaagtttacgacctcttcatgggatcccatgacatatcagg

SEQ ID NO: 1036 - DNA, 130 bp, Synthetic construct
  source 1..130: mol_type = other DNA
cacatgattacgccaagctttgttgatacaaccataagttgatattttcaaccatatattgatatctctcagtctaaacttcagtaagtttacgacctcttcatggtctaggatcccatgacatatcagg

SEQ ID NO: 1037 - DNA, 130 bp, Synthetic construct
  source 1..130: mol_type = other DNA
cacatgattacgccaagctttgttgatacaaccatatattgatatctccaaccatatattgatatctctcagtctaaacttcagtaagtttacgacctcttcatggtctaggatcccatgacatatcagg

SEQ ID NO: 1038 - DNA, 130 bp, Synthetic construct
  source 1..130: mol_type = other DNA
cacatgattacgccaagctttgttgatacaaccataaagtgatatttacaaccatatattgatatctctcagtctaaacttcagtaagtttacgacctcttcatggtctaggatcccatgacatatcagg

SEQ ID NO: 1039 - DNA, 130 bp, Synthetic construct
  source 1..130: mol_type = other DNA
cacatgattacgccaagctttgttgatacaaccataaaatgataattacaaccataaagtgatatttatcagtctaaacttcagtaagtttacgacctcttcatggtctaggatcccatgacatatcagg

SEQ ID NO: 1040 - DNA, 130 bp, Synthetic construct
  source 1..130: mol_type = other DNA
cacatgattacgccaagctttgttgatacacccataaattgataattacaaccataaagtgatatttatcagtctaaacttcagtaagtttacgacctcttcatggtctaggatcccatgacatatcagg

SEQ ID NO: 1041 - DNA, 130 bp, Synthetic construct
  source 1..130: mol_type = other DNA
cacatgattacgccaagctttgttgatacacccataaattgatattgccaaccataaagtgatatttatcagtctaaacttcagtaagtttacgacctcttcatggtctaggatcccatgacatatcagg

SEQ ID NO: 1042 - DNA, 130 bp, Synthetic construct
  source 1..130: mol_type = other DNA
cacatgattacgccaagctttgttgatagtctaaacttcagtaagtttacgaccaaccataaagtgatatttatcagtctaaacttcagtaagtttacgacctcttcatgggatcccatgacatatcagg

SEQ ID NO: 1043 - DNA, 130 bp, Synthetic construct
  source 1..130: mol_type = other DNA
cacatgattacgccaagctttgttgatacaaccataagttgatattttcaaccataaagtgatatttatcagtctaaacttcagtaagtttacgacctcttcatggtctaggatcccatgacatatcagg

SEQ ID NO: 1044 - DNA, 130 bp, Synthetic construct
  source 1..130: mol_type = other DNA
cacatgattacgccaagctttgttgatacaaccatatattgatatctccaaccataaagtgatatttatcagtctaaacttcagtaagtttacgacctcttcatggtctaggatcccatgacatatcagg

SEQ ID NO: 1045 - DNA, 130 bp, Synthetic construct
  source 1..130: mol_type = other DNA
cacatgattacgccaagctttgttgatacaaccataaagtgatatttacaaccataaagtgatatttatcagtctaaacttcagtaagtttacgacctcttcatggtctaggatcccatgacatatcagg

SEQ ID NO: 1046 - DNA, 130 bp, Synthetic construct
  source 1..130: mol_type = other DNA
cacatgattacgccaagctttgttgatacaaccataaaatgataattacaaccataaaatgataattatcagtctaaacttcagtaagtttacgacctcttcatggtctaggatcccatgacatatcagg

SEQ ID NO: 1047 - DNA, 130 bp, Synthetic construct
  source 1..130: mol_type = other DNA
cacatgattacgccaagctttgttgatacacccataaattgataattacaaccataaaatgataattatcagtctaaacttcagtaagtttacgacctcttcatggtctaggatcccatgacatatcagg

SEQ ID NO: 1048 - DNA, 130 bp, Synthetic construct
  source 1..130: mol_type = other DNA
cacatgattacgccaagctttgttgatacacccataaattgatattgccaaccataaaatgataattatcagtctaaacttcagtaagtttacgacctcttcatggtctaggatcccatgacatatcagg

SEQ ID NO: 1049 - DNA, 130 bp, Synthetic construct
  source 1..130: mol_type = other DNA
cacatgattacgccaagctttgttgatagtctaaacttcagtaagtttacgaccaaccataaaatgataattatcagtctaaacttcagtaagtttacgacctcttcatgggatcccatgacatatcagg

SEQ ID NO: 1050 - DNA, 130 bp, Synthetic construct
  source 1..130: mol_type = other DNA
cacatgattacgccaagctttgttgatacaaccataagttgatattttcaaccataaaatgataattatcagtctaaacttcagtaagtttacgacctcttcatggtctaggatcccatgacatatcagg

SEQ ID NO: 1051 - DNA, 130 bp, Synthetic construct
  source 1..130: mol_type = other DNA
cacatgattacgccaagctttgttgatacaaccatatattgatatctccaaccataaaatgataattatcagtctaaacttcagtaagtttacgacctcttcatggtctaggatcccatgacatatcagg

SEQ ID NO: 1052 - DNA, 130 bp, Synthetic construct
  source 1..130: mol_type = other DNA
cacatgattacgccaagctttgttgatacaaccataaagtgatatttacaaccataaaatgataattatcagtctaaacttcagtaagtttacgacctcttcatggtctaggatcccatgacatatcagg

SEQ ID NO: 1053 - DNA, 130 bp, Synthetic construct
  source 1..130: mol_type = other DNA
cacatgattacgccaagctttgttgatacaaccataaaatgataattacacccataaattgataattatcacaaccataagttgatattttctcttcatggtctaaacttggatcccatgacatatcagg

SEQ ID NO: 1054 - DNA, 130 bp, Synthetic construct
  source 1..130: mol_type = other DNA
cacatgattacgccaagctttgttgatacacccataaattgataattacacccataaattgataattatcacaaccataagttgatattttctcttcatggtctaaacttggatcccatgacatatcagg

SEQ ID NO: 1055 - DNA, 130 bp, Synthetic construct
  source 1..130: mol_type = other DNA
cacatgattacgccaagctttgttgatacacccataaattgatattgccacccataaattgataattatcacaaccataagttgatattttctcttcatggtctaaacttggatcccatgacatatcagg

SEQ ID NO: 1056 - DNA, 130 bp, Synthetic construct
  source 1..130: mol_type = other DNA
cacatgattacgccaagctttgttgatagtctaaacttcagtaagtttacgaccacccataaattgataattatcacaaccataagttgatattttctcttcatggtctaggatcccatgacatatcagg

SEQ ID NO: 1057 - DNA, 130 bp, Synthetic construct
  source 1..130: mol_type = other DNA
cacatgattacgccaagctttgttgatacaaccataagttgatattttcacccataaattgataattatcacaaccataagttgatattttctcttcatggtctaaacttggatcccatgacatatcagg

SEQ ID NO: 1058 - DNA, 130 bp, Synthetic construct
  source 1..130: mol_type = other DNA
cacatgattacgccaagctttgttgatacaaccatatattgatatctccacccataaattgataattatcacaaccataagttgatattttctcttcatggtctaaacttggatcccatgacatatcagg

SEQ ID NO: 1059 - DNA, 130 bp, Synthetic construct
  source 1..130: mol_type = other DNA
cacatgattacgccaagctttgttgatacaaccataaagtgatatttacacccataaattgataattatcacaaccataagttgatattttctcttcatggtctaaacttggatcccatgacatatcagg

SEQ ID NO: 1060 - DNA, 130 bp, Synthetic construct
  source 1..130: mol_type = other DNA
cacatgattacgccaagctttgttgatacaaccataaaatgataattacacccataaattgatattgctcacaaccataagttgatattttctcttcatggtctaaacttggatcccatgacatatcagg

SEQ ID NO: 1061 - DNA, 130 bp, Synthetic construct
  source 1..130: mol_type = other DNA
cacatgattacgccaagctttgttgatacacccataaattgataattacacccataaattgatattgctcacaaccataagttgatattttctcttcatggtctaaacttggatcccatgacatatcagg

SEQ ID NO: 1062 - DNA, 130 bp, Synthetic construct
  source 1..130: mol_type = other DNA
cacatgattacgccaagctttgttgatacacccataaattgatattgccacccataaattgatattgctcacaaccataagttgatattttctcttcatggtctaaacttggatcccatgacatatcagg

SEQ ID NO: 1063 - DNA, 130 bp, Synthetic construct
  source 1..130: mol_type = other DNA
cacatgattacgccaagctttgttgatagtctaaacttcagtaagtttacgaccacccataaattgatattgctcacaaccataagttgatattttctcttcatggtctaggatcccatgacatatcagg

SEQ ID NO: 1064 - DNA, 130 bp, Synthetic construct
  source 1..130: mol_type = other DNA
cacatgattacgccaagctttgttgatacaaccataagttgatattttcacccataaattgatattgctcacaaccataagttgatattttctcttcatggtctaaacttggatcccatgacatatcagg

SEQ ID NO: 1065 - DNA, 130 bp, Synthetic construct
  source 1..130: mol_type = other DNA
cacatgattacgccaagctttgttgatacaaccatatattgatatctccacccataaattgatattgctcacaaccataagttgatattttctcttcatggtctaaacttggatcccatgacatatcagg

SEQ ID NO: 1066 - DNA, 130 bp, Synthetic construct
  source 1..130: mol_type = other DNA
cacatgattacgccaagctttgttgatacaaccataaagtgatatttacacccataaattgatattgctcacaaccataagttgatattttctcttcatggtctaaacttggatcccatgacatatcagg

SEQ ID NO: 1067 - DNA, 130 bp, Synthetic construct
  source 1..130: mol_type = other DNA
cacatgattacgccaagctttgttgatacaaccataaaatgataattagtctaaacttcagtaagtttacgactcacaaccataagttgatattttctcttcatggtctaggatcccatgacatatcagg

SEQ ID NO: 1068 - DNA, 130 bp, Synthetic construct
  source 1..130: mol_type = other DNA
cacatgattacgccaagctttgttgatacacccataaattgataattagtctaaacttcagtaagtttacgactcacaaccataagttgatattttctcttcatggtctaggatcccatgacatatcagg

SEQ ID NO: 1069 - DNA, 130 bp, Synthetic construct
  source 1..130: mol_type = other DNA
cacatgattacgccaagctttgttgatacacccataaattgatattgcgtctaaacttcagtaagtttacgactcacaaccataagttgatattttctcttcatggtctaggatcccatgacatatcagg

SEQ ID NO: 1070 - DNA, 130 bp, Synthetic construct
  source 1..130: mol_type = other DNA
cacatgattacgccaagctttgttgatagtctaaacttcagtaagtttacgacgtctaaacttcagtaagtttacgactcacaaccataagttgatattttctcttcatgggatcccatgacatatcagg

SEQ ID NO: 1071 - DNA, 130 bp, Synthetic construct
  source 1..130: mol_type = other DNA
cacatgattacgccaagctttgttgatacaaccataagttgatattttgtctaaacttcagtaagtttacgactcacaaccataagttgatattttctcttcatggtctaggatcccatgacatatcagg

SEQ ID NO: 1072 - DNA, 130 bp, Synthetic construct
  source 1..130: mol_type = other DNA
cacatgattacgccaagctttgttgatacaaccatatattgatatctcgtctaaacttcagtaagtttacgactcacaaccataagttgatattttctcttcatggtctaggatcccatgacatatcagg

SEQ ID NO: 1073 - DNA, 130 bp, Synthetic construct
  source 1..130: mol_type = other DNA
cacatgattacgccaagctttgttgatacaaccataaagtgatatttagtctaaacttcagtaagtttacgactcacaaccataagttgatattttctcttcatggtctaggatcccatgacatatcagg

SEQ ID NO: 1074 - DNA, 130 bp, Synthetic construct
  source 1..130: mol_type = other DNA
cacatgattacgccaagctttgttgatacaaccataaaatgataattacaaccataagttgatatttttcacaaccataagttgatattttctcttcatggtctaaacttggatcccatgacatatcagg

SEQ ID NO: 1075 - DNA, 130 bp, Synthetic construct
  source 1..130: mol_type = other DNA
cacatgattacgccaagctttgttgatacacccataaattgataattacaaccataagttgatatttttcacaaccataagttgatattttctcttcatggtctaaacttggatcccatgacatatcagg

SEQ ID NO: 1076 - DNA, 130 bp, Synthetic construct
  source 1..130: mol_type = other DNA
cacatgattacgccaagctttgttgatacacccataaattgatattgccaaccataagttgatatttttcacaaccataagttgatattttctcttcatggtctaaacttggatcccatgacatatcagg

SEQ ID NO: 1077 - DNA, 130 bp, Synthetic construct
  source 1..130: mol_type = other DNA
cacatgattacgccaagctttgttgatagtctaaacttcagtaagtttacgaccaaccataagttgatatttttcacaaccataagttgatattttctcttcatggtctaggatcccatgacatatcagg

SEQ ID NO: 1078 - DNA, 130 bp, Synthetic construct
  source 1..130: mol_type = other DNA
cacatgattacgccaagctttgttgatacaaccataagttgatattttcaaccataagttgatatttttcacaaccataagttgatattttctcttcatggtctaaacttggatcccatgacatatcagg

SEQ ID NO: 1079 - DNA, 130 bp, Synthetic construct
  source 1..130: mol_type = other DNA
cacatgattacgccaagctttgttgatacaaccatatattgatatctccaaccataagttgatatttttcacaaccataagttgatattttctcttcatggtctaaacttggatcccatgacatatcagg

SEQ ID NO: 1080 - DNA, 130 bp, Synthetic construct
  source 1..130: mol_type = other DNA
cacatgattacgccaagctttgttgatacaaccataaagtgatatttacaaccataagttgatatttttcacaaccataagttgatattttctcttcatggtctaaacttggatcccatgacatatcagg

SEQ ID NO: 1081 - DNA, 130 bp, Synthetic construct
  source 1..130: mol_type = other DNA
cacatgattacgccaagctttgttgatacaaccataaaatgataattacaaccatatattgatatctctcacaaccataagttgatattttctcttcatggtctaaacttggatcccatgacatatcagg

SEQ ID NO: 1082 - DNA, 130 bp, Synthetic construct
  source 1..130: mol_type = other DNA
cacatgattacgccaagctttgttgatacacccataaattgataattacaaccatatattgatatctctcacaaccataagttgatattttctcttcatggtctaaacttggatcccatgacatatcagg

SEQ ID NO: 1083 - DNA, 130 bp, Synthetic construct
  source 1..130: mol_type = other DNA
cacatgattacgccaagctttgttgatacacccataaattgatattgccaaccatatattgatatctctcacaaccataagttgatattttctcttcatggtctaaacttggatcccatgacatatcagg

SEQ ID NO: 1084 - DNA, 130 bp, Synthetic construct
  source 1..130: mol_type = other DNA
cacatgattacgccaagctttgttgatagtctaaacttcagtaagtttacgaccaaccatatattgatatctctcacaaccataagttgatattttctcttcatggtctaggatcccatgacatatcagg

SEQ ID NO: 1085 - DNA, 130 bp, Synthetic construct
  source 1..130: mol_type = other DNA
cacatgattacgccaagctttgttgatacaaccataagttgatattttcaaccatatattgatatctctcacaaccataagttgatattttctcttcatggtctaaacttggatcccatgacatatcagg

SEQ ID NO: 1086 - DNA, 130 bp, Synthetic construct
  source 1..130: mol_type = other DNA
cacatgattacgccaagctttgttgatacaaccatatattgatatctccaaccatatattgatatctctcacaaccataagttgatattttctcttcatggtctaaacttggatcccatgacatatcagg

SEQ ID NO: 1087 - DNA, 130 bp, Synthetic construct
  source 1..130: mol_type = other DNA
cacatgattacgccaagctttgttgatacaaccataaagtgatatttacaaccatatattgatatctctcacaaccataagttgatattttctcttcatggtctaaacttggatcccatgacatatcagg

SEQ ID NO: 1088 - DNA, 130 bp, Synthetic construct
  source 1..130: mol_type = other DNA
cacatgattacgccaagctttgttgatacaaccataaaatgataattacaaccataaagtgatatttatcacaaccataagttgatattttctcttcatggtctaaacttggatcccatgacatatcagg

SEQ ID NO: 1089 - DNA, 130 bp, Synthetic construct
  source 1..130: mol_type = other DNA
cacatgattacgccaagctttgttgatacacccataaattgataattacaaccataaagtgatatttatcacaaccataagttgatattttctcttcatggtctaaacttggatcccatgacatatcagg

SEQ ID NO: 1090 - DNA, 130 bp, Synthetic construct
  source 1..130: mol_type = other DNA
cacatgattacgccaagctttgttgatacacccataaattgatattgccaaccataaagtgatatttatcacaaccataagttgatattttctcttcatggtctaaacttggatcccatgacatatcagg

SEQ ID NO: 1091 - DNA, 130 bp, Synthetic construct
  source 1..130: mol_type = other DNA
cacatgattacgccaagctttgttgatagtctaaacttcagtaagtttacgaccaaccataaagtgatatttatcacaaccataagttgatattttctcttcatggtctaggatcccatgacatatcagg

SEQ ID NO: 1092 - DNA, 130 bp, Synthetic construct
  source 1..130: mol_type = other DNA
cacatgattacgccaagctttgttgatacaaccataagttgatattttcaaccataaagtgatatttatcacaaccataagttgatattttctcttcatggtctaaacttggatcccatgacatatcagg

SEQ ID NO: 1093 - DNA, 130 bp, Synthetic construct
  source 1..130: mol_type = other DNA
cacatgattacgccaagctttgttgatacaaccatatattgatatctccaaccataaagtgatatttatcacaaccataagttgatattttctcttcatggtctaaacttggatcccatgacatatcagg

SEQ ID NO: 1094 - DNA, 130 bp, Synthetic construct
  source 1..130: mol_type = other DNA
cacatgattacgccaagctttgttgatacaaccataaagtgatatttacaaccataaagtgatatttatcacaaccataagttgatattttctcttcatggtctaaacttggatcccatgacatatcagg

SEQ ID NO: 1095 - DNA, 130 bp, Synthetic construct
  source 1..130: mol_type = other DNA
cacatgattacgccaagctttgttgatacaaccataaaatgataattacaaccataaaatgataattatcacaaccataagttgatattttctcttcatggtctaaacttggatcccatgacatatcagg

SEQ ID NO: 1096 - DNA, 130 bp, Synthetic construct
  source 1..130: mol_type = other DNA
cacatgattacgccaagctttgttgatacacccataaattgataattacaaccataaaatgataattatcacaaccataagttgatattttctcttcatggtctaaacttggatcccatgacatatcagg

SEQ ID NO: 1097 - DNA, 130 bp, Synthetic construct
  source 1..130: mol_type = other DNA
cacatgattacgccaagctttgttgatacacccataaattgatattgccaaccataaaatgataattatcacaaccataagttgatattttctcttcatggtctaaacttggatcccatgacatatcagg

SEQ ID NO: 1098 - DNA, 130 bp, Synthetic construct
  source 1..130: mol_type = other DNA
cacatgattacgccaagctttgttgatagtctaaacttcagtaagtttacgaccaaccataaaatgataattatcacaaccataagttgatattttctcttcatggtctaggatcccatgacatatcagg

SEQ ID NO: 1099 - DNA, 130 bp, Synthetic construct
  source 1..130: mol_type = other DNA
cacatgattacgccaagctttgttgatacaaccataagttgatattttcaaccataaaatgataattatcacaaccataagttgatattttctcttcatggtctaaacttggatcccatgacatatcagg

SEQ ID NO: 1100 - DNA, 130 bp, Synthetic construct
  source 1..130: mol_type = other DNA
cacatgattacgccaagctttgttgatacaaccatatattgatatctccaaccataaaatgataattatcacaaccataagttgatattttctcttcatggtctaaacttggatcccatgacatatcagg

SEQ ID NO: 1101 - DNA, 130 bp, Synthetic construct
  source 1..130: mol_type = other DNA
cacatgattacgccaagctttgttgatacaaccataaagtgatatttacaaccataaaatgataattatcacaaccataagttgatattttctcttcatggtctaaacttggatcccatgacatatcagg

SEQ ID NO: 1102 - DNA, 130 bp, Synthetic construct
  source 1..130: mol_type = other DNA
cacatgattacgccaagctttgttgatacaaccataaaatgataattacacccataaattgataattatcacaaccatatattgatatctcctcttcatggtctaaacttggatcccatgacatatcagg

SEQ ID NO: 1103 - DNA, 130 bp, Synthetic construct
  source 1..130: mol_type = other DNA
cacatgattacgccaagctttgttgatacacccataaattgataattacacccataaattgataattatcacaaccatatattgatatctcctcttcatggtctaaacttggatcccatgacatatcagg

SEQ ID NO: 1104 - DNA, 130 bp, Synthetic construct
  source 1..130: mol_type = other DNA
cacatgattacgccaagctttgttgatacacccataaattgatattgccacccataaattgataattatcacaaccatatattgatatctcctcttcatggtctaaacttggatcccatgacatatcagg

SEQ ID NO: 1105 - DNA, 130 bp, Synthetic construct
  source 1..130: mol_type = other DNA
cacatgattacgccaagctttgttgatagtctaaacttcagtaagtttacgaccacccataaattgataattatcacaaccatatattgatatctcctcttcatggtctaggatcccatgacatatcagg

SEQ ID NO: 1106 - DNA, 130 bp, Synthetic construct
  source 1..130: mol_type = other DNA
cacatgattacgccaagctttgttgatacaaccataagttgatattttcacccataaattgataattatcacaaccatatattgatatctcctcttcatggtctaaacttggatcccatgacatatcagg

SEQ ID NO: 1107 - DNA, 130 bp, Synthetic construct
  source 1..130: mol_type = other DNA
cacatgattacgccaagctttgttgatacaaccatatattgatatctccacccataaattgataattatcacaaccatatattgatatctcctcttcatggtctaaacttggatcccatgacatatcagg

SEQ ID NO: 1108 - DNA, 130 bp, Synthetic construct
  source 1..130: mol_type = other DNA
cacatgattacgccaagctttgttgatacaaccataaagtgatatttacacccataaattgataattatcacaaccatatattgatatctcctcttcatggtctaaacttggatcccatgacatatcagg

SEQ ID NO: 1109 - DNA, 130 bp, Synthetic construct
  source 1..130: mol_type = other DNA
cacatgattacgccaagctttgttgatacaaccataaaatgataattacacccataaattgatattgctcacaaccatatattgatatctcctcttcatggtctaaacttggatcccatgacatatcagg

SEQ ID NO: 1110 - DNA, 130 bp, Synthetic construct
  source 1..130: mol_type = other DNA
cacatgattacgccaagctttgttgatacacccataaattgataattacacccataaattgatattgctcacaaccatatattgatatctcctcttcatggtctaaacttggatcccatgacatatcagg

SEQ ID NO: 1111 - DNA, 130 bp, Synthetic construct
  source 1..130: mol_type = other DNA
cacatgattacgccaagctttgttgatacacccataaattgatattgccacccataaattgatattgctcacaaccatatattgatatctcctcttcatggtctaaacttggatcccatgacatatcagg

SEQ ID NO: 1112 - DNA, 130 bp, Synthetic construct
  source 1..130: mol_type = other DNA
cacatgattacgccaagctttgttgatagtctaaacttcagtaagtttacgaccacccataaattgatattgctcacaaccatatattgatatctcctcttcatggtctaggatcccatgacatatcagg

SEQ ID NO: 1113 - DNA, 130 bp, Synthetic construct
  source 1..130: mol_type = other DNA
cacatgattacgccaagctttgttgatacaaccataagttgatattttcacccataaattgatattgctcacaaccatatattgatatctcctcttcatggtctaaacttggatcccatgacatatcagg

SEQ ID NO: 1114 - DNA, 130 bp, Synthetic construct
  source 1..130: mol_type = other DNA
cacatgattacgccaagctttgttgatacaaccatatattgatatctccacccataaattgatattgctcacaaccatatattgatatctcctcttcatggtctaaacttggatcccatgacatatcagg

SEQ ID NO: 1115 - DNA, 130 bp, Synthetic construct
  source 1..130: mol_type = other DNA
cacatgattacgccaagctttgttgatacaaccataaagtgatatttacacccataaattgatattgctcacaaccatatattgatatctcctcttcatggtctaaacttggatcccatgacatatcagg

SEQ ID NO: 1116 - DNA, 130 bp, Synthetic construct
  source 1..130: mol_type = other DNA
cacatgattacgccaagctttgttgatacaaccataaaatgataattagtctaaacttcagtaagtttacgactcacaaccatatattgatatctcctcttcatggtctaggatcccatgacatatcagg

SEQ ID NO: 1117 - DNA, 130 bp, Synthetic construct
  source 1..130: mol_type = other DNA
cacatgattacgccaagctttgttgatacacccataaattgataattagtctaaacttcagtaagtttacgactcacaaccatatattgatatctcctcttcatggtctaggatcccatgacatatcagg

SEQ ID NO: 1118 - DNA, 130 bp, Synthetic construct
  source 1..130: mol_type = other DNA
cacatgattacgccaagctttgttgatacacccataaattgatattgcgtctaaacttcagtaagtttacgactcacaaccatatattgatatctcctcttcatggtctaggatcccatgacatatcagg

SEQ ID NO: 1119 - DNA, 130 bp, Synthetic construct
  source 1..130: mol_type = other DNA
cacatgattacgccaagctttgttgatagtctaaacttcagtaagtttacgacgtctaaacttcagtaagtttacgactcacaaccatatattgatatctcctcttcatgggatcccatgacatatcagg

SEQ ID NO: 1120 - DNA, 130 bp, Synthetic construct
  source 1..130: mol_type = other DNA
cacatgattacgccaagctttgttgatacaaccataagttgatattttgtctaaacttcagtaagtttacgactcacaaccatatattgatatctcctcttcatggtctaggatcccatgacatatcagg

SEQ ID NO: 1121 - DNA, 130 bp, Synthetic construct
  source 1..130: mol_type = other DNA
cacatgattacgccaagctttgttgatacaaccatatattgatatctcgtctaaacttcagtaagtttacgactcacaaccatatattgatatctcctcttcatggtctaggatcccatgacatatcagg

SEQ ID NO: 1122 - DNA, 130 bp, Synthetic construct
  source 1..130: mol_type = other DNA
cacatgattacgccaagctttgttgatacaaccataaagtgatatttagtctaaacttcagtaagtttacgactcacaaccatatattgatatctcctcttcatggtctaggatcccatgacatatcagg

SEQ ID NO: 1123 - DNA, 130 bp, Synthetic construct
  source 1..130: mol_type = other DNA
cacatgattacgccaagctttgttgatacaaccataaaatgataattacaaccataagttgatatttttcacaaccatatattgatatctcctcttcatggtctaaacttggatcccatgacatatcagg

SEQ ID NO: 1124 - DNA, 130 bp, Synthetic construct
  source 1..130: mol_type = other DNA
cacatgattacgccaagctttgttgatacacccataaattgataattacaaccataagttgatatttttcacaaccatatattgatatctcctcttcatggtctaaacttggatcccatgacatatcagg

SEQ ID NO: 1125 - DNA, 130 bp, Synthetic construct
  source 1..130: mol_type = other DNA
cacatgattacgccaagctttgttgatacacccataaattgatattgccaaccataagttgatatttttcacaaccatatattgatatctcctcttcatggtctaaacttggatcccatgacatatcagg

SEQ ID NO: 1126 - DNA, 130 bp, Synthetic construct
  source 1..130: mol_type = other DNA
cacatgattacgccaagctttgttgatagtctaaacttcagtaagtttacgaccaaccataagttgatatttttcacaaccatatattgatatctcctcttcatggtctaggatcccatgacatatcagg

SEQ ID NO: 1127 - DNA, 130 bp, Synthetic construct
  source 1..130: mol_type = other DNA
cacatgattacgccaagctttgttgatacaaccataagttgatattttcaaccataagttgatatttttcacaaccatatattgatatctcctcttcatggtctaaacttggatcccatgacatatcagg

SEQ ID NO: 1128 - DNA, 130 bp, Synthetic construct
  source 1..130: mol_type = other DNA
cacatgattacgccaagctttgttgatacaaccatatattgatatctccaaccataagttgatatttttcacaaccatatattgatatctcctcttcatggtctaaacttggatcccatgacatatcagg

SEQ ID NO: 1129 - DNA, 130 bp, Synthetic construct
  source 1..130: mol_type = other DNA
cacatgattacgccaagctttgttgatacaaccataaagtgatatttacaaccataagttgatatttttcacaaccatatattgatatctcctcttcatggtctaaacttggatcccatgacatatcagg

SEQ ID NO: 1130 - DNA, 130 bp, Synthetic construct
  source 1..130: mol_type = other DNA
cacatgattacgccaagctttgttgatacaaccataaaatgataattacaaccatatattgatatctctcacaaccatatattgatatctcctcttcatggtctaaacttggatcccatgacatatcagg

SEQ ID NO: 1131 - DNA, 130 bp, Synthetic construct
  source 1..130: mol_type = other DNA
cacatgattacgccaagctttgttgatacacccataaattgataattacaaccatatattgatatctctcacaaccatatattgatatctcctcttcatggtctaaacttggatcccatgacatatcagg

SEQ ID NO: 1132 - DNA, 130 bp, Synthetic construct
  source 1..130: mol_type = other DNA
cacatgattacgccaagctttgttgatacacccataaattgatattgccaaccatatattgatatctctcacaaccatatattgatatctcctcttcatggtctaaacttggatcccatgacatatcagg

SEQ ID NO: 1133 - DNA, 130 bp, Synthetic construct
  source 1..130: mol_type = other DNA
cacatgattacgccaagctttgttgatagtctaaacttcagtaagtttacgaccaaccatatattgatatctctcacaaccatatattgatatctcctcttcatggtctaggatcccatgacatatcagg

SEQ ID NO: 1134 - DNA, 130 bp, Synthetic construct
  source 1..130: mol_type = other DNA
cacatgattacgccaagctttgttgatacaaccataagttgatattttcaaccatatattgatatctctcacaaccatatattgatatctcctcttcatggtctaaacttggatcccatgacatatcagg

SEQ ID NO: 1135 - DNA, 130 bp, Synthetic construct
  source 1..130: mol_type = other DNA
cacatgattacgccaagctttgttgatacaaccatatattgatatctccaaccatatattgatatctctcacaaccatatattgatatctcctcttcatggtctaaacttggatcccatgacatatcagg

SEQ ID NO: 1136 - DNA, 130 bp, Synthetic construct
  source 1..130: mol_type = other DNA
cacatgattacgccaagctttgttgatacaaccataaagtgatatttacaaccatatattgatatctctcacaaccatatattgatatctcctcttcatggtctaaacttggatcccatgacatatcagg

SEQ ID NO: 1137 - DNA, 130 bp, Synthetic construct
  source 1..130: mol_type = other DNA
cacatgattacgccaagctttgttgatacaaccataaaatgataattacaaccataaagtgatatttatcacaaccatatattgatatctcctcttcatggtctaaacttggatcccatgacatatcagg

SEQ ID NO: 1138 - DNA, 130 bp, Synthetic construct
  source 1..130: mol_type = other DNA
cacatgattacgccaagctttgttgatacacccataaattgataattacaaccataaagtgatatttatcacaaccatatattgatatctcctcttcatggtctaaacttggatcccatgacatatcagg

SEQ ID NO: 1139 - DNA, 130 bp, Synthetic construct
  source 1..130: mol_type = other DNA
cacatgattacgccaagctttgttgatacacccataaattgatattgccaaccataaagtgatatttatcacaaccatatattgatatctcctcttcatggtctaaacttggatcccatgacatatcagg

SEQ ID NO: 1140 - DNA, 130 bp, Synthetic construct
  source 1..130: mol_type = other DNA
cacatgattacgccaagctttgttgatagtctaaacttcagtaagtttacgaccaaccataaagtgatatttatcacaaccatatattgatatctcctcttcatggtctaggatcccatgacatatcagg

SEQ ID NO: 1141 - DNA, 130 bp, Synthetic construct
  source 1..130: mol_type = other DNA
cacatgattacgccaagctttgttgatacaaccataagttgatattttcaaccataaagtgatatttatcacaaccatatattgatatctcctcttcatggtctaaacttggatcccatgacatatcagg

SEQ ID NO: 1142 - DNA, 130 bp, Synthetic construct
  source 1..130: mol_type = other DNA
cacatgattacgccaagctttgttgatacaaccatatattgatatctccaaccataaagtgatatttatcacaaccatatattgatatctcctcttcatggtctaaacttggatcccatgacatatcagg

SEQ ID NO: 1143 - DNA, 130 bp, Synthetic construct
  source 1..130: mol_type = other DNA
cacatgattacgccaagctttgttgatacaaccataaagtgatatttacaaccataaagtgatatttatcacaaccatatattgatatctcctcttcatggtctaaacttggatcccatgacatatcagg

SEQ ID NO: 1144 - DNA, 130 bp, Synthetic construct
  source 1..130: mol_type = other DNA
cacatgattacgccaagctttgttgatacaaccataaaatgataattacaaccataaaatgataattatcacaaccatatattgatatctcctcttcatggtctaaacttggatcccatgacatatcagg

SEQ ID NO: 1145 - DNA, 130 bp, Synthetic construct
  source 1..130: mol_type = other DNA
cacatgattacgccaagctttgttgatacacccataaattgataattacaaccataaaatgataattatcacaaccatatattgatatctcctcttcatggtctaaacttggatcccatgacatatcagg

SEQ ID NO: 1146 - DNA, 130 bp, Synthetic construct
  source 1..130: mol_type = other DNA
cacatgattacgccaagctttgttgatacacccataaattgatattgccaaccataaaatgataattatcacaaccatatattgatatctcctcttcatggtctaaacttggatcccatgacatatcagg

SEQ ID NO: 1147 - DNA, 130 bp, Synthetic construct
  source 1..130: mol_type = other DNA
cacatgattacgccaagctttgttgatagtctaaacttcagtaagtttacgaccaaccataaaatgataattatcacaaccatatattgatatctcctcttcatggtctaggatcccatgacatatcagg

SEQ ID NO: 1148 - DNA, 130 bp, Synthetic construct
  source 1..130: mol_type = other DNA
cacatgattacgccaagctttgttgatacaaccataagttgatattttcaaccataaaatgataattatcacaaccatatattgatatctcctcttcatggtctaaacttggatcccatgacatatcagg

SEQ ID NO: 1149 - DNA, 130 bp, Synthetic construct
  source 1..130: mol_type = other DNA
cacatgattacgccaagctttgttgatacaaccatatattgatatctccaaccataaaatgataattatcacaaccatatattgatatctcctcttcatggtctaaacttggatcccatgacatatcagg

SEQ ID NO: 1150 - DNA, 130 bp, Synthetic construct
  source 1..130: mol_type = other DNA
cacatgattacgccaagctttgttgatacaaccataaagtgatatttacaaccataaaatgataattatcacaaccatatattgatatctcctcttcatggtctaaacttggatcccatgacatatcagg

SEQ ID NO: 1151 - DNA, 130 bp, Synthetic construct
  source 1..130: mol_type = other DNA
cacatgattacgccaagctttgttgatacaaccataaaatgataattacacccataaattgataattatcacaaccataaagtgatatttactcttcatggtctaaacttggatcccatgacatatcagg

SEQ ID NO: 1152 - DNA, 130 bp, Synthetic construct
  source 1..130: mol_type = other DNA
cacatgattacgccaagctttgttgatacacccataaattgataattacacccataaattgataattatcacaaccataaagtgatatttactcttcatggtctaaacttggatcccatgacatatcagg

SEQ ID NO: 1153 - DNA, 130 bp, Synthetic construct
  source 1..130: mol_type = other DNA
cacatgattacgccaagctttgttgatacacccataaattgatattgccacccataaattgataattatcacaaccataaagtgatatttactcttcatggtctaaacttggatcccatgacatatcagg

SEQ ID NO: 1154 - DNA, 130 bp, Synthetic construct
  source 1..130: mol_type = other DNA
cacatgattacgccaagctttgttgatagtctaaacttcagtaagtttacgaccacccataaattgataattatcacaaccataaagtgatatttactcttcatggtctaggatcccatgacatatcagg

SEQ ID NO: 1155 - DNA, 130 bp, Synthetic construct
  source 1..130: mol_type = other DNA
cacatgattacgccaagctttgttgatacaaccataagttgatattttcacccataaattgataattatcacaaccataaagtgatatttactcttcatggtctaaacttggatcccatgacatatcagg

SEQ ID NO: 1156 - DNA, 130 bp, Synthetic construct
  source 1..130: mol_type = other DNA
cacatgattacgccaagctttgttgatacaaccatatattgatatctccacccataaattgataattatcacaaccataaagtgatatttactcttcatggtctaaacttggatcccatgacatatcagg

SEQ ID NO: 1157 - DNA, 130 bp, Synthetic construct
  source 1..130: mol_type = other DNA
cacatgattacgccaagctttgttgatacaaccataaagtgatatttacacccataaattgataattatcacaaccataaagtgatatttactcttcatggtctaaacttggatcccatgacatatcagg

SEQ ID NO: 1158 - DNA, 130 bp, Synthetic construct
  source 1..130: mol_type = other DNA
cacatgattacgccaagctttgttgatacaaccataaaatgataattacacccataaattgatattgctcacaaccataaagtgatatttactcttcatggtctaaacttggatcccatgacatatcagg

SEQ ID NO: 1159 - DNA, 130 bp, Synthetic construct
  source 1..130: mol_type = other DNA
cacatgattacgccaagctttgttgatacacccataaattgataattacacccataaattgatattgctcacaaccataaagtgatatttactcttcatggtctaaacttggatcccatgacatatcagg

SEQ ID NO: 1160 - DNA, 130 bp, Synthetic construct
  source 1..130: mol_type = other DNA
cacatgattacgccaagctttgttgatacacccataaattgatattgccacccataaattgatattgctcacaaccataaagtgatatttactcttcatggtctaaacttggatcccatgacatatcagg

SEQ ID NO: 1161 - DNA, 130 bp, Synthetic construct
  source 1..130: mol_type = other DNA
cacatgattacgccaagctttgttgatagtctaaacttcagtaagtttacgaccacccataaattgatattgctcacaaccataaagtgatatttactcttcatggtctaggatcccatgacatatcagg

SEQ ID NO: 1162 - DNA, 130 bp, Synthetic construct
  source 1..130: mol_type = other DNA
cacatgattacgccaagctttgttgatacaaccataagttgatattttcacccataaattgatattgctcacaaccataaagtgatatttactcttcatggtctaaacttggatcccatgacatatcagg

SEQ ID NO: 1163 - DNA, 130 bp, Synthetic construct
  source 1..130: mol_type = other DNA
cacatgattacgccaagctttgttgatacaaccatatattgatatctccacccataaattgatattgctcacaaccataaagtgatatttactcttcatggtctaaacttggatcccatgacatatcagg

SEQ ID NO: 1164 - DNA, 130 bp, Synthetic construct
  source 1..130: mol_type = other DNA
cacatgattacgccaagctttgttgatacaaccataaagtgatatttacacccataaattgatattgctcacaaccataaagtgatatttactcttcatggtctaaacttggatcccatgacatatcagg

SEQ ID NO: 1165 - DNA, 130 bp, Synthetic construct
  source 1..130: mol_type = other DNA
cacatgattacgccaagctttgttgatacaaccataaaatgataattagtctaaacttcagtaagtttacgactcacaaccataaagtgatatttactcttcatggtctaggatcccatgacatatcagg

SEQ ID NO: 1166 - DNA, 130 bp, Synthetic construct
  source 1..130: mol_type = other DNA
cacatgattacgccaagctttgttgatacacccataaattgataattagtctaaacttcagtaagtttacgactcacaaccataaagtgatatttactcttcatggtctaggatcccatgacatatcagg

SEQ ID NO: 1167 - DNA, 130 bp, Synthetic construct
  source 1..130: mol_type = other DNA
cacatgattacgccaagctttgttgatacacccataaattgatattgcgtctaaacttcagtaagtttacgactcacaaccataaagtgatatttactcttcatggtctaggatcccatgacatatcagg

SEQ ID NO: 1168 - DNA, 130 bp, Synthetic construct
  source 1..130: mol_type = other DNA
cacatgattacgccaagctttgttgatagtctaaacttcagtaagtttacgacgtctaaacttcagtaagtttacgactcacaaccataaagtgatatttactcttcatgggatcccatgacatatcagg

SEQ ID NO: 1169 - DNA, 130 bp, Synthetic construct
  source 1..130: mol_type = other DNA
cacatgattacgccaagctttgttgatacaaccataagttgatattttgtctaaacttcagtaagtttacgactcacaaccataaagtgatatttactcttcatggtctaggatcccatgacatatcagg

SEQ ID NO: 1170 - DNA, 130 bp, Synthetic construct
  source 1..130: mol_type = other DNA
cacatgattacgccaagctttgttgatacaaccatatattgatatctcgtctaaacttcagtaagtttacgactcacaaccataaagtgatatttactcttcatggtctaggatcccatgacatatcagg

SEQ ID NO: 1171 - DNA, 130 bp, Synthetic construct
  source 1..130: mol_type = other DNA
cacatgattacgccaagctttgttgatacaaccataaagtgatatttagtctaaacttcagtaagtttacgactcacaaccataaagtgatatttactcttcatggtctaggatcccatgacatatcagg

SEQ ID NO: 1172 - DNA, 130 bp, Synthetic construct
  source 1..130: mol_type = other DNA
cacatgattacgccaagctttgttgatacaaccataaaatgataattacaaccataagttgatatttttcacaaccataaagtgatatttactcttcatggtctaaacttggatcccatgacatatcagg

SEQ ID NO: 1173 - DNA, 130 bp, Synthetic construct
  source 1..130: mol_type = other DNA
cacatgattacgccaagctttgttgatacacccataaattgataattacaaccataagttgatatttttcacaaccataaagtgatatttactcttcatggtctaaacttggatcccatgacatatcagg

SEQ ID NO: 1174 - DNA, 130 bp, Synthetic construct
  source 1..130: mol_type = other DNA
cacatgattacgccaagctttgttgatacacccataaattgatattgccaaccataagttgatatttttcacaaccataaagtgatatttactcttcatggtctaaacttggatcccatgacatatcagg

SEQ ID NO: 1175 - DNA, 130 bp, Synthetic construct
  source 1..130: mol_type = other DNA
cacatgattacgccaagctttgttgatagtctaaacttcagtaagtttacgaccaaccataagttgatatttttcacaaccataaagtgatatttactcttcatggtctaggatcccatgacatatcagg

SEQ ID NO: 1176 - DNA, 130 bp, Synthetic construct
  source 1..130: mol_type = other DNA
cacatgattacgccaagctttgttgatacaaccataagttgatattttcaaccataagttgatatttttcacaaccataaagtgatatttactcttcatggtctaaacttggatcccatgacatatcagg

SEQ ID NO: 1177 - DNA, 130 bp, Synthetic construct
  source 1..130: mol_type = other DNA
cacatgattacgccaagctttgttgatacaaccatatattgatatctccaaccataagttgatatttttcacaaccataaagtgatatttactcttcatggtctaaacttggatcccatgacatatcagg

SEQ ID NO: 1178 - DNA, 130 bp, Synthetic construct
  source 1..130: mol_type = other DNA
cacatgattacgccaagctttgttgatacaaccataaagtgatatttacaaccataagttgatatttttcacaaccataaagtgatatttactcttcatggtctaaacttggatcccatgacatatcagg

SEQ ID NO: 1179 - DNA, 130 bp, Synthetic construct
  source 1..130: mol_type = other DNA
cacatgattacgccaagctttgttgatacaaccataaaatgataattacaaccatatattgatatctctcacaaccataaagtgatatttactcttcatggtctaaacttggatcccatgacatatcagg

SEQ ID NO: 1180 - DNA, 130 bp, Synthetic construct
  source 1..130: mol_type = other DNA
cacatgattacgccaagctttgttgatacacccataaattgataattacaaccatatattgatatctctcacaaccataaagtgatatttactcttcatggtctaaacttggatcccatgacatatcagg

SEQ ID NO: 1181 - DNA, 130 bp, Synthetic construct
  source 1..130: mol_type = other DNA
cacatgattacgccaagctttgttgatacacccataaattgatattgccaaccatatattgatatctctcacaaccataaagtgatatttactcttcatggtctaaacttggatcccatgacatatcagg

SEQ ID NO: 1182 - DNA, 130 bp, Synthetic construct
  source 1..130: mol_type = other DNA
cacatgattacgccaagctttgttgatagtctaaacttcagtaagtttacgaccaaccatatattgatatctctcacaaccataaagtgatatttactcttcatggtctaggatcccatgacatatcagg

SEQ ID NO: 1183 - DNA, 130 bp, Synthetic construct
  source 1..130: mol_type = other DNA
cacatgattacgccaagctttgttgatacaaccataagttgatattttcaaccatatattgatatctctcacaaccataaagtgatatttactcttcatggtctaaacttggatcccatgacatatcagg

SEQ ID NO: 1184 - DNA, 130 bp, Synthetic construct
  source 1..130: mol_type = other DNA
cacatgattacgccaagctttgttgatacaaccatatattgatatctccaaccatatattgatatctctcacaaccataaagtgatatttactcttcatggtctaaacttggatcccatgacatatcagg

SEQ ID NO: 1185 - DNA, 130 bp, Synthetic construct
  source 1..130: mol_type = other DNA
cacatgattacgccaagctttgttgatacaaccataaagtgatatttacaaccatatattgatatctctcacaaccataaagtgatatttactcttcatggtctaaacttggatcccatgacatatcagg

SEQ ID NO: 1186 - DNA, 130 bp, Synthetic construct
  source 1..130: mol_type = other DNA
cacatgattacgccaagctttgttgatacaaccataaaatgataattacaaccataaagtgatatttatcacaaccataaagtgatatttactcttcatggtctaaacttggatcccatgacatatcagg

SEQ ID NO: 1187 - DNA, 130 bp, Synthetic construct
  source 1..130: mol_type = other DNA
cacatgattacgccaagctttgttgatacacccataaattgataattacaaccataaagtgatatttatcacaaccataaagtgatatttactcttcatggtctaaacttggatcccatgacatatcagg

SEQ ID NO: 1188 - DNA, 130 bp, Synthetic construct
  source 1..130: mol_type = other DNA
cacatgattacgccaagctttgttgatacacccataaattgatattgccaaccataaagtgatatttatcacaaccataaagtgatatttactcttcatggtctaaacttggatcccatgacatatcagg

SEQ ID NO: 1189 - DNA, 130 bp, Synthetic construct
  source 1..130: mol_type = other DNA
cacatgattacgccaagctttgttgatagtctaaacttcagtaagtttacgaccaaccataaagtgatatttatcacaaccataaagtgatatttactcttcatggtctaggatcccatgacatatcagg

SEQ ID NO: 1190 - DNA, 130 bp, Synthetic construct
  source 1..130: mol_type = other DNA
cacatgattacgccaagctttgttgatacaaccataagttgatattttcaaccataaagtgatatttatcacaaccataaagtgatatttactcttcatggtctaaacttggatcccatgacatatcagg

SEQ ID NO: 1191 - DNA, 130 bp, Synthetic construct
  source 1..130: mol_type = other DNA
cacatgattacgccaagctttgttgatacaaccatatattgatatctccaaccataaagtgatatttatcacaaccataaagtgatatttactcttcatggtctaaacttggatcccatgacatatcagg

SEQ ID NO: 1192 - DNA, 130 bp, Synthetic construct
  source 1..130: mol_type = other DNA
cacatgattacgccaagctttgttgatacaaccataaagtgatatttacaaccataaagtgatatttatcacaaccataaagtgatatttactcttcatggtctaaacttggatcccatgacatatcagg

SEQ ID NO: 1193 - DNA, 130 bp, Synthetic construct
  source 1..130: mol_type = other DNA
cacatgattacgccaagctttgttgatacaaccataaaatgataattacaaccataaaatgataattatcacaaccataaagtgatatttactcttcatggtctaaacttggatcccatgacatatcagg

SEQ ID NO: 1194 - DNA, 130 bp, Synthetic construct
  source 1..130: mol_type = other DNA
cacatgattacgccaagctttgttgatacacccataaattgataattacaaccataaaatgataattatcacaaccataaagtgatatttactcttcatggtctaaacttggatcccatgacatatcagg

SEQ ID NO: 1195 - DNA, 130 bp, Synthetic construct
  source 1..130: mol_type = other DNA
cacatgattacgccaagctttgttgatacacccataaattgatattgccaaccataaaatgataattatcacaaccataaagtgatatttactcttcatggtctaaacttggatcccatgacatatcagg

SEQ ID NO: 1196 - DNA, 130 bp, Synthetic construct
  source 1..130: mol_type = other DNA
cacatgattacgccaagctttgttgatagtctaaacttcagtaagtttacgaccaaccataaaatgataattatcacaaccataaagtgatatttactcttcatggtctaggatcccatgacatatcagg

SEQ ID NO: 1197 - DNA, 130 bp, Synthetic construct
  source 1..130: mol_type = other DNA
cacatgattacgccaagctttgttgatacaaccataagttgatattttcaaccataaaatgataattatcacaaccataaagtgatatttactcttcatggtctaaacttggatcccatgacatatcagg

SEQ ID NO: 1198 - DNA, 130 bp, Synthetic construct
  source 1..130: mol_type = other DNA
cacatgattacgccaagctttgttgatacaaccatatattgatatctccaaccataaaatgataattatcacaaccataaagtgatatttactcttcatggtctaaacttggatcccatgacatatcagg

SEQ ID NO: 1199 - DNA, 130 bp, Synthetic construct
  source 1..130: mol_type = other DNA
cacatgattacgccaagctttgttgatacaaccataaagtgatatttacaaccataaaatgataattatcacaaccataaagtgatatttactcttcatggtctaaacttggatcccatgacatatcagg

SEQ ID NO: 1200 - DNA, 130 bp, Synthetic construct
  source 1..130: mol_type = other DNA
cacatgattacgccaagctttgttgatacaaccataaaatgataattacacccataaattgataattatcacaaccataaaatgataattactcttcatggtctaaacttggatcccatgacatatcagg

SEQ ID NO: 1201 - DNA, 130 bp, Synthetic construct
  source 1..130: mol_type = other DNA
cacatgattacgccaagctttgttgatacacccataaattgataattacacccataaattgataattatcacaaccataaaatgataattactcttcatggtctaaacttggatcccatgacatatcagg

SEQ ID NO: 1202 - DNA, 130 bp, Synthetic construct
  source 1..130: mol_type = other DNA
cacatgattacgccaagctttgttgatacacccataaattgatattgccacccataaattgataattatcacaaccataaaatgataattactcttcatggtctaaacttggatcccatgacatatcagg

SEQ ID NO: 1203 - DNA, 130 bp, Synthetic construct
  source 1..130: mol_type = other DNA
cacatgattacgccaagctttgttgatagtctaaacttcagtaagtttacgaccacccataaattgataattatcacaaccataaaatgataattactcttcatggtctaggatcccatgacatatcagg

SEQ ID NO: 1204 - DNA, 130 bp, Synthetic construct
  source 1..130: mol_type = other DNA
cacatgattacgccaagctttgttgatacaaccataagttgatattttcacccataaattgataattatcacaaccataaaatgataattactcttcatggtctaaacttggatcccatgacatatcagg

SEQ ID NO: 1205 - DNA, 130 bp, Synthetic construct
  source 1..130: mol_type = other DNA
cacatgattacgccaagctttgttgatacaaccatatattgatatctccacccataaattgataattatcacaaccataaaatgataattactcttcatggtctaaacttggatcccatgacatatcagg

SEQ ID NO: 1206 - DNA, 130 bp, Synthetic construct
  source 1..130: mol_type = other DNA
cacatgattacgccaagctttgttgatacaaccataaagtgatatttacacccataaattgataattatcacaaccataaaatgataattactcttcatggtctaaacttggatcccatgacatatcagg

SEQ ID NO: 1207 - DNA, 130 bp, Synthetic construct
  source 1..130: mol_type = other DNA
cacatgattacgccaagctttgttgatacaaccataaaatgataattacacccataaattgatattgctcacaaccataaaatgataattactcttcatggtctaaacttggatcccatgacatatcagg

SEQ ID NO: 1208 - DNA, 130 bp, Synthetic construct
  source 1..130: mol_type = other DNA
cacatgattacgccaagctttgttgatacacccataaattgataattacacccataaattgatattgctcacaaccataaaatgataattactcttcatggtctaaacttggatcccatgacatatcagg

SEQ ID NO: 1209 - DNA, 130 bp, Synthetic construct
  source 1..130: mol_type = other DNA
cacatgattacgccaagctttgttgatacacccataaattgatattgccacccataaattgatattgctcacaaccataaaatgataattactcttcatggtctaaacttggatcccatgacatatcagg

SEQ ID NO: 1210 - DNA, 130 bp, Synthetic construct
  source 1..130: mol_type = other DNA
cacatgattacgccaagctttgttgatagtctaaacttcagtaagtttacgaccacccataaattgatattgctcacaaccataaaatgataattactcttcatggtctaggatcccatgacatatcagg

SEQ ID NO: 1211 - DNA, 130 bp, Synthetic construct
  source 1..130: mol_type = other DNA
cacatgattacgccaagctttgttgatacaaccataagttgatattttcacccataaattgatattgctcacaaccataaaatgataattactcttcatggtctaaacttggatcccatgacatatcagg

SEQ ID NO: 1212 - DNA, 130 bp, Synthetic construct
  source 1..130: mol_type = other DNA
cacatgattacgccaagctttgttgatacaaccatatattgatatctccacccataaattgatattgctcacaaccataaaatgataattactcttcatggtctaaacttggatcccatgacatatcagg

SEQ ID NO: 1213 - DNA, 130 bp, Synthetic construct
  source 1..130: mol_type = other DNA
cacatgattacgccaagctttgttgatacaaccataaagtgatatttacacccataaattgatattgctcacaaccataaaatgataattactcttcatggtctaaacttggatcccatgacatatcagg

SEQ ID NO: 1214 - DNA, 130 bp, Synthetic construct
  source 1..130: mol_type = other DNA
cacatgattacgccaagctttgttgatacaaccataaaatgataattagtctaaacttcagtaagtttacgactcacaaccataaaatgataattactcttcatggtctaggatcccatgacatatcagg

SEQ ID NO: 1215 - DNA, 130 bp, Synthetic construct
  source 1..130: mol_type = other DNA
cacatgattacgccaagctttgttgatacacccataaattgataattagtctaaacttcagtaagtttacgactcacaaccataaaatgataattactcttcatggtctaggatcccatgacatatcagg

SEQ ID NO: 1216 - DNA, 130 bp, Synthetic construct
  source 1..130: mol_type = other DNA
cacatgattacgccaagctttgttgatacacccataaattgatattgcgtctaaacttcagtaagtttacgactcacaaccataaaatgataattactcttcatggtctaggatcccatgacatatcagg

SEQ ID NO: 1217 - DNA, 130 bp, Synthetic construct
  source 1..130: mol_type = other DNA
cacatgattacgccaagctttgttgatagtctaaacttcagtaagtttacgacgtctaaacttcagtaagtttacgactcacaaccataaaatgataattactcttcatgggatcccatgacatatcagg

SEQ ID NO: 1218 - DNA, 130 bp, Synthetic construct
  source 1..130: mol_type = other DNA
cacatgattacgccaagctttgttgatacaaccataagttgatattttgtctaaacttcagtaagtttacgactcacaaccataaaatgataattactcttcatggtctaggatcccatgacatatcagg

SEQ ID NO: 1219 - DNA, 130 bp, Synthetic construct
  source 1..130: mol_type = other DNA
cacatgattacgccaagctttgttgatacaaccatatattgatatctcgtctaaacttcagtaagtttacgactcacaaccataaaatgataattactcttcatggtctaggatcccatgacatatcagg

SEQ ID NO: 1220 - DNA, 130 bp, Synthetic construct
  source 1..130: mol_type = other DNA
cacatgattacgccaagctttgttgatacaaccataaagtgatatttagtctaaacttcagtaagtttacgactcacaaccataaaatgataattactcttcatggtctaggatcccatgacatatcagg

SEQ ID NO: 1221 - DNA, 130 bp, Synthetic construct
  source 1..130: mol_type = other DNA
cacatgattacgccaagctttgttgatacaaccataaaatgataattacaaccataagttgatatttttcacaaccataaaatgataattactcttcatggtctaaacttggatcccatgacatatcagg

SEQ ID NO: 1222 - DNA, 130 bp, Synthetic construct
  source 1..130: mol_type = other DNA
cacatgattacgccaagctttgttgatacacccataaattgataattacaaccataagttgatatttttcacaaccataaaatgataattactcttcatggtctaaacttggatcccatgacatatcagg

SEQ ID NO: 1223 - DNA, 130 bp, Synthetic construct
  source 1..130: mol_type = other DNA
cacatgattacgccaagctttgttgatacacccataaattgatattgccaaccataagttgatatttttcacaaccataaaatgataattactcttcatggtctaaacttggatcccatgacatatcagg

SEQ ID NO: 1224 - DNA, 130 bp, Synthetic construct
  source 1..130: mol_type = other DNA
cacatgattacgccaagctttgttgatagtctaaacttcagtaagtttacgaccaaccataagttgatatttttcacaaccataaaatgataattactcttcatggtctaggatcccatgacatatcagg

SEQ ID NO: 1225 - DNA, 130 bp, Synthetic construct
  source 1..130: mol_type = other DNA
cacatgattacgccaagctttgttgatacaaccataagttgatattttcaaccataagttgatatttttcacaaccataaaatgataattactcttcatggtctaaacttggatcccatgacatatcagg

SEQ ID NO: 1226 - DNA, 130 bp, Synthetic construct
  source 1..130: mol_type = other DNA
cacatgattacgccaagctttgttgatacaaccatatattgatatctccaaccataagttgatatttttcacaaccataaaatgataattactcttcatggtctaaacttggatcccatgacatatcagg

SEQ ID NO: 1227 - DNA, 130 bp, Synthetic construct
  source 1..130: mol_type = other DNA
cacatgattacgccaagctttgttgatacaaccataaagtgatatttacaaccataagttgatatttttcacaaccataaaatgataattactcttcatggtctaaacttggatcccatgacatatcagg

SEQ ID NO: 1228 - DNA, 130 bp, Synthetic construct
  source 1..130: mol_type = other DNA
cacatgattacgccaagctttgttgatacaaccataaaatgataattacaaccatatattgatatctctcacaaccataaaatgataattactcttcatggtctaaacttggatcccatgacatatcagg

SEQ ID NO: 1229 - DNA, 130 bp, Synthetic construct
  source 1..130: mol_type = other DNA
cacatgattacgccaagctttgttgatacacccataaattgataattacaaccatatattgatatctctcacaaccataaaatgataattactcttcatggtctaaacttggatcccatgacatatcagg

SEQ ID NO: 1230 - DNA, 130 bp, Synthetic construct
  source 1..130: mol_type = other DNA
cacatgattacgccaagctttgttgatacacccataaattgatattgccaaccatatattgatatctctcacaaccataaaatgataattactcttcatggtctaaacttggatcccatgacatatcagg

SEQ ID NO: 1231 - DNA, 130 bp, Synthetic construct
  source 1..130: mol_type = other DNA
cacatgattacgccaagctttgttgatagtctaaacttcagtaagtttacgaccaaccatatattgatatctctcacaaccataaaatgataattactcttcatggtctaggatcccatgacatatcagg

SEQ ID NO: 1232 - DNA, 130 bp, Synthetic construct
  source 1..130: mol_type = other DNA
cacatgattacgccaagctttgttgatacaaccataagttgatattttcaaccatatattgatatctctcacaaccataaaatgataattactcttcatggtctaaacttggatcccatgacatatcagg

SEQ ID NO: 1233 - DNA, 130 bp, Synthetic construct
  source 1..130: mol_type = other DNA
cacatgattacgccaagctttgttgatacaaccatatattgatatctccaaccatatattgatatctctcacaaccataaaatgataattactcttcatggtctaaacttggatcccatgacatatcagg

SEQ ID NO: 1234 - DNA, 130 bp, Synthetic construct
  source 1..130: mol_type = other DNA
cacatgattacgccaagctttgttgatacaaccataaagtgatatttacaaccatatattgatatctctcacaaccataaaatgataattactcttcatggtctaaacttggatcccatgacatatcagg

SEQ ID NO: 1235 - DNA, 130 bp, Synthetic construct
  source 1..130: mol_type = other DNA
cacatgattacgccaagctttgttgatacaaccataaaatgataattacaaccataaagtgatatttatcacaaccataaaatgataattactcttcatggtctaaacttggatcccatgacatatcagg

SEQ ID NO: 1236 - DNA, 130 bp, Synthetic construct
  source 1..130: mol_type = other DNA
cacatgattacgccaagctttgttgatacacccataaattgataattacaaccataaagtgatatttatcacaaccataaaatgataattactcttcatggtctaaacttggatcccatgacatatcagg

SEQ ID NO: 1237 - DNA, 130 bp, Synthetic construct
  source 1..130: mol_type = other DNA
cacatgattacgccaagctttgttgatacacccataaattgatattgccaaccataaagtgatatttatcacaaccataaaatgataattactcttcatggtctaaacttggatcccatgacatatcagg

SEQ ID NO: 1238 - DNA, 130 bp, Synthetic construct
  source 1..130: mol_type = other DNA
cacatgattacgccaagctttgttgatagtctaaacttcagtaagtttacgaccaaccataaagtgatatttatcacaaccataaaatgataattactcttcatggtctaggatcccatgacatatcagg

SEQ ID NO: 1239 - DNA, 130 bp, Synthetic construct
  source 1..130: mol_type = other DNA
cacatgattacgccaagctttgttgatacaaccataagttgatattttcaaccataaagtgatatttatcacaaccataaaatgataattactcttcatggtctaaacttggatcccatgacatatcagg

SEQ ID NO: 1240 - DNA, 130 bp, Synthetic construct
  source 1..130: mol_type = other DNA
cacatgattacgccaagctttgttgatacaaccatatattgatatctccaaccataaagtgatatttatcacaaccataaaatgataattactcttcatggtctaaacttggatcccatgacatatcagg

SEQ ID NO: 1241 - DNA, 130 bp, Synthetic construct
  source 1..130: mol_type = other DNA
cacatgattacgccaagctttgttgatacaaccataaagtgatatttacaaccataaagtgatatttatcacaaccataaaatgataattactcttcatggtctaaacttggatcccatgacatatcagg

SEQ ID NO: 1242 - DNA, 130 bp, Synthetic construct
  source 1..130: mol_type = other DNA
cacatgattacgccaagctttgttgatacaaccataaaatgataattacaaccataaaatgataattatcacaaccataaaatgataattactcttcatggtctaaacttggatcccatgacatatcagg

SEQ ID NO: 1243 - DNA, 130 bp, Synthetic construct
  source 1..130: mol_type = other DNA
cacatgattacgccaagctttgttgatacacccataaattgataattacaaccataaaatgataattatcacaaccataaaatgataattactcttcatggtctaaacttggatcccatgacatatcagg

SEQ ID NO: 1244 - DNA, 130 bp, Synthetic construct
  source 1..130: mol_type = other DNA
cacatgattacgccaagctttgttgatacacccataaattgatattgccaaccataaaatgataattatcacaaccataaaatgataattactcttcatggtctaaacttggatcccatgacatatcagg

SEQ ID NO: 1245 - DNA, 130 bp, Synthetic construct
  source 1..130: mol_type = other DNA
cacatgattacgccaagctttgttgatagtctaaacttcagtaagtttacgaccaaccataaaatgataattatcacaaccataaaatgataattactcttcatggtctaggatcccatgacatatcagg

SEQ ID NO: 1246 - DNA, 130 bp, Synthetic construct
  source 1..130: mol_type = other DNA
cacatgattacgccaagctttgttgatacaaccataagttgatattttcaaccataaaatgataattatcacaaccataaaatgataattactcttcatggtctaaacttggatcccatgacatatcagg

SEQ ID NO: 1247 - DNA, 130 bp, Synthetic construct
  source 1..130: mol_type = other DNA
cacatgattacgccaagctttgttgatacaaccatatattgatatctccaaccataaaatgataattatcacaaccataaaatgataattactcttcatggtctaaacttggatcccatgacatatcagg

SEQ ID NO: 1248 - DNA, 130 bp, Synthetic construct
  source 1..130: mol_type = other DNA
cacatgattacgccaagctttgttgatacaaccataaagtgatatttacaaccataaaatgataattatcacaaccataaaatgataattactcttcatggtctaaacttggatcccatgacatatcagg

SEQ ID NO: 1249 - DNA, 130 bp, Synthetic construct
  source 1..130: mol_type = other DNA
cacatgattacgccaagctttgttgatacaaccataaaatgataattacacccataaattgataattatcacacccataaattgataattactcttcatggtctaaacttggatcccatgacatatcagg

SEQ ID NO: 1250 - DNA, 130 bp, Synthetic construct
  source 1..130: mol_type = other DNA
cacatgattacgccaagctttgttgatacacccataaattgataattacacccataaattgataattatcacacccataaattgataattactcttcatggtctaaacttggatcccatgacatatcagg

SEQ ID NO: 1251 - DNA, 130 bp, Synthetic construct
  source 1..130: mol_type = other DNA
cacatgattacgccaagctttgttgatacacccataaattgatattgccacccataaattgataattatcacacccataaattgataattactcttcatggtctaaacttggatcccatgacatatcagg

SEQ ID NO: 1252 - DNA, 130 bp, Synthetic construct
  source 1..130: mol_type = other DNA
cacatgattacgccaagctttgttgatagtctaaacttcagtaagtttacgaccacccataaattgataattatcacacccataaattgataattactcttcatggtctaggatcccatgacatatcagg

SEQ ID NO: 1253 - DNA, 130 bp, Synthetic construct
  source 1..130: mol_type = other DNA
cacatgattacgccaagctttgttgatacaaccataagttgatattttcacccataaattgataattatcacacccataaattgataattactcttcatggtctaaacttggatcccatgacatatcagg

SEQ ID NO: 1254 - DNA, 130 bp, Synthetic construct
  source 1..130: mol_type = other DNA
cacatgattacgccaagctttgttgatacaaccatatattgatatctccacccataaattgataattatcacacccataaattgataattactcttcatggtctaaacttggatcccatgacatatcagg

SEQ ID NO: 1255 - DNA, 130 bp, Synthetic construct
  source 1..130: mol_type = other DNA
cacatgattacgccaagctttgttgatacaaccataaagtgatatttacacccataaattgataattatcacacccataaattgataattactcttcatggtctaaacttggatcccatgacatatcagg

SEQ ID NO: 1256 - DNA, 130 bp, Synthetic construct
  source 1..130: mol_type = other DNA
cacatgattacgccaagctttgttgatacaaccataaaatgataattacacccataaattgatattgctcacacccataaattgataattactcttcatggtctaaacttggatcccatgacatatcagg

SEQ ID NO: 1257 - DNA, 130 bp, Synthetic construct
  source 1..130: mol_type = other DNA
cacatgattacgccaagctttgttgatacacccataaattgataattacacccataaattgatattgctcacacccataaattgataattactcttcatggtctaaacttggatcccatgacatatcagg

SEQ ID NO: 1258 - DNA, 130 bp, Synthetic construct
  source 1..130: mol_type = other DNA
cacatgattacgccaagctttgttgatacacccataaattgatattgccacccataaattgatattgctcacacccataaattgataattactcttcatggtctaaacttggatcccatgacatatcagg

SEQ ID NO: 1259 - DNA, 130 bp, Synthetic construct
  source 1..130: mol_type = other DNA
cacatgattacgccaagctttgttgatagtctaaacttcagtaagtttacgaccacccataaattgatattgctcacacccataaattgataattactcttcatggtctaggatcccatgacatatcagg

SEQ ID NO: 1260 - DNA, 130 bp, Synthetic construct
  source 1..130: mol_type = other DNA
cacatgattacgccaagctttgttgatacaaccataagttgatattttcacccataaattgatattgctcacacccataaattgataattactcttcatggtctaaacttggatcccatgacatatcagg

SEQ ID NO: 1261 - DNA, 130 bp, Synthetic construct
  source 1..130: mol_type = other DNA
cacatgattacgccaagctttgttgatacaaccatatattgatatctccacccataaattgatattgctcacacccataaattgataattactcttcatggtctaaacttggatcccatgacatatcagg

SEQ ID NO: 1262 - DNA, 130 bp, Synthetic construct
  source 1..130: mol_type = other DNA
cacatgattacgccaagctttgttgatacaaccataaagtgatatttacacccataaattgatattgctcacacccataaattgataattactcttcatggtctaaacttggatcccatgacatatcagg

SEQ ID NO: 1263 - DNA, 130 bp, Synthetic construct
  source 1..130: mol_type = other DNA
cacatgattacgccaagctttgttgatacaaccataaaatgataattagtctaaacttcagtaagtttacgactcacacccataaattgataattactcttcatggtctaggatcccatgacatatcagg

SEQ ID NO: 1264 - DNA, 130 bp, Synthetic construct
  source 1..130: mol_type = other DNA
cacatgattacgccaagctttgttgatacacccataaattgataattagtctaaacttcagtaagtttacgactcacacccataaattgataattactcttcatggtctaggatcccatgacatatcagg

SEQ ID NO: 1265 - DNA, 130 bp, Synthetic construct
  source 1..130: mol_type = other DNA
cacatgattacgccaagctttgttgatacacccataaattgatattgcgtctaaacttcagtaagtttacgactcacacccataaattgataattactcttcatggtctaggatcccatgacatatcagg

SEQ ID NO: 1266 - DNA, 130 bp, Synthetic construct
  source 1..130: mol_type = other DNA
cacatgattacgccaagctttgttgatagtctaaacttcagtaagtttacgacgtctaaacttcagtaagtttacgactcacacccataaattgataattactcttcatgggatcccatgacatatcagg

SEQ ID NO: 1267 - DNA, 130 bp, Synthetic construct
  source 1..130: mol_type = other DNA
cacatgattacgccaagctttgttgatacaaccataagttgatattttgtctaaacttcagtaagtttacgactcacacccataaattgataattactcttcatggtctaggatcccatgacatatcagg

SEQ ID NO: 1268 - DNA, 130 bp, Synthetic construct
  source 1..130: mol_type = other DNA
cacatgattacgccaagctttgttgatacaaccatatattgatatctcgtctaaacttcagtaagtttacgactcacacccataaattgataattactcttcatggtctaggatcccatgacatatcagg

SEQ ID NO: 1269 - DNA, 130 bp, Synthetic construct
  source 1..130: mol_type = other DNA
cacatgattacgccaagctttgttgatacaaccataaagtgatatttagtctaaacttcagtaagtttacgactcacacccataaattgataattactcttcatggtctaggatcccatgacatatcagg

SEQ ID NO: 1270 - DNA, 130 bp, Synthetic construct
  source 1..130: mol_type = other DNA
cacatgattacgccaagctttgttgatacaaccataaaatgataattacaaccataagttgatatttttcacacccataaattgataattactcttcatggtctaaacttggatcccatgacatatcagg

SEQ ID NO: 1271 - DNA, 130 bp, Synthetic construct
  source 1..130: mol_type = other DNA
cacatgattacgccaagctttgttgatacacccataaattgataattacaaccataagttgatatttttcacacccataaattgataattactcttcatggtctaaacttggatcccatgacatatcagg

SEQ ID NO: 1272 - DNA, 130 bp, Synthetic construct
  source 1..130: mol_type = other DNA
cacatgattacgccaagctttgttgatacacccataaattgatattgccaaccataagttgatatttttcacacccataaattgataattactcttcatggtctaaacttggatcccatgacatatcagg

SEQ ID NO: 1273 - DNA, 130 bp, Synthetic construct
  source 1..130: mol_type = other DNA
cacatgattacgccaagctttgttgatagtctaaacttcagtaagtttacgaccaaccataagttgatatttttcacacccataaattgataattactcttcatggtctaggatcccatgacatatcagg

SEQ ID NO: 1274 - DNA, 130 bp, Synthetic construct
  source 1..130: mol_type = other DNA
cacatgattacgccaagctttgttgatacaaccataagttgatattttcaaccataagttgatatttttcacacccataaattgataattactcttcatggtctaaacttggatcccatgacatatcagg

SEQ ID NO: 1275 - DNA, 130 bp, Synthetic construct
  source 1..130: mol_type = other DNA
cacatgattacgccaagctttgttgatacaaccatatattgatatctccaaccataagttgatatttttcacacccataaattgataattactcttcatggtctaaacttggatcccatgacatatcagg

SEQ ID NO: 1276 - DNA, 130 bp, Synthetic construct
  source 1..130: mol_type = other DNA
cacatgattacgccaagctttgttgatacaaccataaagtgatatttacaaccataagttgatatttttcacacccataaattgataattactcttcatggtctaaacttggatcccatgacatatcagg

SEQ ID NO: 1277 - DNA, 130 bp, Synthetic construct
  source 1..130: mol_type = other DNA
cacatgattacgccaagctttgttgatacaaccataaaatgataattacaaccatatattgatatctctcacacccataaattgataattactcttcatggtctaaacttggatcccatgacatatcagg

SEQ ID NO: 1278 - DNA, 130 bp, Synthetic construct
  source 1..130: mol_type = other DNA
cacatgattacgccaagctttgttgatacacccataaattgataattacaaccatatattgatatctctcacacccataaattgataattactcttcatggtctaaacttggatcccatgacatatcagg

SEQ ID NO: 1279 - DNA, 130 bp, Synthetic construct
  source 1..130: mol_type = other DNA
cacatgattacgccaagctttgttgatacacccataaattgatattgccaaccatatattgatatctctcacacccataaattgataattactcttcatggtctaaacttggatcccatgacatatcagg

SEQ ID NO: 1280 - DNA, 130 bp, Synthetic construct
  source 1..130: mol_type = other DNA
cacatgattacgccaagctttgttgatagtctaaacttcagtaagtttacgaccaaccatatattgatatctctcacacccataaattgataattactcttcatggtctaggatcccatgacatatcagg

SEQ ID NO: 1281 - DNA, 130 bp, Synthetic construct
  source 1..130: mol_type = other DNA
cacatgattacgccaagctttgttgatacaaccataagttgatattttcaaccatatattgatatctctcacacccataaattgataattactcttcatggtctaaacttggatcccatgacatatcagg

SEQ ID NO: 1282 - DNA, 130 bp, Synthetic construct
  source 1..130: mol_type = other DNA
cacatgattacgccaagctttgttgatacaaccatatattgatatctccaaccatatattgatatctctcacacccataaattgataattactcttcatggtctaaacttggatcccatgacatatcagg

SEQ ID NO: 1283 - DNA, 130 bp, Synthetic construct
  source 1..130: mol_type = other DNA
cacatgattacgccaagctttgttgatacaaccataaagtgatatttacaaccatatattgatatctctcacacccataaattgataattactcttcatggtctaaacttggatcccatgacatatcagg

SEQ ID NO: 1284 - DNA, 130 bp, Synthetic construct
  source 1..130: mol_type = other DNA
cacatgattacgccaagctttgttgatacaaccataaaatgataattacaaccataaagtgatatttatcacacccataaattgataattactcttcatggtctaaacttggatcccatgacatatcagg

SEQ ID NO: 1285 - DNA, 130 bp, Synthetic construct
  source 1..130: mol_type = other DNA
cacatgattacgccaagctttgttgatacacccataaattgataattacaaccataaagtgatatttatcacacccataaattgataattactcttcatggtctaaacttggatcccatgacatatcagg

SEQ ID NO: 1286 - DNA, 130 bp, Synthetic construct
  source 1..130: mol_type = other DNA
cacatgattacgccaagctttgttgatacacccataaattgatattgccaaccataaagtgatatttatcacacccataaattgataattactcttcatggtctaaacttggatcccatgacatatcagg

SEQ ID NO: 1287 - DNA, 130 bp, Synthetic construct
  source 1..130: mol_type = other DNA
cacatgattacgccaagctttgttgatagtctaaacttcagtaagtttacgaccaaccataaagtgatatttatcacacccataaattgataattactcttcatggtctaggatcccatgacatatcagg

SEQ ID NO: 1288 - DNA, 130 bp, Synthetic construct
  source 1..130: mol_type = other DNA
cacatgattacgccaagctttgttgatacaaccataagttgatattttcaaccataaagtgatatttatcacacccataaattgataattactcttcatggtctaaacttggatcccatgacatatcagg

SEQ ID NO: 1289 - DNA, 130 bp, Synthetic construct
  source 1..130: mol_type = other DNA
cacatgattacgccaagctttgttgatacaaccatatattgatatctccaaccataaagtgatatttatcacacccataaattgataattactcttcatggtctaaacttggatcccatgacatatcagg

SEQ ID NO: 1290 - DNA, 130 bp, Synthetic construct
  source 1..130: mol_type = other DNA
cacatgattacgccaagctttgttgatacaaccataaagtgatatttacaaccataaagtgatatttatcacacccataaattgataattactcttcatggtctaaacttggatcccatgacatatcagg

SEQ ID NO: 1291 - DNA, 130 bp, Synthetic construct
  source 1..130: mol_type = other DNA
cacatgattacgccaagctttgttgatacaaccataaaatgataattacaaccataaaatgataattatcacacccataaattgataattactcttcatggtctaaacttggatcccatgacatatcagg

SEQ ID NO: 1292 - DNA, 130 bp, Synthetic construct
  source 1..130: mol_type = other DNA
cacatgattacgccaagctttgttgatacacccataaattgataattacaaccataaaatgataattatcacacccataaattgataattactcttcatggtctaaacttggatcccatgacatatcagg

SEQ ID NO: 1293 - DNA, 130 bp, Synthetic construct
  source 1..130: mol_type = other DNA
cacatgattacgccaagctttgttgatacacccataaattgatattgccaaccataaaatgataattatcacacccataaattgataattactcttcatggtctaaacttggatcccatgacatatcagg

SEQ ID NO: 1294 - DNA, 130 bp, Synthetic construct
  source 1..130: mol_type = other DNA
cacatgattacgccaagctttgttgatagtctaaacttcagtaagtttacgaccaaccataaaatgataattatcacacccataaattgataattactcttcatggtctaggatcccatgacatatcagg

SEQ ID NO: 1295 - DNA, 130 bp, Synthetic construct
  source 1..130: mol_type = other DNA
cacatgattacgccaagctttgttgatacaaccataagttgatattttcaaccataaaatgataattatcacacccataaattgataattactcttcatggtctaaacttggatcccatgacatatcagg

SEQ ID NO: 1296 - DNA, 130 bp, Synthetic construct
  source 1..130: mol_type = other DNA
cacatgattacgccaagctttgttgatacaaccatatattgatatctccaaccataaaatgataattatcacacccataaattgataattactcttcatggtctaaacttggatcccatgacatatcagg

SEQ ID NO: 1297 - DNA, 130 bp, Synthetic construct
  source 1..130: mol_type = other DNA
cacatgattacgccaagctttgttgatacaaccataaagtgatatttacaaccataaaatgataattatcacacccataaattgataattactcttcatggtctaaacttggatcccatgacatatcagg

SEQ ID NO: 1298 - DNA, 130 bp, Synthetic construct
  source 1..130: mol_type = other DNA
gttctgctgtagtcaagctttgttgatacaaccataaaatgataattacacccataaattgataattatcagtgggtatttaactataacgctcttcatggtctaaacttggatcctccatctgagtgag

SEQ ID NO: 1299 - DNA, 130 bp, Synthetic construct
  source 1..130: mol_type = other DNA
gttctgctgtagtcaagctttgttgatacacccataaattgataattacacccataaattgataattatcagtgggtatttaactataacgctcttcatggtctaaacttggatcctccatctgagtgag

SEQ ID NO: 1300 - DNA, 130 bp, Synthetic construct
  source 1..130: mol_type = other DNA
gttctgctgtagtcaagctttgttgatacacccataaattgatattgccacccataaattgataattatcagtgggtatttaactataacgctcttcatggtctaaacttggatcctccatctgagtgag

SEQ ID NO: 1301 - DNA, 130 bp, Synthetic construct
  source 1..130: mol_type = other DNA
gttctgctgtagtcaagctttgttgatagtctaaacttcagtaagtttacgaccacccataaattgataattatcagtgggtatttaactataacgctcttcatggtctaggatcctccatctgagtgag

SEQ ID NO: 1302 - DNA, 130 bp, Synthetic construct
  source 1..130: mol_type = other DNA
gttctgctgtagtcaagctttgttgatacaaccataagttgatattttcacccataaattgataattatcagtgggtatttaactataacgctcttcatggtctaaacttggatcctccatctgagtgag

SEQ ID NO: 1303 - DNA, 130 bp, Synthetic construct
  source 1..130: mol_type = other DNA
gttctgctgtagtcaagctttgttgatacaaccatatattgatatctccacccataaattgataattatcagtgggtatttaactataacgctcttcatggtctaaacttggatcctccatctgagtgag

SEQ ID NO: 1304 - DNA, 130 bp, Synthetic construct
  source 1..130: mol_type = other DNA
gttctgctgtagtcaagctttgttgatacaaccataaagtgatatttacacccataaattgataattatcagtgggtatttaactataacgctcttcatggtctaaacttggatcctccatctgagtgag

SEQ ID NO: 1305 - DNA, 130 bp, Synthetic construct
  source 1..130: mol_type = other DNA
gttctgctgtagtcaagctttgttgatacaaccataaaatgataattacacccataaattgatattgctcagtgggtatttaactataacgctcttcatggtctaaacttggatcctccatctgagtgag

SEQ ID NO: 1306 - DNA, 130 bp, Synthetic construct
  source 1..130: mol_type = other DNA
gttctgctgtagtcaagctttgttgatacacccataaattgataattacacccataaattgatattgctcagtgggtatttaactataacgctcttcatggtctaaacttggatcctccatctgagtgag

SEQ ID NO: 1307 - DNA, 130 bp, Synthetic construct
  source 1..130: mol_type = other DNA
gttctgctgtagtcaagctttgttgatacacccataaattgatattgccacccataaattgatattgctcagtgggtatttaactataacgctcttcatggtctaaacttggatcctccatctgagtgag

SEQ ID NO: 1308 - DNA, 130 bp, Synthetic construct
  source 1..130: mol_type = other DNA
gttctgctgtagtcaagctttgttgatagtctaaacttcagtaagtttacgaccacccataaattgatattgctcagtgggtatttaactataacgctcttcatggtctaggatcctccatctgagtgag

SEQ ID NO: 1309 - DNA, 130 bp, Synthetic construct
  source 1..130: mol_type = other DNA
gttctgctgtagtcaagctttgttgatacaaccataagttgatattttcacccataaattgatattgctcagtgggtatttaactataacgctcttcatggtctaaacttggatcctccatctgagtgag

SEQ ID NO: 1310 - DNA, 130 bp, Synthetic construct
  source 1..130: mol_type = other DNA
gttctgctgtagtcaagctttgttgatacaaccatatattgatatctccacccataaattgatattgctcagtgggtatttaactataacgctcttcatggtctaaacttggatcctccatctgagtgag

SEQ ID NO: 1311 - DNA, 130 bp, Synthetic construct
  source 1..130: mol_type = other DNA
gttctgctgtagtcaagctttgttgatacaaccataaagtgatatttacacccataaattgatattgctcagtgggtatttaactataacgctcttcatggtctaaacttggatcctccatctgagtgag

SEQ ID NO: 1312 - DNA, 130 bp, Synthetic construct
  source 1..130: mol_type = other DNA
gttctgctgtagtcaagctttgttgatacaaccataaaatgataattagtctaaacttcagtaagtttacgactcagtgggtatttaactataacgctcttcatggtctaggatcctccatctgagtgag

SEQ ID NO: 1313 - DNA, 130 bp, Synthetic construct
  source 1..130: mol_type = other DNA
gttctgctgtagtcaagctttgttgatacacccataaattgataattagtctaaacttcagtaagtttacgactcagtgggtatttaactataacgctcttcatggtctaggatcctccatctgagtgag

SEQ ID NO: 1314 - DNA, 130 bp, Synthetic construct
  source 1..130: mol_type = other DNA
gttctgctgtagtcaagctttgttgatacacccataaattgatattgcgtctaaacttcagtaagtttacgactcagtgggtatttaactataacgctcttcatggtctaggatcctccatctgagtgag

SEQ ID NO: 1315 - DNA, 130 bp, Synthetic construct
  source 1..130: mol_type = other DNA
gttctgctgtagtcaagctttgttgatagtctaaacttcagtaagtttacgacgtctaaacttcagtaagtttacgactcagtgggtatttaactataacgctcttcatgggatcctccatctgagtgag

SEQ ID NO: 1316 - DNA, 130 bp, Synthetic construct
  source 1..130: mol_type = other DNA
gttctgctgtagtcaagctttgttgatacaaccataagttgatattttgtctaaacttcagtaagtttacgactcagtgggtatttaactataacgctcttcatggtctaggatcctccatctgagtgag

SEQ ID NO: 1317 - DNA, 130 bp, Synthetic construct
  source 1..130: mol_type = other DNA
gttctgctgtagtcaagctttgttgatacaaccatatattgatatctcgtctaaacttcagtaagtttacgactcagtgggtatttaactataacgctcttcatggtctaggatcctccatctgagtgag

SEQ ID NO: 1318 - DNA, 130 bp, Synthetic construct
  source 1..130: mol_type = other DNA
gttctgctgtagtcaagctttgttgatacaaccataaagtgatatttagtctaaacttcagtaagtttacgactcagtgggtatttaactataacgctcttcatggtctaggatcctccatctgagtgag

SEQ ID NO: 1319 - DNA, 130 bp, Synthetic construct
  source 1..130: mol_type = other DNA
gttctgctgtagtcaagctttgttgatacaaccataaaatgataattacaaccataagttgatatttttcagtgggtatttaactataacgctcttcatggtctaaacttggatcctccatctgagtgag

SEQ ID NO: 1320 - DNA, 130 bp, Synthetic construct
  source 1..130: mol_type = other DNA
gttctgctgtagtcaagctttgttgatacacccataaattgataattacaaccataagttgatatttttcagtgggtatttaactataacgctcttcatggtctaaacttggatcctccatctgagtgag

SEQ ID NO: 1321 - DNA, 130 bp, Synthetic construct
  source 1..130: mol_type = other DNA
gttctgctgtagtcaagctttgttgatacacccataaattgatattgccaaccataagttgatatttttcagtgggtatttaactataacgctcttcatggtctaaacttggatcctccatctgagtgag

SEQ ID NO: 1322 - DNA, 130 bp, Synthetic construct
  source 1..130: mol_type = other DNA
gttctgctgtagtcaagctttgttgatagtctaaacttcagtaagtttacgaccaaccataagttgatatttttcagtgggtatttaactataacgctcttcatggtctaggatcctccatctgagtgag

SEQ ID NO: 1323 - DNA, 130 bp, Synthetic construct
  source 1..130: mol_type = other DNA
gttctgctgtagtcaagctttgttgatacaaccataagttgatattttcaaccataagttgatatttttcagtgggtatttaactataacgctcttcatggtctaaacttggatcctccatctgagtgag

SEQ ID NO: 1324 - DNA, 130 bp, Synthetic construct
  source 1..130: mol_type = other DNA
gttctgctgtagtcaagctttgttgatacaaccatatattgatatctccaaccataagttgatatttttcagtgggtatttaactataacgctcttcatggtctaaacttggatcctccatctgagtgag

SEQ ID NO: 1325 - DNA, 130 bp, Synthetic construct
  source 1..130: mol_type = other DNA
gttctgctgtagtcaagctttgttgatacaaccataaagtgatatttacaaccataagttgatatttttcagtgggtatttaactataacgctcttcatggtctaaacttggatcctccatctgagtgag

SEQ ID NO: 1326 - DNA, 130 bp, Synthetic construct
  source 1..130: mol_type = other DNA
gttctgctgtagtcaagctttgttgatacaaccataaaatgataattacaaccatatattgatatctctcagtgggtatttaactataacgctcttcatggtctaaacttggatcctccatctgagtgag

SEQ ID NO: 1327 - DNA, 130 bp, Synthetic construct
  source 1..130: mol_type = other DNA
gttctgctgtagtcaagctttgttgatacacccataaattgataattacaaccatatattgatatctctcagtgggtatttaactataacgctcttcatggtctaaacttggatcctccatctgagtgag

SEQ ID NO: 1328 - DNA, 130 bp, Synthetic construct
  source 1..130: mol_type = other DNA
gttctgctgtagtcaagctttgttgatacacccataaattgatattgccaaccatatattgatatctctcagtgggtatttaactataacgctcttcatggtctaaacttggatcctccatctgagtgag

SEQ ID NO: 1329 - DNA, 130 bp, Synthetic construct
  source 1..130: mol_type = other DNA
gttctgctgtagtcaagctttgttgatagtctaaacttcagtaagtttacgaccaaccatatattgatatctctcagtgggtatttaactataacgctcttcatggtctaggatcctccatctgagtgag

SEQ ID NO: 1330 - DNA, 130 bp, Synthetic construct
  source 1..130: mol_type = other DNA
gttctgctgtagtcaagctttgttgatacaaccataagttgatattttcaaccatatattgatatctctcagtgggtatttaactataacgctcttcatggtctaaacttggatcctccatctgagtgag

SEQ ID NO: 1331 - DNA, 130 bp, Synthetic construct
  source 1..130: mol_type = other DNA
gttctgctgtagtcaagctttgttgatacaaccatatattgatatctccaaccatatattgatatctctcagtgggtatttaactataacgctcttcatggtctaaacttggatcctccatctgagtgag

SEQ ID NO: 1332 - DNA, 130 bp, Synthetic construct
  source 1..130: mol_type = other DNA
gttctgctgtagtcaagctttgttgatacaaccataaagtgatatttacaaccatatattgatatctctcagtgggtatttaactataacgctcttcatggtctaaacttggatcctccatctgagtgag

SEQ ID NO: 1333 - DNA, 130 bp, Synthetic construct
  source 1..130: mol_type = other DNA
gttctgctgtagtcaagctttgttgatacaaccataaaatgataattacaaccataaagtgatatttatcagtgggtatttaactataacgctcttcatggtctaaacttggatcctccatctgagtgag

SEQ ID NO: 1334 - DNA, 130 bp, Synthetic construct
  source 1..130: mol_type = other DNA
gttctgctgtagtcaagctttgttgatacacccataaattgataattacaaccataaagtgatatttatcagtgggtatttaactataacgctcttcatggtctaaacttggatcctccatctgagtgag

SEQ ID NO: 1335 - DNA, 130 bp, Synthetic construct
  source 1..130: mol_type = other DNA
gttctgctgtagtcaagctttgttgatacacccataaattgatattgccaaccataaagtgatatttatcagtgggtatttaactataacgctcttcatggtctaaacttggatcctccatctgagtgag

SEQ ID NO: 1336 - DNA, 130 bp, Synthetic construct
  source 1..130: mol_type = other DNA
gttctgctgtagtcaagctttgttgatagtctaaacttcagtaagtttacgaccaaccataaagtgatatttatcagtgggtatttaactataacgctcttcatggtctaggatcctccatctgagtgag

SEQ ID NO: 1337 - DNA, 130 bp, Synthetic construct
  source 1..130: mol_type = other DNA
gttctgctgtagtcaagctttgttgatacaaccataagttgatattttcaaccataaagtgatatttatcagtgggtatttaactataacgctcttcatggtctaaacttggatcctccatctgagtgag

SEQ ID NO: 1338 - DNA, 130 bp, Synthetic construct
  source 1..130: mol_type = other DNA
gttctgctgtagtcaagctttgttgatacaaccatatattgatatctccaaccataaagtgatatttatcagtgggtatttaactataacgctcttcatggtctaaacttggatcctccatctgagtgag

SEQ ID NO: 1339 - DNA, 130 bp, Synthetic construct
  source 1..130: mol_type = other DNA
gttctgctgtagtcaagctttgttgatacaaccataaagtgatatttacaaccataaagtgatatttatcagtgggtatttaactataacgctcttcatggtctaaacttggatcctccatctgagtgag

SEQ ID NO: 1340 - DNA, 130 bp, Synthetic construct
  source 1..130: mol_type = other DNA
gttctgctgtagtcaagctttgttgatacaaccataaaatgataattacaaccataaaatgataattatcagtgggtatttaactataacgctcttcatggtctaaacttggatcctccatctgagtgag

SEQ ID NO: 1341 - DNA, 130 bp, Synthetic construct
  source 1..130: mol_type = other DNA
gttctgctgtagtcaagctttgttgatacacccataaattgataattacaaccataaaatgataattatcagtgggtatttaactataacgctcttcatggtctaaacttggatcctccatctgagtgag

SEQ ID NO: 1342 - DNA, 130 bp, Synthetic construct
  source 1..130: mol_type = other DNA
gttctgctgtagtcaagctttgttgatacacccataaattgatattgccaaccataaaatgataattatcagtgggtatttaactataacgctcttcatggtctaaacttggatcctccatctgagtgag

SEQ ID NO: 1343 - DNA, 130 bp, Synthetic construct
  source 1..130: mol_type = other DNA
gttctgctgtagtcaagctttgttgatagtctaaacttcagtaagtttacgaccaaccataaaatgataattatcagtgggtatttaactataacgctcttcatggtctaggatcctccatctgagtgag

SEQ ID NO: 1344 - DNA, 130 bp, Synthetic construct
  source 1..130: mol_type = other DNA
gttctgctgtagtcaagctttgttgatacaaccataagttgatattttcaaccataaaatgataattatcagtgggtatttaactataacgctcttcatggtctaaacttggatcctccatctgagtgag

SEQ ID NO: 1345 - DNA, 130 bp, Synthetic construct
  source 1..130: mol_type = other DNA
gttctgctgtagtcaagctttgttgatacaaccatatattgatatctccaaccataaaatgataattatcagtgggtatttaactataacgctcttcatggtctaaacttggatcctccatctgagtgag

SEQ ID NO: 1346 - DNA, 130 bp, Synthetic construct
  source 1..130: mol_type = other DNA
gttctgctgtagtcaagctttgttgatacaaccataaagtgatatttacaaccataaaatgataattatcagtgggtatttaactataacgctcttcatggtctaaacttggatcctccatctgagtgag

SEQ ID NO: 1347 - DNA, 130 bp, Synthetic construct
  source 1..130: mol_type = other DNA
gctaccgtgatacaaagctttgttgatacaaccataaaatgataattacacccataaattgataattatcacacccataaattgatattggctcttcatggtctaaacttggatcctgtgtcacgtatcg

SEQ ID NO: 1348 - DNA, 130 bp, Synthetic construct
  source 1..130: mol_type = other DNA
gctaccgtgatacaaagctttgttgatacaaccataaaatgataattacacccataaattgataattatcacacccataaattgatataccctcttcatggtctaaacttggatcctgtgtcacgtatcg

SEQ ID NO: 1349 - DNA, 130 bp, Synthetic construct
  source 1..130: mol_type = other DNA
gctaccgtgatacaaagctttgttgatacaaccataaaatgataattacacccataaattgataattatcacacccataaattgattatgcctcttcatggtctaaacttggatcctgtgtcacgtatcg

SEQ ID NO: 1350 - DNA, 130 bp, Synthetic construct
  source 1..130: mol_type = other DNA
gctaccgtgatacaaagctttgttgatacaaccataaaatgataattacacccataaattgataattatcacacccataaattgtaattgcctcttcatggtctaaacttggatcctgtgtcacgtatcg

SEQ ID NO: 1351 - DNA, 130 bp, Synthetic construct
  source 1..130: mol_type = other DNA
gctaccgtgatacaaagctttgttgatacaaccataaaatgataattacacccataaattgataattatcacacccataaatacatattgcctcttcatggtctaaacttggatcctgtgtcacgtatcg

SEQ ID NO: 1352 - DNA, 130 bp, Synthetic construct
  source 1..130: mol_type = other DNA
gctaccgtgatacaaagctttgttgatacaaccataaaatgataattacacccataaattgataattatcacacccataatatgatattgcctcttcatggtctaaacttggatcctgtgtcacgtatcg

SEQ ID NO: 1353 - DNA, 130 bp, Synthetic construct
  source 1..130: mol_type = other DNA
gctaccgtgatacaaagctttgttgatacaaccataaaatgataattacacccataaattgataattatcacacccatttattgatattgcctcttcatggtctaaacttggatcctgtgtcacgtatcg

SEQ ID NO: 1354 - DNA, 130 bp, Synthetic construct
  source 1..130: mol_type = other DNA
gctaccgtgatacaaagctttgttgatacaaccataaaatgataattacacccataaattgataattatcacaccctaaaattgatattgcctcttcatggtctaaacttggatcctgtgtcacgtatcg

SEQ ID NO: 1355 - DNA, 130 bp, Synthetic construct
  source 1..130: mol_type = other DNA
gctaccgtgatacaaagctttgttgatacaaccataaaatgataattacacccataaattgataattatcacacggataaattgatattgcctcttcatggtctaaacttggatcctgtgtcacgtatcg

SEQ ID NO: 1356 - DNA, 130 bp, Synthetic construct
  source 1..130: mol_type = other DNA
gctaccgtgatacaaagctttgttgatacaaccataaaatgataattacacccataaattgataattatcactgccataaattgatattgcctcttcatggtctaaacttggatcctgtgtcacgtatcg

SEQ ID NO: 1357 - DNA, 130 bp, Synthetic construct
  source 1..130: mol_type = other DNA
gctaccgtgatacaaagctttgttgatacaaccataaaatgataattacacccataaattgataattatctgacccataaattgatattgcctcttcatggtctaaacttggatcctgtgtcacgtatcg

SEQ ID NO: 1358 - DNA, 130 bp, Synthetic construct
  source 1..130: mol_type = other DNA
gctaccgtgatacaaagctttgttgatacaaccataaaatgataattacacccataaattgataattaagacacccataaattgatattgcctcttcatggtctaaacttggatcctgtgtcacgtatcg

SEQ ID NO: 1359 - DNA, 130 bp, Synthetic construct
  source 1..130: mol_type = other DNA
gctaccgtgatacaaagctttgttgatacaaccataaaatgataattacacccataaattgataatattcacacccataaattgatattgcctcttcatggtctaaacttggatcctgtgtcacgtatcg

SEQ ID NO: 1360 - DNA, 130 bp, Synthetic construct
  source 1..130: mol_type = other DNA
gctaccgtgatacaaagctttgttgatacaaccataaaatgataattacacccataaattgatatatatcacacccataaattgatattgcctcttcatggtctaaacttggatcctgtgtcacgtatcg

SEQ ID NO: 1361 - DNA, 130 bp, Synthetic construct
  source 1..130: mol_type = other DNA
gctaccgtgatacaaagctttgttgatacaaccataaaatgataattacacccataaattgaatattatcacacccataaattgatattgcctcttcatggtctaaacttggatcctgtgtcacgtatcg

SEQ ID NO: 1362 - DNA, 130 bp, Synthetic construct
  source 1..130: mol_type = other DNA
gctaccgtgatacaaagctttgttgatacaaccataaaatgataattacacccataaattcttaattatcacacccataaattgatattgcctcttcatggtctaaacttggatcctgtgtcacgtatcg

SEQ ID NO: 1363 - DNA, 130 bp, Synthetic construct
  source 1..130: mol_type = other DNA
gctaccgtgatacaaagctttgttgatacaaccataaaatgataattacacccataaaaagataattatcacacccataaattgatattgcctcttcatggtctaaacttggatcctgtgtcacgtatcg

SEQ ID NO: 1364 - DNA, 130 bp, Synthetic construct
  source 1..130: mol_type = other DNA
gctaccgtgatacaaagctttgttgatacaaccataaaatgataattacacccatattttgataattatcacacccataaattgatattgcctcttcatggtctaaacttggatcctgtgtcacgtatcg

SEQ ID NO: 1365 - DNA, 130 bp, Synthetic construct
  source 1..130: mol_type = other DNA
gctaccgtgatacaaagctttgttgatacaaccataaaatgataattacacccaataattgataattatcacacccataaattgatattgcctcttcatggtctaaacttggatcctgtgtcacgtatcg

SEQ ID NO: 1366 - DNA, 130 bp, Synthetic construct
  source 1..130: mol_type = other DNA
gctaccgtgatacaaagctttgttgatacaaccataaaatgataattacaccgttaaattgataattatcacacccataaattgatattgcctcttcatggtctaaacttggatcctgtgtcacgtatcg

SEQ ID NO: 1367 - DNA, 130 bp, Synthetic construct
  source 1..130: mol_type = other DNA
gctaccgtgatacaaagctttgttgatacaaccataaaatgataattacaggcataaattgataattatcacacccataaattgatattgcctcttcatggtctaaacttggatcctgtgtcacgtatcg

SEQ ID NO: 1368 - DNA, 130 bp, Synthetic construct
  source 1..130: mol_type = other DNA
gctaccgtgatacaaagctttgttgatacaaccataaaatgataattagtcccataaattgataattatcacacccataaattgatattgcctcttcatggtctaaacttggatcctgtgtcacgtatcg

SEQ ID NO: 1369 - DNA, 130 bp, Synthetic construct
  source 1..130: mol_type = other DNA
gctaccgtgatacaaagctttgttgatacaaccataaaatgataatatcacccataaattgataattatcacacccataaattgatattgcctcttcatggtctaaacttggatcctgtgtcacgtatcg

SEQ ID NO: 1370 - DNA, 130 bp, Synthetic construct
  source 1..130: mol_type = other DNA
gctaccgtgatacaaagctttgttgatacaaccataaaatgatatatacacccataaattgataattatcacacccataaattgatattgcctcttcatggtctaaacttggatcctgtgtcacgtatcg

SEQ ID NO: 1371 - DNA, 130 bp, Synthetic construct
  source 1..130: mol_type = other DNA
gctaccgtgatacaaagctttgttgatacaaccataaaatgaatattacacccataaattgataattatcacacccataaattgatattgcctcttcatggtctaaacttggatcctgtgtcacgtatcg

SEQ ID NO: 1372 - DNA, 130 bp, Synthetic construct
  source 1..130: mol_type = other DNA
gctaccgtgatacaaagctttgttgatacaaccataaaatcttaattacacccataaattgataattatcacacccataaattgatattgcctcttcatggtctaaacttggatcctgtgtcacgtatcg

SEQ ID NO: 1373 - DNA, 130 bp, Synthetic construct
  source 1..130: mol_type = other DNA
gctaccgtgatacaaagctttgttgatacaaccataaatagataattacacccataaattgataattatcacacccataaattgatattgcctcttcatggtctaaacttggatcctgtgtcacgtatcg

SEQ ID NO: 1374 - DNA, 130 bp, Synthetic construct
  source 1..130: mol_type = other DNA
gctaccgtgatacaaagctttgttgatacaaccatattatgataattacacccataaattgataattatcacacccataaattgatattgcctcttcatggtctaaacttggatcctgtgtcacgtatcg

SEQ ID NO: 1375 - DNA, 130 bp, Synthetic construct
  source 1..130: mol_type = other DNA
gctaccgtgatacaaagctttgttgatacaaccaataaatgataattacacccataaattgataattatcacacccataaattgatattgcctcttcatggtctaaacttggatcctgtgtcacgtatcg

SEQ ID NO: 1376 - DNA, 130 bp, Synthetic construct
  source 1..130: mol_type = other DNA
gctaccgtgatacaaagctttgttgatacaacgttaaaatgataattacacccataaattgataattatcacacccataaattgatattgcctcttcatggtctaaacttggatcctgtgtcacgtatcg

SEQ ID NO: 1377 - DNA, 130 bp, Synthetic construct
  source 1..130: mol_type = other DNA
gctaccgtgatacaaagctttgttgatacatgcataaaatgataattacacccataaattgataattatcacacccataaattgatattgcctcttcatggtctaaacttggatcctgtgtcacgtatcg

SEQ ID NO: 1378 - DNA, 130 bp, Synthetic construct
  source 1..130: mol_type = other DNA
gctaccgtgatacaaagctttgttgatagtaccataaaatgataattacacccataaattgataattatcacacccataaattgatattgcctcttcatggtctaaacttggatcctgtgtcacgtatcg

SEQ ID NO: 1379 - DNA, 130 bp, Synthetic construct
  source 1..130: mol_type = other DNA
gctaccgtgatacaaagctttgttgaatcaaccataaaatgataattacacccataaattgataattatcacacccataaattgatattgcctcttcatggtctaaacttggatcctgtgtcacgtatcg

SEQ ID NO: 1380 - DNA, 130 bp, Synthetic construct
  source 1..130: mol_type = other DNA
gctaccgtgatacaaagctttgttcttacaaccataaaatgataattacacccataaattgataattatcacacccataaattgatattgcctcttcatggtctaaacttggatcctgtgtcacgtatcg

SEQ ID NO: 1381 - DNA, 130 bp, Synthetic construct
  source 1..130: mol_type = other DNA
gctaccgtgatacaaagctttgaagatacaaccataaaatgataattacacccataaattgataattatcacacccataaattgatattgcctcttcatggtctaaacttggatcctgtgtcacgtatcg

SEQ ID NO: 1382 - DNA, 130 bp, Synthetic construct
  source 1..130: mol_type = other DNA
gctaccgtgatacaaagcttacttgatacaaccataaaatgataattacacccataaattgataattatcacacccataaattgatattgcctcttcatggtctaaacttggatcctgtgtcacgtatcg

SEQ ID NO: 1383 - DNA, 130 bp, Synthetic construct
  source 1..130: mol_type = other DNA
gctaccgtgatacaaagctttgttgatacaaccataaaatgataattacacccataaattgataattatcacacccataaattgatattgtctcttcatggtctaaacttggatcctgtgtcacgtatcg

SEQ ID NO: 1384 - DNA, 130 bp, Synthetic construct
  source 1..130: mol_type = other DNA
gctaccgtgatacaaagctttgttgatacaaccataaaatgataattacacccataaattgataattatcacacccataaattgatatcacctcttcatggtctaaacttggatcctgtgtcacgtatcg

SEQ ID NO: 1385 - DNA, 130 bp, Synthetic construct
  source 1..130: mol_type = other DNA
gctaccgtgatacaaagctttgttgatacaaccataaaatgataattacacccataaattgataattatcacacccataaattgatgctgcctcttcatggtctaaacttggatcctgtgtcacgtatcg

SEQ ID NO: 1386 - DNA, 130 bp, Synthetic construct
  source 1..130: mol_type = other DNA
gctaccgtgatacaaagctttgttgatacaaccataaaatgataattacacccataaattgataattatcacacccataaattggcattgcctcttcatggtctaaacttggatcctgtgtcacgtatcg

SEQ ID NO: 1387 - DNA, 130 bp, Synthetic construct
  source 1..130: mol_type = other DNA
gctaccgtgatacaaagctttgttgatacaaccataaaatgataattacacccataaattgataattatcacacccataaatcaatattgcctcttcatggtctaaacttggatcctgtgtcacgtatcg

SEQ ID NO: 1388 - DNA, 130 bp, Synthetic construct
  source 1..130: mol_type = other DNA
gctaccgtgatacaaagctttgttgatacaaccataaaatgataattacacccataaattgataattatcacacccataagctgatattgcctcttcatggtctaaacttggatcctgtgtcacgtatcg

SEQ ID NO: 1389 - DNA, 130 bp, Synthetic construct
  source 1..130: mol_type = other DNA
gctaccgtgatacaaagctttgttgatacaaccataaaatgataattacacccataaattgataattatcacacccatggattgatattgcctcttcatggtctaaacttggatcctgtgtcacgtatcg

SEQ ID NO: 1390 - DNA, 130 bp, Synthetic construct
  source 1..130: mol_type = other DNA
gctaccgtgatacaaagctttgttgatacaaccataaaatgataattacacccataaattgataattatcacacccgcaaattgatattgcctcttcatggtctaaacttggatcctgtgtcacgtatcg

SEQ ID NO: 1391 - DNA, 130 bp, Synthetic construct
  source 1..130: mol_type = other DNA
gctaccgtgatacaaagctttgttgatacaaccataaaatgataattacacccataaattgataattatcacacttataaattgatattgcctcttcatggtctaaacttggatcctgtgtcacgtatcg

SEQ ID NO: 1392 - DNA, 130 bp, Synthetic construct
  source 1..130: mol_type = other DNA
gctaccgtgatacaaagctttgttgatacaaccataaaatgataattacacccataaattgataattatcacgtccataaattgatattgcctcttcatggtctaaacttggatcctgtgtcacgtatcg

SEQ ID NO: 1393 - DNA, 130 bp, Synthetic construct
  source 1..130: mol_type = other DNA
gctaccgtgatacaaagctttgttgatacaaccataaaatgataattacacccataaattgataattatcgtacccataaattgatattgcctcttcatggtctaaacttggatcctgtgtcacgtatcg

SEQ ID NO: 1394 - DNA, 130 bp, Synthetic construct
  source 1..130: mol_type = other DNA
gctaccgtgatacaaagctttgttgatacaaccataaaatgataattacacccataaattgataattactacacccataaattgatattgcctcttcatggtctaaacttggatcctgtgtcacgtatcg

SEQ ID NO: 1395 - DNA, 130 bp, Synthetic construct
  source 1..130: mol_type = other DNA
gctaccgtgatacaaagctttgttgatacaaccataaaatgataattacacccataaattgataatcgtcacacccataaattgatattgcctcttcatggtctaaacttggatcctgtgtcacgtatcg

SEQ ID NO: 1396 - DNA, 130 bp, Synthetic construct
  source 1..130: mol_type = other DNA
gctaccgtgatacaaagctttgttgatacaaccataaaatgataattacacccataaattgatagctatcacacccataaattgatattgcctcttcatggtctaaacttggatcctgtgtcacgtatcg

SEQ ID NO: 1397 - DNA, 130 bp, Synthetic construct
  source 1..130: mol_type = other DNA
gctaccgtgatacaaagctttgttgatacaaccataaaatgataattacacccataaattgacgattatcacacccataaattgatattgcctcttcatggtctaaacttggatcctgtgtcacgtatcg

SEQ ID NO: 1398 - DNA, 130 bp, Synthetic construct
  source 1..130: mol_type = other DNA
gctaccgtgatacaaagctttgttgatacaaccataaaatgataattacacccataaattagtaattatcacacccataaattgatattgcctcttcatggtctaaacttggatcctgtgtcacgtatcg

SEQ ID NO: 1399 - DNA, 130 bp, Synthetic construct
  source 1..130: mol_type = other DNA
gctaccgtgatacaaagctttgttgatacaaccataaaatgataattacacccataaaccgataattatcacacccataaattgatattgcctcttcatggtctaaacttggatcctgtgtcacgtatcg

SEQ ID NO: 1400 - DNA, 130 bp, Synthetic construct
  source 1..130: mol_type = other DNA
gctaccgtgatacaaagctttgttgatacaaccataaaatgataattacacccataggttgataattatcacacccataaattgatattgcctcttcatggtctaaacttggatcctgtgtcacgtatcg

SEQ ID NO: 1401 - DNA, 130 bp, Synthetic construct
  source 1..130: mol_type = other DNA
gctaccgtgatacaaagctttgttgatacaaccataaaatgataattacacccacgaattgataattatcacacccataaattgatattgcctcttcatggtctaaacttggatcctgtgtcacgtatcg

SEQ ID NO: 1402 - DNA, 130 bp, Synthetic construct
  source 1..130: mol_type = other DNA
gctaccgtgatacaaagctttgttgatacaaccataaaatgataattacacctgtaaattgataattatcacacccataaattgatattgcctcttcatggtctaaacttggatcctgtgtcacgtatcg

SEQ ID NO: 1403 - DNA, 130 bp, Synthetic construct
  source 1..130: mol_type = other DNA
gctaccgtgatacaaagctttgttgatacaaccataaaatgataattacattcataaattgataattatcacacccataaattgatattgcctcttcatggtctaaacttggatcctgtgtcacgtatcg

SEQ ID NO: 1404 - DNA, 130 bp, Synthetic construct
  source 1..130: mol_type = other DNA
gctaccgtgatacaaagctttgttgatacaaccataaaatgataattatgcccataaattgataattatcacacccataaattgatattgcctcttcatggtctaaacttggatcctgtgtcacgtatcg

SEQ ID NO: 1405 - DNA, 130 bp, Synthetic construct
  source 1..130: mol_type = other DNA
gctaccgtgatacaaagctttgttgatacaaccataaaatgataatcgcacccataaattgataattatcacacccataaattgatattgcctcttcatggtctaaacttggatcctgtgtcacgtatcg

SEQ ID NO: 1406 - DNA, 130 bp, Synthetic construct
  source 1..130: mol_type = other DNA
gctaccgtgatacaaagctttgttgatacaaccataaaatgatagctacacccataaattgataattatcacacccataaattgatattgcctcttcatggtctaaacttggatcctgtgtcacgtatcg

SEQ ID NO: 1407 - DNA, 130 bp, Synthetic construct
  source 1..130: mol_type = other DNA
gctaccgtgatacaaagctttgttgatacaaccataaaatgacgattacacccataaattgataattatcacacccataaattgatattgcctcttcatggtctaaacttggatcctgtgtcacgtatcg

SEQ ID NO: 1408 - DNA, 130 bp, Synthetic construct
  source 1..130: mol_type = other DNA
gctaccgtgatacaaagctttgttgatacaaccataaaatagtaattacacccataaattgataattatcacacccataaattgatattgcctcttcatggtctaaacttggatcctgtgtcacgtatcg

SEQ ID NO: 1409 - DNA, 130 bp, Synthetic construct
  source 1..130: mol_type = other DNA
gctaccgtgatacaaagctttgttgatacaaccataaagcgataattacacccataaattgataattatcacacccataaattgatattgcctcttcatggtctaaacttggatcctgtgtcacgtatcg

SEQ ID NO: 1410 - DNA, 130 bp, Synthetic construct
  source 1..130: mol_type = other DNA
gctaccgtgatacaaagctttgttgatacaaccataggatgataattacacccataaattgataattatcacacccataaattgatattgcctcttcatggtctaaacttggatcctgtgtcacgtatcg

SEQ ID NO: 1411 - DNA, 130 bp, Synthetic construct
  source 1..130: mol_type = other DNA
gctaccgtgatacaaagctttgttgatacaaccacgaaatgataattacacccataaattgataattatcacacccataaattgatattgcctcttcatggtctaaacttggatcctgtgtcacgtatcg

SEQ ID NO: 1412 - DNA, 130 bp, Synthetic construct
  source 1..130: mol_type = other DNA
gctaccgtgatacaaagctttgttgatacaactgtaaaatgataattacacccataaattgataattatcacacccataaattgatattgcctcttcatggtctaaacttggatcctgtgtcacgtatcg

SEQ ID NO: 1413 - DNA, 130 bp, Synthetic construct
  source 1..130: mol_type = other DNA
gctaccgtgatacaaagctttgttgatacagtcataaaatgataattacacccataaattgataattatcacacccataaattgatattgcctcttcatggtctaaacttggatcctgtgtcacgtatcg

SEQ ID NO: 1414 - DNA, 130 bp, Synthetic construct
  source 1..130: mol_type = other DNA
gctaccgtgatacaaagctttgttgatatgaccataaaatgataattacacccataaattgataattatcacacccataaattgatattgcctcttcatggtctaaacttggatcctgtgtcacgtatcg

SEQ ID NO: 1415 - DNA, 130 bp, Synthetic construct
  source 1..130: mol_type = other DNA
gctaccgtgatacaaagctttgttgacgcaaccataaaatgataattacacccataaattgataattatcacacccataaattgatattgcctcttcatggtctaaacttggatcctgtgtcacgtatcg

SEQ ID NO: 1416 - DNA, 130 bp, Synthetic construct
  source 1..130: mol_type = other DNA
gctaccgtgatacaaagctttgttagtacaaccataaaatgataattacacccataaattgataattatcacacccataaattgatattgcctcttcatggtctaaacttggatcctgtgtcacgtatcg

SEQ ID NO: 1417 - DNA, 130 bp, Synthetic construct
  source 1..130: mol_type = other DNA
gctaccgtgatacaaagctttgccgatacaaccataaaatgataattacacccataaattgataattatcacacccataaattgatattgcctcttcatggtctaaacttggatcctgtgtcacgtatcg

SEQ ID NO: 1418 - DNA, 130 bp, Synthetic construct
  source 1..130: mol_type = other DNA
gctaccgtgatacaaagcttcattgatacaaccataaaatgataattacacccataaattgataattatcacacccataaattgatattgcctcttcatggtctaaacttggatcctgtgtcacgtatcg

SEQ ID NO: 1419 - DNA, 130 bp, Synthetic construct
  source 1..130: mol_type = other DNA
cagttcttggtcgaaagctttgttgatacaaccataaaatgataattacacccataaattgataattatcacacccataaattgatattgcctcttcatggtctaaacttggatcctctcaagtctgtgg

SEQ ID NO: 1420 - DNA, 130 bp, Synthetic construct
  source 1..130: mol_type = other DNA
cagttcttggtcgaaagcttagttgatacaaccataaaatgataattacacccataaattgataattatcacacccataaattgatattgcctcttcatggtctaaacttggatcctctcaagtctgtgg

SEQ ID NO: 1421 - DNA, 130 bp, Synthetic construct
  source 1..130: mol_type = other DNA
cagttcttggtcgaaagcttggttgatacaaccataaaatgataattacacccataaattgataattatcacacccataaattgatattgcctcttcatggtctaaacttggatcctctcaagtctgtgg

SEQ ID NO: 1422 - DNA, 130 bp, Synthetic construct
  source 1..130: mol_type = other DNA
cagttcttggtcgaaagcttcgttgatacaaccataaaatgataattacacccataaattgataattatcacacccataaattgatattgcctcttcatggtctaaacttggatcctctcaagtctgtgg

SEQ ID NO: 1423 - DNA, 130 bp, Synthetic construct
  source 1..130: mol_type = other DNA
cagttcttggtcgaaagcttttttgatacaaccataaaatgataattacacccataaattgataattatcacacccataaattgatattgcctcttcatggtctaaacttggatcctctcaagtctgtgg

SEQ ID NO: 1424 - DNA, 130 bp, Synthetic construct
  source 1..130: mol_type = other DNA
cagttcttggtcgaaagctttattgatacaaccataaaatgataattacacccataaattgataattatcacacccataaattgatattgcctcttcatggtctaaacttggatcctctcaagtctgtgg

SEQ ID NO: 1425 - DNA, 130 bp, Synthetic construct
  source 1..130: mol_type = other DNA
cagttcttggtcgaaagctttcttgatacaaccataaaatgataattacacccataaattgataattatcacacccataaattgatattgcctcttcatggtctaaacttggatcctctcaagtctgtgg

SEQ ID NO: 1426 - DNA, 130 bp, Synthetic construct
  source 1..130: mol_type = other DNA
cagttcttggtcgaaagctttgatgatacaaccataaaatgataattacacccataaattgataattatcacacccataaattgatattgcctcttcatggtctaaacttggatcctctcaagtctgtgg

SEQ ID NO: 1427 - DNA, 130 bp, Synthetic construct
  source 1..130: mol_type = other DNA
cagttcttggtcgaaagctttggtgatacaaccataaaatgataattacacccataaattgataattatcacacccataaattgatattgcctcttcatggtctaaacttggatcctctcaagtctgtgg

SEQ ID NO: 1428 - DNA, 130 bp, Synthetic construct
  source 1..130: mol_type = other DNA
cagttcttggtcgaaagctttgctgatacaaccataaaatgataattacacccataaattgataattatcacacccataaattgatattgcctcttcatggtctaaacttggatcctctcaagtctgtgg

SEQ ID NO: 1429 - DNA, 130 bp, Synthetic construct
  source 1..130: mol_type = other DNA
cagttcttggtcgaaagctttgtagatacaaccataaaatgataattacacccataaattgataattatcacacccataaattgatattgcctcttcatggtctaaacttggatcctctcaagtctgtgg

SEQ ID NO: 1430 - DNA, 130 bp, Synthetic construct
  source 1..130: mol_type = other DNA
cagttcttggtcgaaagctttgtggatacaaccataaaatgataattacacccataaattgataattatcacacccataaattgatattgcctcttcatggtctaaacttggatcctctcaagtctgtgg

SEQ ID NO: 1431 - DNA, 130 bp, Synthetic construct
  source 1..130: mol_type = other DNA
cagttcttggtcgaaagctttgtcgatacaaccataaaatgataattacacccataaattgataattatcacacccataaattgatattgcctcttcatggtctaaacttggatcctctcaagtctgtgg

SEQ ID NO: 1432 - DNA, 130 bp, Synthetic construct
  source 1..130: mol_type = other DNA
cagttcttggtcgaaagctttgtttatacaaccataaaatgataattacacccataaattgataattatcacacccataaattgatattgcctcttcatggtctaaacttggatcctctcaagtctgtgg

SEQ ID NO: 1433 - DNA, 130 bp, Synthetic construct
  source 1..130: mol_type = other DNA
cagttcttggtcgaaagctttgttaatacaaccataaaatgataattacacccataaattgataattatcacacccataaattgatattgcctcttcatggtctaaacttggatcctctcaagtctgtgg

SEQ ID NO: 1434 - DNA, 130 bp, Synthetic construct
  source 1..130: mol_type = other DNA
cagttcttggtcgaaagctttgttcatacaaccataaaatgataattacacccataaattgataattatcacacccataaattgatattgcctcttcatggtctaaacttggatcctctcaagtctgtgg

SEQ ID NO: 1435 - DNA, 130 bp, Synthetic construct
  source 1..130: mol_type = other DNA
cagttcttggtcgaaagctttgttgttacaaccataaaatgataattacacccataaattgataattatcacacccataaattgatattgcctcttcatggtctaaacttggatcctctcaagtctgtgg

SEQ ID NO: 1436 - DNA, 130 bp, Synthetic construct
  source 1..130: mol_type = other DNA
cagttcttggtcgaaagctttgttggtacaaccataaaatgataattacacccataaattgataattatcacacccataaattgatattgcctcttcatggtctaaacttggatcctctcaagtctgtgg

SEQ ID NO: 1437 - DNA, 130 bp, Synthetic construct
  source 1..130: mol_type = other DNA
cagttcttggtcgaaagctttgttgctacaaccataaaatgataattacacccataaattgataattatcacacccataaattgatattgcctcttcatggtctaaacttggatcctctcaagtctgtgg

SEQ ID NO: 1438 - DNA, 130 bp, Synthetic construct
  source 1..130: mol_type = other DNA
cagttcttggtcgaaagctttgttgaaacaaccataaaatgataattacacccataaattgataattatcacacccataaattgatattgcctcttcatggtctaaacttggatcctctcaagtctgtgg

SEQ ID NO: 1439 - DNA, 130 bp, Synthetic construct
  source 1..130: mol_type = other DNA
cagttcttggtcgaaagctttgttgagacaaccataaaatgataattacacccataaattgataattatcacacccataaattgatattgcctcttcatggtctaaacttggatcctctcaagtctgtgg

SEQ ID NO: 1440 - DNA, 130 bp, Synthetic construct
  source 1..130: mol_type = other DNA
cagttcttggtcgaaagctttgttgacacaaccataaaatgataattacacccataaattgataattatcacacccataaattgatattgcctcttcatggtctaaacttggatcctctcaagtctgtgg

SEQ ID NO: 1441 - DNA, 130 bp, Synthetic construct
  source 1..130: mol_type = other DNA
cagttcttggtcgaaagctttgttgattcaaccataaaatgataattacacccataaattgataattatcacacccataaattgatattgcctcttcatggtctaaacttggatcctctcaagtctgtgg

SEQ ID NO: 1442 - DNA, 130 bp, Synthetic construct
  source 1..130: mol_type = other DNA
cagttcttggtcgaaagctttgttgatgcaaccataaaatgataattacacccataaattgataattatcacacccataaattgatattgcctcttcatggtctaaacttggatcctctcaagtctgtgg

SEQ ID NO: 1443 - DNA, 130 bp, Synthetic construct
  source 1..130: mol_type = other DNA
cagttcttggtcgaaagctttgttgatccaaccataaaatgataattacacccataaattgataattatcacacccataaattgatattgcctcttcatggtctaaacttggatcctctcaagtctgtgg

SEQ ID NO: 1444 - DNA, 130 bp, Synthetic construct
  source 1..130: mol_type = other DNA
ggaaaggtactcgaagcttcaaggcagttccgggctgaatgaagcgccgtgttgatacaaccataaaatgataattacacccataaattgataattatcacacccaggatccgggtttgacactgagtag

SEQ ID NO: 1445 - DNA, 130 bp, Synthetic construct
  source 1..130: mol_type = other DNA
ggaaaggtactcgaagcttcaaggcagttccgggctgaatgaagcgccgtgttgttacaaccataaaatgataattacacccataaattgataattatcacacccaggatccgggtttgacactgagtag

SEQ ID NO: 1446 - DNA, 130 bp, Synthetic construct
  source 1..130: mol_type = other DNA
ggaaaggtactcgaagcttcaaggcagttccgggctgaatgaagcgccgtgtggatacaaccataaaatgataattacacccataaattgataattatcacacccaggatccgggtttgacactgagtag

SEQ ID NO: 1447 - DNA, 130 bp, Synthetic construct
  source 1..130: mol_type = other DNA
ggaaaggtactcgaagcttcaaggcagttccgggctgaatgaagcgccgtgttgatacaaccctaaaatgataattacacccataaattgataattatcacacccaggatccgggtttgacactgagtag

SEQ ID NO: 1448 - DNA, 130 bp, Synthetic construct
  source 1..130: mol_type = other DNA
ggaaaggtactcgaagcttcaaggcagttccgggctgaatgaagcgccgtgttgatacaaccaaaaaatgataattacacccataaattgataattatcacacccaggatccgggtttgacactgagtag

SEQ ID NO: 1449 - DNA, 130 bp, Synthetic construct
  source 1..130: mol_type = other DNA
ggaaaggtactcgaagcttcaaggcagttccgggctgaatgaagcgccgtgttgatacaaccatacaatgataattacacccataaattgataattatcacacccaggatccgggtttgacactgagtag

SEQ ID NO: 1450 - DNA, 130 bp, Synthetic construct
  source 1..130: mol_type = other DNA
ggaaaggtactcgaagcttcaaggcagttccgggctgaatgaagcgccgtgttgatacaaccataatatgataattacacccataaattgataattatcacacccaggatccgggtttgacactgagtag

SEQ ID NO: 1451 - DNA, 130 bp, Synthetic construct
  source 1..130: mol_type = other DNA
ggaaaggtactcgaagcttcaaggcagttccgggctgaatgaagcgccgtgttgatacaaccataaaatgataattacacccataaatggataattatcacacccaggatccgggtttgacactgagtag

SEQ ID NO: 1452 - DNA, 130 bp, Synthetic construct
  source 1..130: mol_type = other DNA
ggaaaggtactcgaagcttcaaggcagttccgggctgaatgaagcgccgtgttgatacaaccataaaatgataattacacccataaattgttaattatcacacccaggatccgggtttgacactgagtag

SEQ ID NO: 1453 - DNA, 130 bp, Synthetic construct
  source 1..130: mol_type = other DNA
ggaaaggtactcgaagcttcaaggcagttccgggctgaatgaagcgccgtgttgatacaaccataaaatgataattacacccataaattgacaattatcacacccaggatccgggtttgacactgagtag

SEQ ID NO: 1454 - DNA, 130 bp, Synthetic construct
  source 1..130: mol_type = other DNA
ggaaaggtactcgaagcttcaaggcagttccgggctgaatgaagcgccgtgttgatacaaccataaaatgataattacacccataaattgatcattatcacacccaggatccgggtttgacactgagtag

SEQ ID NO: 1455 - DNA, 130 bp, Synthetic construct
  source 1..130: mol_type = other DNA
ggaaaggtactcgaagcttcaaggcagttccgggctgaatgaagcgccgtgttgatacaaccataaaatgataattacacccataaattgataattatcacaaccaggatccgggtttgacactgagtag

SEQ ID NO: 1456 - DNA, 130 bp, Synthetic construct
  source 1..130: mol_type = other DNA
ggaaaggtactcgaagcttcaaggcagttccgggctgaatgaagcgcctgttgatacaaccataaaatgataattacacccataaattgataattatcacacccaaggatccgggtttgacactgagtag

SEQ ID NO: 1457 - DNA, 130 bp, Synthetic construct
  source 1..130: mol_type = other DNA
ggaaaggtactcgaagcttcaaggcagttccgggctgaatgaagcgcctgttaatacaaccataaaatgataattacacccataaattgataattatcacacccaaggatccgggtttgacactgagtag

SEQ ID NO: 1458 - DNA, 130 bp, Synthetic construct
  source 1..130: mol_type = other DNA
ggaaaggtactcgaagcttcaaggcagttccgggctgaatgaagcgcctgttggtacaaccataaaatgataattacacccataaattgataattatcacacccaaggatccgggtttgacactgagtag

SEQ ID NO: 1459 - DNA, 130 bp, Synthetic construct
  source 1..130: mol_type = other DNA
ggaaaggtactcgaagcttcaaggcagttccgggctgaatgaagcgcctgttgatacaaccataacatgataattacacccataaattgataattatcacacccaaggatccgggtttgacactgagtag

SEQ ID NO: 1460 - DNA, 130 bp, Synthetic construct
  source 1..130: mol_type = other DNA
ggaaaggtactcgaagcttcaaggcagttccgggctgaatgaagcgcctgttgatacaaccataaattgataattacacccataaattgataattatcacacccaaggatccgggtttgacactgagtag

SEQ ID NO: 1461 - DNA, 130 bp, Synthetic construct
  source 1..130: mol_type = other DNA
ggaaaggtactcgaagcttcaaggcagttccgggctgaatgaagcgcctgttgatacaaccataaaatcataattacacccataaattgataattatcacacccaaggatccgggtttgacactgagtag

SEQ ID NO: 1462 - DNA, 130 bp, Synthetic construct
  source 1..130: mol_type = other DNA
ggaaaggtactcgaagcttcaaggcagttccgggctgaatgaagcgcctgttgatacaaccataaaatgttaattacacccataaattgataattatcacacccaaggatccgggtttgacactgagtag

SEQ ID NO: 1463 - DNA, 130 bp, Synthetic construct
  source 1..130: mol_type = other DNA
ggaaaggtactcgaagcttcaaggcagttccgggctgaatgaagcgcctgttgatacaaccataaaatgacaattacacccataaattgataattatcacacccaaggatccgggtttgacactgagtag

SEQ ID NO: 1464 - DNA, 130 bp, Synthetic construct
  source 1..130: mol_type = other DNA
ggaaaggtactcgaagcttcaaggcagttccgggctgaatgaagcgcctgttgatacaaccataaaatgatcattacacccataaattgataattatcacacccaaggatccgggtttgacactgagtag

SEQ ID NO: 1465 - DNA, 130 bp, Synthetic construct
  source 1..130: mol_type = other DNA
ggaaaggtactcgaagcttcaaggcagttccgggctgaatgaagcgcctgttgatacaaccataaaatgataattaaacccataaattgataattatcacacccaaggatccgggtttgacactgagtag

SEQ ID NO: 1466 - DNA, 130 bp, Synthetic construct
  source 1..130: mol_type = other DNA
ggaaaggtactcgaagcttcaaggcagttccgggctgaatgaagcgcctgttgatacaaccataaaatgataattacccccataaattgataattatcacacccaaggatccgggtttgacactgagtag

SEQ ID NO: 1467 - DNA, 130 bp, Synthetic construct
  source 1..130: mol_type = other DNA
ggaaaggtactcgaagcttcaaggcagttccgggctgaatgaagcgcctgttgatacaaccataaaatgataattacaaccataaattgataattatcacacccaaggatccgggtttgacactgagtag

SEQ ID NO: 1468 - DNA, 130 bp, Synthetic construct
  source 1..130: mol_type = other DNA
ggaaaggtactcgaagcttcaaggcagttccgggctgaatgaagcgcctgttgatacaaccataaaatgataattacacccacaaattgataattatcacacccaaggatccgggtttgacactgagtag

SEQ ID NO: 1469 - DNA, 130 bp, Synthetic construct
  source 1..130: mol_type = other DNA
ggaaaggtactcgaagcttcaaggcagttccgggctgaatgaagcgcctgttgatacaaccataaaatgataattacacccatcaattgataattatcacacccaaggatccgggtttgacactgagtag

SEQ ID NO: 1470 - DNA, 130 bp, Synthetic construct
  source 1..130: mol_type = other DNA
ggaaaggtactcgaagcttcaaggcagttccgggctgaatgaagcgcctgttgatacaaccataaaatgataattacacccataaattaataattatcacacccaaggatccgggtttgacactgagtag

SEQ ID NO: 1471 - DNA, 130 bp, Synthetic construct
  source 1..130: mol_type = other DNA
ggaaaggtactcgaagcttcaaggcagttccgggctgaatgaagcgcctgttgatacaaccataaaatgataattacacccataaattggtaattatcacacccaaggatccgggtttgacactgagtag

SEQ ID NO: 1472 - DNA, 130 bp, Synthetic construct
  source 1..130: mol_type = other DNA
ggaaaggtactcgaagcttcaaggcagttccgggctgaatgaagcgcctgttgatacaaccataaaatgataattacacccataaattgataattatcccacccaaggatccgggtttgacactgagtag

SEQ ID NO: 1473 - DNA, 130 bp, Synthetic construct
  source 1..130: mol_type = other DNA
ggaaaggtactcgaagcttcaaggcagttccgggctgaatgaagcgcctgttgatacaaccataaaatgataattacacccataaattgataattataacacccaaggatccgggtttgacactgagtag

SEQ ID NO: 1474 - DNA, 130 bp, Synthetic construct
  source 1..130: mol_type = other DNA
ggaaaggtactcgaagcttcaaggcagttccgggctgaatgaagcgctgttgatacaaccataaaatgataattacacccataaattgataattatcacacccagcggatccgggtttgacactgagtag

SEQ ID NO: 1475 - DNA, 130 bp, Synthetic construct
  source 1..130: mol_type = other DNA
ggaaaggtactcgaagcttcaaggcagttccgggctgaatgaagcgctgttgatacaaccacaaaatgataattacacccataaattgataattatcacacccagcggatccgggtttgacactgagtag

SEQ ID NO: 1476 - DNA, 130 bp, Synthetic construct
  source 1..130: mol_type = other DNA
ggaaaggtactcgaagcttcaaggcagttccgggctgaatgaagcgctgttgatacaaccatcaaatgataattacacccataaattgataattatcacacccagcggatccgggtttgacactgagtag

SEQ ID NO: 1477 - DNA, 130 bp, Synthetic construct
  source 1..130: mol_type = other DNA
ggaaaggtactcgaagcttcaaggcagttccgggctgaatgaagcgctgttgatacaaccataaaataataattacacccataaattgataattatcacacccagcggatccgggtttgacactgagtag

SEQ ID NO: 1478 - DNA, 130 bp, Synthetic construct
  source 1..130: mol_type = other DNA
ggaaaggtactcgaagcttcaaggcagttccgggctgaatgaagcgctgttgatacaaccataaaatggtaattacacccataaattgataattatcacacccagcggatccgggtttgacactgagtag

SEQ ID NO: 1479 - DNA, 130 bp, Synthetic construct
  source 1..130: mol_type = other DNA
ggaaaggtactcgaagcttcaaggcagttccgggctgaatgaagcgctgttgatacaaccataaaatgataattacacccctaaattgataattatcacacccagcggatccgggtttgacactgagtag

SEQ ID NO: 1480 - DNA, 130 bp, Synthetic construct
  source 1..130: mol_type = other DNA
ggaaaggtactcgaagcttcaaggcagttccgggctgaatgaagcgctgttgatacaaccataaaatgataattacacccaaaaattgataattatcacacccagcggatccgggtttgacactgagtag

SEQ ID NO: 1481 - DNA, 130 bp, Synthetic construct
  source 1..130: mol_type = other DNA
ggaaaggtactcgaagcttcaaggcagttccgggctgaatgaagcgctgttgatacaaccataaaatgataattacacccatcaattgataattatcacacccagcggatccgggtttgacactgagtag

SEQ ID NO: 1482 - DNA, 130 bp, Synthetic construct
  source 1..130: mol_type = other DNA
ggaaaggtactcgaagcttcaaggcagttccgggctgaatgaagcgctgttgatacaaccataaaatgataattacacccataatttgataattatcacacccagcggatccgggtttgacactgagtag

SEQ ID NO: 1483 - DNA, 130 bp, Synthetic construct
  source 1..130: mol_type = other DNA
ggaaaggtactcgaagcttcaaggcagttccgggctgaatgaagcgctgttgatacaaccatcaaataataattacacccaaaatttgataattatcacacccagcggatccgggtttgacactgagtag

SEQ ID NO: 1484 - DNA, 130 bp, Synthetic construct
  source 1..130: mol_type = other DNA
ggaaaggtactcgaagcttcaaggcagttccgggctgaatgaagcgctgttgatacaaccatcaaatggtaattacacccaaaatttgataattatcacacccagcggatccgggtttgacactgagtag

SEQ ID NO: 1485 - DNA, 130 bp, Synthetic construct
  source 1..130: mol_type = other DNA
ggaaaggtactcgaagcttcaaggcagttccgggctgaatgaagcgctgttgatacaaccatcaaataataattacacccaacaattgataattatcacacccagcggatccgggtttgacactgagtag

SEQ ID NO: 1486 - DNA, 130 bp, Synthetic construct
  source 1..130: mol_type = other DNA
ggaaaggtactcgaagcttcaaggcagttccgggctgaatgaagcgctgttgatacaaccatcaaatggtaattacacccaacaattgataattatcacacccagcggatccgggtttgacactgagtag

SEQ ID NO: 1487 - DNA, 130 bp, Synthetic construct
  source 1..130: mol_type = other DNA
ctgttgatacaaccataaaatgataattacacccataaattgataattatcacacccataaattgatattgcgatttaggagttgatttaatcaactttagtggaccaatcacgtgatcatggatggtag

SEQ ID NO: 1488 - DNA, 130 bp, Synthetic construct
  source 1..130: mol_type = other DNA
ctgttgatacaaccataaaatgataattagcacccataaattgataattatcacacccataaattgatattgcatttaggagttgatttaatcaactttagtggaccaatcacgtgatcatggatggtag

SEQ ID NO: 1489 - DNA, 130 bp, Synthetic construct
  source 1..130: mol_type = other DNA
ctgttgatacaaccataaaatgataattagacacccataaattgataattatcacacccataaattgatattgctttaggagttgatttaatcaactttagtggaccaatcacgtgatcatggatggtag

SEQ ID NO: 1490 - DNA, 130 bp, Synthetic construct
  source 1..130: mol_type = other DNA
ctgttgatacaaccataaaatgataattagatcacccataaattgataattatcacacccataaattgatattgcttaggagttgatttaatcaactttagtggaccaatcacgtgatcatggatggtag

SEQ ID NO: 1491 - DNA, 130 bp, Synthetic construct
  source 1..130: mol_type = other DNA
ctgttgatacaaccataaaatgataattagattcacccataaattgataattatcacacccataaattgatattgctaggagttgatttaatcaactttagtggaccaatcacgtgatcatggatggtag

SEQ ID NO: 1492 - DNA, 130 bp, Synthetic construct
  source 1..130: mol_type = other DNA
ctgttgatacaaccataaaatgataattagatttcacccataaattgataattatcacacccataaattgatattgcaggagttgatttaatcaactttagtggaccaatcacgtgatcatggatggtag

SEQ ID NO: 1493 - DNA, 130 bp, Synthetic construct
  source 1..130: mol_type = other DNA
ctgttgatacaaccataaaatgataattagatttacacccataaattgataattatcacacccataaattgatattgcggagttgatttaatcaactttagtggaccaatcacgtgatcatggatggtag

SEQ ID NO: 1494 - DNA, 130 bp, Synthetic construct
  source 1..130: mol_type = other DNA
ctgttgatacaaccataaaatgataattagatttagcacccataaattgataattatcacacccataaattgatattgcgagttgatttaatcaactttagtggaccaatcacgtgatcatggatggtag

SEQ ID NO: 1495 - DNA, 130 bp, Synthetic construct
  source 1..130: mol_type = other DNA
ctgttgatacaaccataaaatgataattagatttaggcacccataaattgataattatcacacccataaattgatattgcagttgatttaatcaactttagtggaccaatcacgtgatcatggatggtag

SEQ ID NO: 1496 - DNA, 130 bp, Synthetic construct
  source 1..130: mol_type = other DNA
ctgttgatacaaccataaaatgataattagatttaggacacccataaattgataattatcacacccataaattgatattgcgttgatttaatcaactttagtggaccaatcacgtgatcatggatggtag

SEQ ID NO: 1497 - DNA, 130 bp, Synthetic construct
  source 1..130: mol_type = other DNA
ctgttgatacaaccataaaatgataattagatttaggagcacccataaattgataattatcacacccataaattgatattgcttgatttaatcaactttagtggaccaatcacgtgatcatggatggtag

SEQ ID NO: 1498 - DNA, 130 bp, Synthetic construct
  source 1..130: mol_type = other DNA
ctgttgatacaaccataaaatgataattagatttaggagtcacccataaattgataattatcacacccataaattgatattgctgatttaatcaactttagtggaccaatcacgtgatcatggatggtag

SEQ ID NO: 1499 - DNA, 130 bp, Synthetic construct
  source 1..130: mol_type = other DNA
ctgttgatacaaccataaaatgataattagatttaggagttcacccataaattgataattatcacacccataaattgatattgcgatttaatcaactttagtggaccaatcacgtgatcatggatggtag

SEQ ID NO: 1500 - DNA, 130 bp, Synthetic construct
  source 1..130: mol_type = other DNA
ctgttgatacaaccataaaatgataattagatttaggagttgcacccataaattgataattatcacacccataaattgatattgcatttaatcaactttagtggaccaatcacgtgatcatggatggtag

SEQ ID NO: 1501 - DNA, 130 bp, Synthetic construct
  source 1..130: mol_type = other DNA
ctgttgatacaaccataaaatgataattagatttaggagttgacacccataaattgataattatcacacccataaattgatattgctttaatcaactttagtggaccaatcacgtgatcatggatggtag

SEQ ID NO: 1502 - DNA, 130 bp, Synthetic construct
  source 1..130: mol_type = other DNA
ctgttgatacaaccataaaatgataattagatttaggagttgatcacccataaattgataattatcacacccataaattgatattgcttaatcaactttagtggaccaatcacgtgatcatggatggtag

SEQ ID NO: 1503 - DNA, 130 bp, Synthetic construct
  source 1..130: mol_type = other DNA
ctgttgatacaaccataaaatgataattagatttaggagttgattcacccataaattgataattatcacacccataaattgatattgctaatcaactttagtggaccaatcacgtgatcatggatggtag

SEQ ID NO: 1504 - DNA, 130 bp, Synthetic construct
  source 1..130: mol_type = other DNA
ctgttgatacaaccataaaatgataattagatttaggagttgatttcacccataaattgataattatcacacccataaattgatattgcaatcaactttagtggaccaatcacgtgatcatggatggtag

SEQ ID NO: 1505 - DNA, 130 bp, Synthetic construct
  source 1..130: mol_type = other DNA
ctgttgatacaaccataaaatgataattagatttaggagttgatttacacccataaattgataattatcacacccataaattgatattgcatcaactttagtggaccaatcacgtgatcatggatggtag

SEQ ID NO: 1506 - DNA, 130 bp, Synthetic construct
  source 1..130: mol_type = other DNA
ctgttgatacaaccataaaatgataattagatttaggagttgatttaacacccataaattgataattatcacacccataaattgatattgctcaactttagtggaccaatcacgtgatcatggatggtag

SEQ ID NO: 1507 - DNA, 130 bp, Synthetic construct
  source 1..130: mol_type = other DNA
ctgttgatacaaccataaaatgataattagatttaggagttgatttaatcacccataaattgataattatcacacccataaattgatattgccaactttagtggaccaatcacgtgatcatggatggtag

SEQ ID NO: 1508 - DNA, 130 bp, Synthetic construct
  source 1..130: mol_type = other DNA
ctgttgatacaaccataaaatgataattagatttaggagttgatttaatccacccataaattgataattatcacacccataaattgatattgcaactttagtggaccaatcacgtgatcatggatggtag

SEQ ID NO: 1509 - DNA, 130 bp, Synthetic construct
  source 1..130: mol_type = other DNA
ctgttgatacaaccataaaatgataattagatttaggagttgatttaatcacacccataaattgataattatcacacccataaattgatattgcactttagtggaccaatcacgtgatcatggatggtag

SEQ ID NO: 1510 - DNA, 130 bp, Synthetic construct
  source 1..130: mol_type = other DNA
ctgttgatacaaccataaaatgataattagatttaggagttgatttaatcaacacccataaattgataattatcacacccataaattgatattgcctttagtggaccaatcacgtgatcatggatggtag

SEQ ID NO: 1511 - DNA, 130 bp, Synthetic construct
  source 1..130: mol_type = other DNA
ctgttgatacaaccataaaatgataattagatttaggagttgatttaatcaaccacccataaattgataattatcacacccataaattgatattgctttagtggaccaatcacgtgatcatggatggtag

SEQ ID NO: 1512 - DNA, 130 bp, Synthetic construct
  source 1..130: mol_type = other DNA
ctgttgatacaaccataaaatgataattagatttaggagttgatttaatcaactcacccataaattgataattatcacacccataaattgatattgcttagtggaccaatcacgtgatcatggatggtag

SEQ ID NO: 1513 - DNA, 130 bp, Synthetic construct
  source 1..130: mol_type = other DNA
ctgttgatacaaccataaaatgataattagatttaggagttgatttaatcaacttcacccataaattgataattatcacacccataaattgatattgctagtggaccaatcacgtgatcatggatggtag

SEQ ID NO: 1514 - DNA, 130 bp, Synthetic construct
  source 1..130: mol_type = other DNA
ctgttgatacaaccataaaatgataattagatttaggagttgatttaatcaactttcacccataaattgataattatcacacccataaattgatattgcagtggaccaatcacgtgatcatggatggtag

SEQ ID NO: 1515 - DNA, 130 bp, Synthetic construct
  source 1..130: mol_type = other DNA
ctgttgatacaaccataaaatgataattagatttaggagttgatttaatcaactttacacccataaattgataattatcacacccataaattgatattgcgtggaccaatcacgtgatcatggatggtag

SEQ ID NO: 1516 - DNA, 130 bp, Synthetic construct
  source 1..130: mol_type = other DNA
ctgttgatacaaccataaaatgataattagatttaggagttgatttaatcaactttagcacccataaattgataattatcacacccataaattgatattgctggaccaatcacgtgatcatggatggtag

SEQ ID NO: 1517 - DNA, 130 bp, Synthetic construct
  source 1..130: mol_type = other DNA
ctgttgatacaaccataaaatgataattagatttaggagttgatttaatcaactttagtcacccataaattgataattatcacacccataaattgatattgcggaccaatcacgtgatcatggatggtag

SEQ ID NO: 1518 - DNA, 130 bp, Synthetic construct
  source 1..130: mol_type = other DNA
ctgttgatacaaccataaaatgataattagatttaggagttgatttaatcaactttagtgcacccataaattgataattatcacacccataaattgatattgcgaccaatcacgtgatcatggatggtag

SEQ ID NO: 1519 - DNA, 130 bp, Synthetic construct
  source 1..130: mol_type = other DNA
ctgttgatacaaccataaaatgataattagatttaggagttgatttaatcaactttagtggcacccataaattgataattatcacacccataaattgatattgcaccaatcacgtgatcatggatggtag

SEQ ID NO: 1520 - DNA, 130 bp, Synthetic construct
  source 1..130: mol_type = other DNA
ctgttgatacaaccataaaatgataattagatttaggagttgatttaatcaactttagtggacacccataaattgataattatcacacccataaattgatattgcccaatcacgtgatcatggatggtag

SEQ ID NO: 1521 - DNA, 130 bp, Synthetic construct
  source 1..130: mol_type = other DNA
ctgttgatacaaccataaaatgataattagatttaggagttgatttaatcaactttagtggaccacccataaattgataattatcacacccataaattgatattgccaatcacgtgatcatggatggtag

SEQ ID NO: 1522 - DNA, 27 bp, Synthetic construct
  source 1..27: mol_type = other DNA
ccttctagactgctgacatactcgatt

SEQ ID NO: 1523 - DNA, 27 bp, Synthetic construct
  source 1..27: mol_type = other DNA
ctcggtacctgttgatgcaaccataaa

SEQ ID NO: 1524 - DNA, 130 bp, Synthetic construct
  source 1..130: mol_type = other DNA
tgttgatgcaaccataaagtgatatttaataattatttataatcagcaacttaaccacaaaacaaccatatattgatatctcacaaaacaaccataagttgatatttttgtgaatcgagtatgtcagcag

SEQ ID NO: 1525 - DNA, 130 bp, Synthetic construct
  source 1..130: mol_type = other DNA
tgttgatgcaaccataaagtgatatttataattatttataatcagcaacttaaccacaaaacaaccatatattgatatctcacaaaacaaccataagttgatattttatgtgaatcgagtatgtcagcag

SEQ ID NO: 1526 - DNA, 130 bp, Synthetic construct
  source 1..130: mol_type = other DNA
tgttgatgcaaccataaagtgatatttaaattatttataatcagcaacttaaccacaaaacaaccatatattgatatctcacaaaacaaccataagttgatattttcatgtgaatcgagtatgtcagcag

SEQ ID NO: 1527 - DNA, 130 bp, Synthetic construct
  source 1..130: mol_type = other DNA
tgttgatgcaaccataaagtgatatttaattatttataatcagcaacttaaccacaaaacaaccatatattgatatctcacaaaacaaccataagttgatatttttcatgtgaatcgagtatgtcagcag

SEQ ID NO: 1528 - DNA, 130 bp, Synthetic construct
  source 1..130: mol_type = other DNA
tgttgatgcaaccataaagtgatatttattatttataatcagcaacttaaccacaaaacaaccatatattgatatctcacaaaacaaccataagttgatattttatcatgtgaatcgagtatgtcagcag

SEQ ID NO: 1529 - DNA, 130 bp, Synthetic construct
  source 1..130: mol_type = other DNA
tgttgatgcaaccataaagtgatatttatatttataatcagcaacttaaccacaaaacaaccatatattgatatctcacaaaacaaccataagttgatattttaatcatgtgaatcgagtatgtcagcag

SEQ ID NO: 1530 - DNA, 130 bp, Synthetic construct
  source 1..130: mol_type = other DNA
tgttgatgcaaccataaagtgatatttaatttataatcagcaacttaaccacaaaacaaccatatattgatatctcacaaaacaaccataagttgatattttcaatcatgtgaatcgagtatgtcagcag

SEQ ID NO: 1531 - DNA, 130 bp, Synthetic construct
  source 1..130: mol_type = other DNA
tgttgatgcaaccataaagtgatatttatttataatcagcaacttaaccacaaaacaaccatatattgatatctcacaaaacaaccataagttgatattttccaatcatgtgaatcgagtatgtcagcag

SEQ ID NO: 1532 - DNA, 130 bp, Synthetic construct
  source 1..130: mol_type = other DNA
tgttgatgcaaccataaagtgatatttattataatcagcaacttaaccacaaaacaaccatatattgatatctcacaaaacaaccataagttgatattttaccaatcatgtgaatcgagtatgtcagcag

SEQ ID NO: 1533 - DNA, 130 bp, Synthetic construct
  source 1..130: mol_type = other DNA
tgttgatgcaaccataaagtgatatttatataatcagcaacttaaccacaaaacaaccatatattgatatctcacaaaacaaccataagttgatattttgaccaatcatgtgaatcgagtatgtcagcag

SEQ ID NO: 1534 - DNA, 130 bp, Synthetic construct
  source 1..130: mol_type = other DNA
tgttgatgcaaccataaagtgatatttaataatcagcaacttaaccacaaaacaaccatatattgatatctcacaaaacaaccataagttgatattttggaccaatcatgtgaatcgagtatgtcagcag

SEQ ID NO: 1535 - DNA, 130 bp, Synthetic construct
  source 1..130: mol_type = other DNA
tgttgatgcaaccataaagtgatatttataatcagcaacttaaccacaaaacaaccatatattgatatctcacaaaacaaccataagttgatatttttggaccaatcatgtgaatcgagtatgtcagcag

SEQ ID NO: 1536 - DNA, 130 bp, Synthetic construct
  source 1..130: mol_type = other DNA
tgttgatgcaaccataaagtgatatttaaatcagcaacttaaccacaaaacaaccatatattgatatctcacaaaacaaccataagttgatattttgtggaccaatcatgtgaatcgagtatgtcagcag

SEQ ID NO: 1537 - DNA, 130 bp, Synthetic construct
  source 1..130: mol_type = other DNA
tgttgatgcaaccataaagtgatatttaatcagcaacttaaccacaaaacaaccatatattgatatctcacaaaacaaccataagttgatattttagtggaccaatcatgtgaatcgagtatgtcagcag

SEQ ID NO: 1538 - DNA, 130 bp, Synthetic construct
  source 1..130: mol_type = other DNA
tgttgatgcaaccataaagtgatatttatcagcaacttaaccacaaaacaaccatatattgatatctcacaaaacaaccataagttgatatttttagtggaccaatcatgtgaatcgagtatgtcagcag

SEQ ID NO: 1539 - DNA, 130 bp, Synthetic construct
  source 1..130: mol_type = other DNA
tgttgatgcaaccataaagtgatatttacagcaacttaaccacaaaacaaccatatattgatatctcacaaaacaaccataagttgatattttttagtggaccaatcatgtgaatcgagtatgtcagcag

SEQ ID NO: 1540 - DNA, 130 bp, Synthetic construct
  source 1..130: mol_type = other DNA
tgttgatgcaaccataaagtgatatttaagcaacttaaccacaaaacaaccatatattgatatctcacaaaacaaccataagttgatatttttttagtggaccaatcatgtgaatcgagtatgtcagcag

SEQ ID NO: 1541 - DNA, 130 bp, Synthetic construct
  source 1..130: mol_type = other DNA
tgttgatgcaaccataaagtgatatttagcaacttaaccacaaaacaaccatatattgatatctcacaaaacaaccataagttgatattttctttagtggaccaatcatgtgaatcgagtatgtcagcag

SEQ ID NO: 1542 - DNA, 130 bp, Synthetic construct
  source 1..130: mol_type = other DNA
tgttgatgcaaccataaagtgatatttacaacttaaccacaaaacaaccatatattgatatctcacaaaacaaccataagttgatattttactttagtggaccaatcatgtgaatcgagtatgtcagcag

SEQ ID NO: 1543 - DNA, 130 bp, Synthetic construct
  source 1..130: mol_type = other DNA
tgttgatgcaaccataaagtgatatttaaacttaaccacaaaacaaccatatattgatatctcacaaaacaaccataagttgatattttaactttagtggaccaatcatgtgaatcgagtatgtcagcag

SEQ ID NO: 1544 - DNA, 130 bp, Synthetic construct
  source 1..130: mol_type = other DNA
tgttgatgcaaccataaagtgatatttaacttaaccacaaaacaaccatatattgatatctcacaaaacaaccataagttgatattttcaactttagtggaccaatcatgtgaatcgagtatgtcagcag

SEQ ID NO: 1545 - DNA, 130 bp, Synthetic construct
  source 1..130: mol_type = other DNA
tgttgatgcaaccataaagtgatatttacttaaccacaaaacaaccatatattgatatctcacaaaacaaccataagttgatatttttcaactttagtggaccaatcatgtgaatcgagtatgtcagcag

SEQ ID NO: 1546 - DNA, 130 bp, Synthetic construct
  source 1..130: mol_type = other DNA
tgttgatgcaaccataaagtgatatttattaaccacaaaacaaccatatattgatatctcacaaaacaaccataagttgatattttatcaactttagtggaccaatcatgtgaatcgagtatgtcagcag

SEQ ID NO: 1547 - DNA, 130 bp, Synthetic construct
  source 1..130: mol_type = other DNA
tgttgatgcaaccataaagtgatatttataaccacaaaacaaccatatattgatatctcacaaaacaaccataagttgatattttaatcaactttagtggaccaatcatgtgaatcgagtatgtcagcag

SEQ ID NO: 1548 - DNA, 130 bp, Synthetic construct
  source 1..130: mol_type = other DNA
tgttgatgcaaccataaagtgatatttaaaccacaaaacaaccatatattgatatctcacaaaacaaccataagttgatatttttaatcaactttagtggaccaatcatgtgaatcgagtatgtcagcag

SEQ ID NO: 1549 - DNA, 130 bp, Synthetic construct
  source 1..130: mol_type = other DNA
tgttgatgcaaccataaagtgatatttaaccacaaaacaaccatatattgatatctcacaaaacaaccataagttgatattttttaatcaactttagtggaccaatcatgtgaatcgagtatgtcagcag

SEQ ID NO: 1550 - DNA, 130 bp, Synthetic construct
  source 1..130: mol_type = other DNA
tgttgatgcaaccataaagtgatatttaccacaaaacaaccatatattgatatctcacaaaacaaccataagttgatatttttttaatcaactttagtggaccaatcatgtgaatcgagtatgtcagcag

SEQ ID NO: 1551 - DNA, 130 bp, Synthetic construct
  source 1..130: mol_type = other DNA
tgttgatgcaaccataaagtgatatttacacaaaacaaccatatattgatatctcacaaaacaaccataagttgatattttatttaatcaactttagtggaccaatcatgtgaatcgagtatgtcagcag

SEQ ID NO: 1552 - DNA, 130 bp, Synthetic construct
  source 1..130: mol_type = other DNA
tgttgatgcaaccataaagtgatatttaacaaaacaaccatatattgatatctcacaaaacaaccataagttgatattttgatttaatcaactttagtggaccaatcatgtgaatcgagtatgtcagcag

SEQ ID NO: 1553 - DNA, 130 bp, Synthetic construct
  source 1..130: mol_type = other DNA
tgttgatgcaaccataaagtgatatttacaaaacaaccatatattgatatctcacaaaacaaccataagttgatatttttgatttaatcaactttagtggaccaatcatgtgaatcgagtatgtcagcag

SEQ ID NO: 1554 - DNA, 130 bp, Synthetic construct
  source 1..130: mol_type = other DNA
tgttgatgcaaccataaagtgatatttaaaaacaaccatatattgatatctcacaaaacaaccataagttgatattttttgatttaatcaactttagtggaccaatcatgtgaatcgagtatgtcagcag

SEQ ID NO: 1555 - DNA, 130 bp, Synthetic construct
  source 1..130: mol_type = other DNA
tgttgatgcaaccataaagtgatatttaaaacaaccatatattgatatctcacaaaacaaccataagttgatattttgttgatttaatcaactttagtggaccaatcatgtgaatcgagtatgtcagcag

SEQ ID NO: 1556 - DNA, 130 bp, Synthetic construct
  source 1..130: mol_type = other DNA
tgttgatgcaaccataaagtgatatttaaacaaccatatattgatatctcacaaaacaaccataagttgatattttagttgatttaatcaactttagtggaccaatcatgtgaatcgagtatgtcagcag

SEQ ID NO: 1557 - DNA, 130 bp, Synthetic construct
  source 1..130: mol_type = other DNA
tgttgatgcaaccataaagtgatatttaacaaccatatattgatatctcacaaaacaaccataagttgatattttgagttgatttaatcaactttagtggaccaatcatgtgaatcgagtatgtcagcag

SEQ ID NO: 1558 - DNA, 130 bp, Synthetic construct
  source 1..130: mol_type = other DNA
tgttgatgcaaccataaagtgatatttacaaccatatattgatatctcacaaaacaaccataagttgatattttggagttgatttaatcaactttagtggaccaatcatgtgaatcgagtatgtcagcag

SEQ ID NO: 1559 - DNA, 130 bp, Synthetic construct; identical to SEQ ID NO: 1524
  source 1..130: mol_type = other DNA

SEQ ID NO: 1560 - DNA, 130 bp, Synthetic construct
  source 1..130: mol_type = other DNA
tgttgatgcaaccataaagtgatatttaataattatttataatcagcaacttaaccacaaaacaaccatatattgatatctcacaaacaaccataagttgatattttatgtgaatcgagtatgtcagcag

SEQ ID NO: 1561 - DNA, 130 bp, Synthetic construct
  source 1..130: mol_type = other DNA
tgttgatgcaaccataaagtgatatttaataattatttataatcagcaacttaaccacaaaacaaccatatattgatatctcacaacaaccataagttgatattttcatgtgaatcgagtatgtcagcag

SEQ ID NO: 1562 - DNA, 130 bp, Synthetic construct
  source 1..130: mol_type = other DNA
tgttgatgcaaccataaagtgatatttaataattatttataatcagcaacttaaccacaaaacaaccatatattgatatctcacacaaccataagttgatatttttcatgtgaatcgagtatgtcagcag

SEQ ID NO: 1563 - DNA, 130 bp, Synthetic construct
  source 1..130: mol_type = other DNA
tgttgatgcaaccataaagtgatatttaataattatttataatcagcaacttaaccacaaaacaaccatatattgatatctcaccaaccataagttgatattttatcatgtgaatcgagtatgtcagcag

SEQ ID NO: 1564 - DNA, 130 bp, Synthetic construct
  source 1..130: mol_type = other DNA
tgttgatgcaaccataaagtgatatttaataattatttataatcagcaacttaaccacaaaacaaccatatattgatatctcacaaccataagttgatattttaatcatgtgaatcgagtatgtcagcag

SEQ ID NO: 1565 - DNA, 130 bp, Synthetic construct
  source 1..130: mol_type = other DNA
tgttgatgcaaccataaagtgatatttaataattatttataatcagcaacttaaccacaaaacaaccatatattgatatctccaaccataagttgatattttcaatcatgtgaatcgagtatgtcagcag

SEQ ID NO: 1566 - DNA, 130 bp, Synthetic construct; identical to SEQ ID NO: 1524
  source 1..130: mol_type = other DNA

SEQ ID NO: 1567 - DNA, 130 bp, Synthetic construct
  source 1..130: mol_type = other DNA
tgttgatgcaaccataaagtgatatttataaattatttataatcagcaacttaaccacaaaacaaccatatattgatatctcacaaaacaaccataagttgatatttttgtgaatcgagtatgtcagcag

SEQ ID NO: 1568 - DNA, 130 bp, Synthetic construct
  source 1..130: mol_type = other DNA
tgttgatgcaaccataaagtgatatttaatttttatttataatcagcaacttaaccacaaaacaaccatatattgatatctcacaaaacaaccataagttgatatttttgtgaatcgagtatgtcagcag

SEQ ID NO: 1569 - DNA, 130 bp, Synthetic construct
  source 1..130: mol_type = other DNA
tgttgatgcaaccataaagtgatatttaataaaaatttataatcagcaacttaaccacaaaacaaccatatattgatatctcacaaaacaaccataagttgatatttttgtgaatcgagtatgtcagcag

SEQ ID NO: 1570 - DNA, 130 bp, Synthetic construct
  source 1..130: mol_type = other DNA
tgttgatgcaaccataaagtgatatttaataatttattataatcagcaacttaaccacaaaacaaccatatattgatatctcacaaaacaaccataagttgatatttttgtgaatcgagtatgtcagcag

SEQ ID NO: 1571 - DNA, 130 bp, Synthetic construct
  source 1..130: mol_type = other DNA
tgttgatgcaaccataaagtgatatttaataattataaataatcagcaacttaaccacaaaacaaccatatattgatatctcacaaaacaaccataagttgatatttttgtgaatcgagtatgtcagcag

SEQ ID NO: 1572 - DNA, 130 bp, Synthetic construct
  source 1..130: mol_type = other DNA
tgttgatgcaaccataaagtgatatttaataattattttaaatcagcaacttaaccacaaaacaaccatatattgatatctcacaaaacaaccataagttgatatttttgtgaatcgagtatgtcagcag

SEQ ID NO: 1573 - DNA, 130 bp, Synthetic construct
  source 1..130: mol_type = other DNA
tgttgatgcaaccataaagtgatatttaataattatttattttcagcaacttaaccacaaaacaaccatatattgatatctcacaaaacaaccataagttgatatttttgtgaatcgagtatgtcagcag

SEQ ID NO: 1574 - DNA, 130 bp, Synthetic construct
  source 1..130: mol_type = other DNA
tgttgatgcaaccataaagtgatatttaataattatttataaagagcaacttaaccacaaaacaaccatatattgatatctcacaaaacaaccataagttgatatttttgtgaatcgagtatgtcagcag

SEQ ID NO: 1575 - DNA, 130 bp, Synthetic construct
  source 1..130: mol_type = other DNA
tgttgatgcaaccataaagtgatatttaataattatttataatctccaacttaaccacaaaacaaccatatattgatatctcacaaaacaaccataagttgatatttttgtgaatcgagtatgtcagcag

SEQ ID NO: 1576 - DNA, 130 bp, Synthetic construct
  source 1..130: mol_type = other DNA
tgttgatgcaaccataaagtgatatttaataattatttataatcaggtacttaaccacaaaacaaccatatattgatatctcacaaaacaaccataagttgatatttttgtgaatcgagtatgtcagcag

SEQ ID NO: 1577 - DNA, 130 bp, Synthetic construct
  source 1..130: mol_type = other DNA
tgttgatgcaaccataaagtgatatttaataattatttataatcagcatgttaaccacaaaacaaccatatattgatatctcacaaaacaaccataagttgatatttttgtgaatcgagtatgtcagcag

SEQ ID NO: 1578 - DNA, 130 bp, Synthetic construct
  source 1..130: mol_type = other DNA
tgttgatgcaaccataaagtgatatttaataattatttataatcagcaacaaaaccacaaaacaaccatatattgatatctcacaaaacaaccataagttgatatttttgtgaatcgagtatgtcagcag

SEQ ID NO: 1579 - DNA, 130 bp, Synthetic construct
  source 1..130: mol_type = other DNA
tgttgatgcaaccataaagtgatatttaataattatttataatcagcaacttttccacaaaacaaccatatattgatatctcacaaaacaaccataagttgatatttttgtgaatcgagtatgtcagcag

SEQ ID NO: 1580 - DNA, 130 bp, Synthetic construct
  source 1..130: mol_type = other DNA
tgttgatgcaaccataaagtgatatttaataattatttataatcagcaacttaaggacaaaacaaccatatattgatatctcacaaaacaaccataagttgatatttttgtgaatcgagtatgtcagcag

SEQ ID NO: 1581 - DNA, 130 bp, Synthetic construct
  source 1..130: mol_type = other DNA
tgttgatgcaaccataaagtgatatttaataattatttataatcagcaacttaacctgaaaacaaccatatattgatatctcacaaaacaaccataagttgatatttttgtgaatcgagtatgtcagcag

SEQ ID NO: 1582 - DNA, 130 bp, Synthetic construct
  source 1..130: mol_type = other DNA
tgttgatgcaaccataaagtgatatttaataattatttataatcagcaacttaaccacttaacaaccatatattgatatctcacaaaacaaccataagttgatatttttgtgaatcgagtatgtcagcag

SEQ ID NO: 1583 - DNA, 130 bp, Synthetic construct
  source 1..130: mol_type = other DNA
tgttgatgcaaccataaagtgatatttagcaattatttataatcagcaacttaaccacaaaacaaccatatattgatatctcacaaaacaaccataagttgatatttttgtgaatcgagtatgtcagcag

SEQ ID NO: 1584 - DNA, 130 bp, Synthetic construct
  source 1..130: mol_type = other DNA
tgttgatgcaaccataaagtgatatttaatggttatttataatcagcaacttaaccacaaaacaaccatatattgatatctcacaaaacaaccataagttgatatttttgtgaatcgagtatgtcagcag

SEQ ID NO: 1585 - DNA, 130 bp, Synthetic construct
  source 1..130: mol_type = other DNA
tgttgatgcaaccataaagtgatatttaataaccatttataatcagcaacttaaccacaaaacaaccatatattgatatctcacaaaacaaccataagttgatatttttgtgaatcgagtatgtcagcag

SEQ ID NO: 1586 - DNA, 130 bp, Synthetic construct
  source 1..130: mol_type = other DNA
tgttgatgcaaccataaagtgatatttaataattgcttataatcagcaacttaaccacaaaacaaccatatattgatatctcacaaaacaaccataagttgatatttttgtgaatcgagtatgtcagcag

SEQ ID NO: 1587 - DNA, 130 bp, Synthetic construct
  source 1..130: mol_type = other DNA
tgttgatgcaaccataaagtgatatttaataattatccataatcagcaacttaaccacaaaacaaccatatattgatatctcacaaaacaaccataagttgatatttttgtgaatcgagtatgtcagcag

SEQ ID NO: 1588 - DNA, 130 bp, Synthetic construct
  source 1..130: mol_type = other DNA
tgttgatgcaaccataaagtgatatttaataattatttgcaatcagcaacttaaccacaaaacaaccatatattgatatctcacaaaacaaccataagttgatatttttgtgaatcgagtatgtcagcag

SEQ ID NO: 1589 - DNA, 130 bp, Synthetic construct
  source 1..130: mol_type = other DNA
tgttgatgcaaccataaagtgatatttaataattatttatggtcagcaacttaaccacaaaacaaccatatattgatatctcacaaaacaaccataagttgatatttttgtgaatcgagtatgtcagcag

SEQ ID NO: 1590 - DNA, 130 bp, Synthetic construct
  source 1..130: mol_type = other DNA
tgttgatgcaaccataaagtgatatttaataattatttataactagcaacttaaccacaaaacaaccatatattgatatctcacaaaacaaccataagttgatatttttgtgaatcgagtatgtcagcag

SEQ ID NO: 1591 - DNA, 130 bp, Synthetic construct
  source 1..130: mol_type = other DNA
tgttgatgcaaccataaagtgatatttaataattatttataatcgacaacttaaccacaaaacaaccatatattgatatctcacaaaacaaccataagttgatatttttgtgaatcgagtatgtcagcag

SEQ ID NO: 1592 - DNA, 130 bp, Synthetic construct
  source 1..130: mol_type = other DNA
tgttgatgcaaccataaagtgatatttaataattatttataatcagtgacttaaccacaaaacaaccatatattgatatctcacaaaacaaccataagttgatatttttgtgaatcgagtatgtcagcag

SEQ ID NO: 1593 - DNA, 130 bp, Synthetic construct
  source 1..130: mol_type = other DNA
tgttgatgcaaccataaagtgatatttaataattatttataatcagcagtttaaccacaaaacaaccatatattgatatctcacaaaacaaccataagttgatatttttgtgaatcgagtatgtcagcag

SEQ ID NO: 1594 - DNA, 130 bp, Synthetic construct
  source 1..130: mol_type = other DNA
tgttgatgcaaccataaagtgatatttaataattatttataatcagcaacccaaccacaaaacaaccatatattgatatctcacaaaacaaccataagttgatatttttgtgaatcgagtatgtcagcag

SEQ ID NO: 1595 - DNA, 130 bp, Synthetic construct
  source 1..130: mol_type = other DNA
tgttgatgcaaccataaagtgatatttaataattatttataatcagcaacttggccacaaaacaaccatatattgatatctcacaaaacaaccataagttgatatttttgtgaatcgagtatgtcagcag

SEQ ID NO: 1596 - DNA, 130 bp, Synthetic construct
  source 1..130: mol_type = other DNA
tgttgatgcaaccataaagtgatatttaataattatttataatcagcaacttaattacaaaacaaccatatattgatatctcacaaaacaaccataagttgatatttttgtgaatcgagtatgtcagcag

SEQ ID NO: 1597 - DNA, 130 bp, Synthetic construct
  source 1..130: mol_type = other DNA
tgttgatgcaaccataaagtgatatttaataattatttataatcagcaacttaaccgtaaaacaaccatatattgatatctcacaaaacaaccataagttgatatttttgtgaatcgagtatgtcagcag

SEQ ID NO: 1598 - DNA, 130 bp, Synthetic construct
  source 1..130: mol_type = other DNA
tgttgatgcaaccataaagtgatatttaataattatttataatcagcaacttaaccacggaacaaccatatattgatatctcacaaaacaaccataagttgatatttttgtgaatcgagtatgtcagcag

SEQ ID NO: 1599 - DNA, 130 bp, Synthetic construct; identical to SEQ ID NO: 1598
  source 1..130: mol_type = other DNA

SEQ ID NO: 1600 - DNA, 130 bp, Synthetic construct
  source 1..130: mol_type = other DNA
tgttgatgcaaccataaagtgatatttaataattatttataatcagcaacttaaccacaaaacaaccatatattgatatctctcaaaacaaccataagttgatatttttgtgaatcgagtatgtcagcag

SEQ ID NO: 1601 - DNA, 130 bp, Synthetic construct
  source 1..130: mol_type = other DNA
tgttgatgcaaccataaagtgatatttaataattatttataatcagcaacttaaccacaaaacaaccatatattgatatctcagaaaacaaccataagttgatatttttgtgaatcgagtatgtcagcag

SEQ ID NO: 1602 - DNA, 130 bp, Synthetic construct
  source 1..130: mol_type = other DNA
tgttgatgcaaccataaagtgatatttaataattatttataatcagcaacttaaccacaaaacaaccatatattgatatctcactaaacaaccataagttgatatttttgtgaatcgagtatgtcagcag

SEQ ID NO: 1603 - DNA, 130 bp, Synthetic construct
  source 1..130: mol_type = other DNA
tgttgatgcaaccataaagtgatatttaataattatttataatcagcaacttaaccacaaaacaaccatatattgatatctcacataacaaccataagttgatatttttgtgaatcgagtatgtcagcag

SEQ ID NO: 1604 - DNA, 130 bp, Synthetic construct
  source 1..130: mol_type = other DNA
tgttgatgcaaccataaagtgatatttaataattatttataatcagcaacttaaccacaaaacaaccatatattgatatctcacaatacaaccataagttgatatttttgtgaatcgagtatgtcagcag

SEQ ID NO: 1605 - DNA, 130 bp, Synthetic construct
  source 1..130: mol_type = other DNA
tgttgatgcaaccataaagtgatatttaataattatttataatcagcaacttaaccacaaaacaaccatatattgatatctcacaaatcaaccataagttgatatttttgtgaatcgagtatgtcagcag

SEQ ID NO: 1606 - DNA, 130 bp, Synthetic construct
  source 1..130: mol_type = other DNA
tgttgatgcaaccataaagtgatatttaataattatttataatcagcaacttaaccacaaaacaaccatatattgatatctcgcaaaacaaccataagttgatatttttgtgaatcgagtatgtcagcag

SEQ ID NO: 1607 - DNA, 130 bp, Synthetic construct
  source 1..130: mol_type = other DNA
tgttgatgcaaccataaagtgatatttaataattatttataatcagcaacttaaccacaaaacaaccatatattgatatctcataaaacaaccataagttgatatttttgtgaatcgagtatgtcagcag

SEQ ID NO: 1608 - DNA, 130 bp, Synthetic construct
  source 1..130: mol_type = other DNA
tgttgatgcaaccataaagtgatatttaataattatttataatcagcaacttaaccacaaaacaaccatatattgatatctcacgaaacaaccataagttgatatttttgtgaatcgagtatgtcagcag

SEQ ID NO: 1609 - DNA, 130 bp, Synthetic construct
  source 1..130: mol_type = other DNA
tgttgatgcaaccataaagtgatatttaataattatttataatcagcaacttaaccacaaaacaaccatatattgatatctcacagaacaaccataagttgatatttttgtgaatcgagtatgtcagcag

SEQ ID NO: 1610 - DNA, 130 bp, Synthetic construct
  source 1..130: mol_type = other DNA
tgttgatgcaaccataaagtgatatttaataattatttataatcagcaacttaaccacaaaacaaccatatattgatatctcacaagacaaccataagttgatatttttgtgaatcgagtatgtcagcag

SEQ ID NO: 1611 - DNA, 130 bp, Synthetic construct
  source 1..130: mol_type = other DNA
tgttgatgcaaccataaagtgatatttaataattatttataatcagcaacttaaccacaaaacaaccatatattgatatctcacaaagcaaccataagttgatatttttgtgaatcgagtatgtcagcag

SEQ ID NO: 1612 - DNA, 1940 bp, Synthetic construct
  source 1..1940: mol_type = other DNA
ctgtcagaccaagtttactcatatatactttagattgatttaaaacttcatttttaatttaaaaggatctaggtgaagatcctttttgataatctcatgaccaaaatcccttaacgtgagttttcgttccactgagcgtcagaccccgtagaaaagatcaaaggatcttcttgagatcctttttttctgcgcgtaatctgctgcttgcaaacaaaaaaaccaccgctaccagcggtggtttgtttgccggatcaagagctaccaactctttttccgaaggtaactggcttcagcagagcgcagataccaaatactgttcttctagtgtagccgtagttaggccaccacttcaagaactctgtagcaccgcctacatacctcgctctgctaatcctgttaccagtggctgctgccagtggcgataagtcgtgtcttaccgggttggactcaagacgatagttaccggataaggcgcagcggtcgggctgaacggggggttcgtgcacacagcccagcttggagcgaacgacctacaccgaactgagatacctacagcgtgagctatgagaaagcgccacgcttcccgaagggagaaaggcggacaggtatccggtaagcggcagggtcggaacaggagagcgcacgagggagcttccagggggaaacgcctggtatctttatagtcctgtcgggtttcgccacctctgacttgagcgtcgatttttgtgatgctcgtcaggggggcggagcctatggaaaaacgccagcaacgcggcctttttacggttcctggccttttgctggccttttgctcacatgttctttcctgcgttatcccctgattctgtggataaccgtattaccgcctttgagtgagctgataccaccggtagacctaggtccaagctcgttccgttattaggattaagctggaagagccttagacgtcaggtggcacttttcggggaaatgtgcgcggaacccctatttgtttatttttctaaatacattcaaatatgtatccgctcatgagacaataaccctgataaatgcttcaataatattgaaaaaggaagagtatgagtattcaacatttccgtgtcgcccttattcccttttttgcggcattttgccttcctgtttttgctcacccagaaacgctggtgaaagtaaaagatgctgaagatcagttgggtgcacgagtgggttacatcgaactggatctcaacagcggtaagatccttgagagttttcgccccgaagaacgttttccaatgatgagcacttttaaagttctgctatgtggcgcggtattatcccgtattgacgccgggcaagagcaactcggtcgccgcatacactattctcagaatgacttggttgagtactcaccagtcacagaaaagcatcttacggatggcatgacagtaagagaattatgcagtgctgccataaccatgagtgataacactgcggccaacttacttctgacaacgatcggaggaccgaaggagctaaccgcttttttgcacaacatgggggatcatgtaactcgccttgatcgttgggaaccggagctgaatgaagccataccaaacgacgagcgtgacaccacgatgcctgtagcaatggcaacaacgttgcgcaaactattaactggcgaactacttactctagcttcccggcaacaattaatagactggatggaggcggataaagttgcaggaccacttctgcgctcggcccttccggctggctggtttattgctgataaatctggagccggtgagcgtgggtctcgcggtatcattgcagcactggggccagatggtaagccctcccgtatcgtagttatctacacgacggggagtcaggcaactatggatgaacgaaatagacagatcgctgagataggtgcctcactgattaagcattggtaa

SEQ ID NO: 1613 - DNA, 3455 bp, Synthetic construct
  source 1..3455: mol_type = other DNA
gtttactcatatatactttagattgatttaaaacttcatttttaatttaaaaggatctaggtgaagatcctttttgataatctcatgaccaaaatcccttaacgtgagttttcgttccactgagcgtcagaccccgtagaaaagatcaaaggatcttcttgagatcctttttttctgcgcgtaatctgctgcttgcaaacaaaaaaaccaccgctaccagcggtggtttgtttgccggatcaagagctaccaactctttttccgaaggtaactggcttcagcagagcgcagataccaaatactgttcttctagtgtagccgtagttaggccaccacttcaagaactctgtagcaccgcctacatacctcgctctgctaatcctgttaccagtggctgctgccagtggcgataagtcgtgtcttaccgggttggactcaagacgatagttaccggataaggcgcagcggtcgggctgaacggggggttcgtgcacacagcccagcttggagcgaacgacctacaccgaactgagatacctacagcgtgagctatgagaaagcgccacgcttcccgaagggagaaaggcggacaggtatccggtaagcggcagggtcggaacaggagagcgcacgagggagcttccagggggaaacgcctggtatctttatagtcctgtcgggtttcgccacctctgacttgagcgtcgatttttgtgatgctcgtcaggggggcggagcctatggaaaaacgccagcaacgcggcctttttacggttcctggccttttgctggccttttgctcacatgttctttcctgcgttatcccctgattctgtggataaccgtattaccgcctttgagtgagctgataccgctcgccgcagccgaacgaccgagcgcagcgagtcagtgagcgaggaagcggaagagcgcccaatacgcaaaccgcctctccccgcgcgttggccgattcattaatgcagcccaagctttgttgatacaaccataaaatgataattacacccataaattgataattatcacacccataaattgatattgcctcttcatggtctaaacttcagtaagtttacgacattttcatgaagaggtcatttccggggatccatggagaaaaaaatcactggatataccaccgttgatatatcccaatggcatcgtaaagaacattttgaggcatttcagtcagttgctcaatgtacctataaccagaccgttcagctggatattacggcctttttaaagaccgtaaagaaaaataagcacaagttttatccggcctttattcacattcttgcccgcctgatgaatgctcatccggagttccgtatggcaatgaaagacggtgagctggtgatatgggatagtgttcacccttgttacaccgttttccatgagcaaactgaaacgttttcatcgctctggagtgaataccacgacgatttccggcagtttctacacatatattcgcaagatgtggcgtgttacggtgaaaacctggcctatttccctaaagggtttattgagaatatgtttttcgtctcagccaatccctgggtgagtttcaccagttttgatttaaacgtggccaatatggacaacttcttcgcccccgttttcactatgggcaaatattatacgcaaggcgacaaggtgctgatgccgctggcgattcaggttcatcatgccgtttgtgatggcttccatgtcggcagaatgcttaatgaattacaacagtactgcgatgagtggcagggcggggcgtaatttttttaaggcagttattggtgcccttctagagtccttactgcagtagttttgctgaaatactcgattcacaaaaatatcaacttatggttgttttgtgagatatcaatatatggttgttttgtggttaagttgctgattataaataattattaaatatcactttatggttgcatcaacaggtaccgagctcgaattcactggccgtcgttttacaacgtcgtgactgggaaaaccctggcgttacccaacttaatcgccttgcagcacatccccctttcgccagctggcgtaatagcgaagaggcccgcaccgatcgcccttcccaacagttgcgcagcctgaatggcgaatggcgcctgatgcggtattttctccttacgcatctgtgcggtatttcacaccgcatatggtgcactctcagtacaatctgctctgatgccgcatagttaagccagccccgacacccgccaacacccgctgacgcgccctgacgggcttgtctgctcccggcatccgcttacagacaagctgtgaccgtctccgggagctgcatgtgtcagaggttttcaccgtcatcaccgaaacgcgcgagacgaaagggcctcgtgatacgcctatttttataggttaatgtcatgataataatggtttcttagacgtcaggtggcacttttcggggaaatgtgcgcggaacccctatttgtttatttttctaaatacattcaaatatgtatccgctcatgagacaataaccctgataaatgcttcaataatattgaaaaaggaagagtatgagtattcaacatttccgtgtcgcccttattcccttttttgcggcattttgccttcctgtttttgctcacccagaaacgctggtgaaagtaaaagatgctgaagatcagttgggtgcacgagtgggttacatcgaactggatctcaacagcggtaagatccttgagagttttcgccccgaagaacgttttccaatgatgagcacttttaaagttctgctatgtggcgcggtattatcccgtattgacgccgggcaagagcaactcggtcgccgcatacactattctcagaatgacttggttgagtactcaccagtcacagaaaagcatcttacggatggcatgacagtaagagaattatgcagtgctgccataaccatgagtgataacactgcggccaacttacttctgacaacgatcggaggaccgaaggagctaaccgcttttttgcacaacatgggggatcatgtaactcgccttgatcgttgggaaccggagctgaatgaagccataccaaacgacgagcgtgacaccacgatgcctgtagcaatggcaacaacgttgcgcaaactattaactggcgaactacttactctagcttcccggcaacaattaatagactggatggaggcggataaagttgcaggaccacttctgcgctcggcccttccggctggctggtttattgctgataaatctggagccggtgagcgtgggtctcgcggtatcattgcagcactggggccagatggtaagccctcccgtatcgtagttatctacacgacggggagtcaggcaactatggatgaacgaaatagacagatcgctgagataggtgcctcactgattaagcattggtaactgtcagaccaa

SEQ ID NO: 1614 - DNA, 2930 bp, Synthetic construct
  source 1..2930: mol_type = other DNA
attgcagcactggggccagatggtaagccctcccgtatcgtagttatctacacgacggggagtcaggcaactatggatgaacgaaatagacagatcgctgagataggtgcctcactgattaagcattggtaactgtcagaccaagtttactcatatatactttagattgatttaaaacttcatttttaatttaaaaggatctaggtgaagatcctttttgataatctcatgaccaaaatcccttaacgtgagttttcgttccactgagcgtcagaccccgtagaaaagatcaaaggatcttcttgagatcctttttttctgcgcgtaatctgctgcttgcaaacaaaaaaaccaccgctaccagcggtggtttgtttgccggatcaagagctaccaactctttttccgaaggtaactggcttcagcagagcgcagataccaaatactgttcttctagtgtagccgtagttaggccaccacttcaagaactctgtagcaccgcctacatacctcgctctgctaatcctgttaccagtggctgctgccagtggcgataagtcgtgtcttaccgggttggactcaagacgatagttaccggataaggcgcagcggtcgggctgaacggggggttcgtgcacacagcccagcttggagcgaacgacctacaccgaactgagatacctacagcgtgagctatgagaaagcgccacgcttcccgaagggagaaaggcggacaggtatccggtaagcggcagggtcggaacaggagagcgcacgagggagcttccagggggaaacgcctggtatctttatagtcctgtcgggtttcgccacctctgacttgagcgtcgatttttgtgatgctcgtcaggggggcggagcctatggaaaaacgccagcaacgcggcctttttacggttcctggccttttgctggccttttgctcacatgttctttcctgcgttatcccctgattctgtggataaccgtattaccgcctttgagtgagctgataccaccggtcaagctttgttgatacaaccataaaatgataattacacccataaattgataattatcacacccataaattgatattgcctcttcatggtctaaacttcagtaagtttacgacattttcatgaagaggtcatttcaggaggtaaataatggagaaaaaaatcactggatataccaccgttgatatatcccaatggcatcgtaaagaacattttgaggcatttcagtcagttgctcaatgtacctataaccagaccgttcagctggatattacggcctttttaaagaccgtaaagaaaaataagcacaagttttatccggcctttattcacattcttgcccgcctgatgaatgctcatccggagttccgtatggcaatgaaagacggtgagctggtgatatgggatagtgttcacccttgttacaccgttttccatgagcaaactgaaacgttttcatcgctctggagtgaataccacgacgatttccggcagtttctacacatatattcgcaagatgtggcgtgttacggtgaaaacctggcctatttccctaaagggtttattgagaatatgtttttcgtctcagccaatccctgggtgagtttcaccagttttgatttaaacgtggccaatatggacaacttcttcgcccccgttttcactatgggcaaatattatacgcaaggcgacaaggtgctgatgccgctggcgattcaggttcatcatgccgtttgtgatggcttccatgtcggcagaatgcttaatgaattacaacagtactgcgatgagtggcagggcggggcgtaatttttttaaggcagttattggtgcccttctagagtccttactgcagtagttttgctgaaatactcgattcacaaaaatatcaacttatggttgttttgtgagatatcaatatatggttgttttgtggttaagttgctgattataaataattattaaatatcactttatggttgcatcaacaggtacccctaggtccaagctcgttccgttattaggattaagctggaagagccttagacgtcaggtggcacttttcggggaaatgtgcgcggaacccctatttgtttatttttctaaatacattcaaatatgtatccgctcatgagacaataaccctgataaatgcttcaataatattgaaaaaggaagagtatgagtattcaacatttccgtgtcgcccttattcccttttttgcggcattttgccttcctgtttttgctcacccagaaacgctggtgaaagtaaaagatgctgaagatcagttgggtgcacgagtgggttacatcgaactggatctcaacagcggtaagatccttgagagttttcgccccgaagaacgttttccaatgatgagcacttttaaagttctgctatgtggcgcggtattatcccgtattgacgccgggcaagagcaactcggtcgccgcatacactattctcagaatgacttggttgagtactcaccagtcacagaaaagcatcttacggatggcatgacagtaagagaattatgcagtgctgccataaccatgagtgataacactgcggccaacttacttctgacaacgatcggaggaccgaaggagctaaccgcttttttgcacaacatgggggatcatgtaactcgccttgatcgttgggaaccggagctgaatgaagccataccaaacgacgagcgtgacaccacgatgcctgtagcaatggcaacaacgttgcgcaaactattaactggcgaactacttactctagcttcccggcaacaattaatagactggatggaggcggataaagttgcaggaccacttctgcgctcggcccttccggctggctggtttattgctgataaatctggagccggtgagcgtgggtctcgcggtatc

SEQ ID NO: 1615 - DNA, 3229 bp, Synthetic construct
  source 1..3229: mol_type = other DNA
ctgtcagaccaagtttactcatatatactttagattgatttaaaacttcatttttaatttaaaaggatctaggtgaagatcctttttgataatctcatgaccaaaatcccttaacgtgagttttcgttccactgagcgtcagaccccgtagaaaagatcaaaggatcttcttgagatcctttttttctgcgcgtaatctgctgcttgcaaacaaaaaaaccaccgctaccagcggtggtttgtttgccggatcaagagctaccaactctttttccgaaggtaactggcttcagcagagcgcagataccaaatactgttcttctagtgtagccgtagttaggccaccacttcaagaactctgtagcaccgcctacatacctcgctctgctaatcctgttaccagtggctgctgccagtggcgataagtcgtgtcttaccgggttggactcaagacgatagttaccggataaggcgcagcggtcgggctgaacggggggttcgtgcacacagcccagcttggagcgaacgacctacaccgaactgagatacctacagcgtgagctatgagaaagcgccacgcttcccgaagggagaaaggcggacaggtatccggtaagcggcagggtcggaacaggagagcgcacgagggagcttccagggggaaacgcctggtatctttatagtcctgtcgggtttcgccacctctgacttgagcgtcgatttttgtgatgctcgtcaggggggcggagcctatggaaaaacgccagcaacgcggcctttttacggttcctggccttttgctggccttttgctcacatgttctttcctgcgttatcccctgattctgtggataaccgtattaccgcctttgagtgagctgataccgctcgccgcagccgaacgaccgagcgcagcgagtcagtgagcgaggaagcggaagagctaaaccttaaattaatcggaaaaattgttgaaacaaccataaagtgatatttacaaccatatattgatatttggtgcaaccataacttgatattgcctcttcatagtctagacttatgtaagtttacgacaaaatcgtgaagaggcaatattatgtctgctctaccttctccttctactaccaccctgattgcacttgaaagtgcatttgttactcctgctcgaaacttaactaagtcgcgtgggaaaaacatacaccgttacgtcagtgctaagaagaggcagtccctcttagaggatccatggagaaaaaaatcactggatataccaccgttgatatatcccaatggcatcgtaaagaacattttgaggcatttcagtcagttgctcaatgtacctataaccagaccgttcagctggatattacggcctttttaaagaccgtaaagaaaaataagcacaagttttatccggcctttattcacattcttgcccgcctgatgaatgctcatccggagttccgtatggcaatgaaagacggtgagctggtgatatgggatagtgttcacccttgttacaccgttttccatgagcaaactgaaacgttttcatcgctctggagtgaataccacgacgatttccggcagtttctacacatatattcgcaagatgtggcgtgttacggtgaaaacctggcctatttccctaaagggtttattgagaatatgtttttcgtctcagccaatccctgggtgagtttcaccagttttgatttaaacgtggccaatatggacaacttcttcgcccccgttttcactatgggcaaatattatacgcaaggcgacaaggtgctgatgccgctggcgattcaggttcatcatgccgtttgtgatggcttccatgtcggcagaatgcttaatgaattacaacagtactgcgatgagtggcagggcggggcgtaatttttttaaggcagttattggtgccctggtaccctgcccaagtcttatgaatgagtgtccgtgactgatgcaaggttatcggaactgtaatgattatatgttttctaattttgaagtggttcttttgatgagttttgccagttgctgaaagtaactttcttactgcagtagttttgctgaaatactcgattcacaaaaatatcaacttatggttgttttgtgagatatcaatatatggttgttttgtggttaagttgctgattataaataattattaaatatcactttatggttgcatcaacaaaaatcgaatgattaagagccgtttgacgtcaggtggcacttttcggggaaatgtgcgcggaacccctatttgtttatttttctaaatacattcaaatatgtatccgctcatgagacaataaccctgataaatgcttcaataatattgaaaaaggaagagtatgagtattcaacatttccgtgtcgcccttattcccttttttgcggcattttgccttcctgtttttgctcacccagaaacgctggtgaaagtaaaagatgctgaagatcagttgggtgcacgagtgggttacatcgaactggatctcaacagcggtaagatccttgagagttttcgccccgaagaacgttttccaatgatgagcacttttaaagttctgctatgtggcgcggtattatcccgtattgacgccgggcaagagcaactcggtcgccgcatacactattctcagaatgacttggttgagtactcaccagtcacagaaaagcatcttacggatggcatgacagtaagagaattatgcagtgctgccataaccatgagtgataacactgcggccaacttacttctgacaacgatcggaggaccgaaggagctaaccgcttttttgcacaacatgggggatcatgtaactcgccttgatcgttgggaaccggagctgaatgaagccataccaaacgacgagcgtgacaccacgatgcctgtagcaatggcaacaacgttgcgcaaactattaactggcgaactacttactctagcttcccggcaacaattaatagactggatggaggcggataaagttgcaggaccacttctgcgctcggcccttccggctggctggtttattgctgataaatctggagccggtgagcgtgggtctcgcggtatcattgcagcactggggccagatggtaagccctcccgtatcgtagttatctacacgacggggagtcaggcaactatggatgaacgaaatagacagatcgctgagataggtgcctcactgattaagcattggtaa

SEQ ID NO: 1616 - DNA, 3229 bp, Synthetic construct
  source 1..3229: mol_type = other DNA
ctgtcagaccaagtttactcatatatactttagattgatttaaaacttcatttttaatttaaaaggatctaggtgaagatcctttttgataatctcatgaccaaaatcccttaacgtgagttttcgttccactgagcgtcagaccccgtagaaaagatcaaaggatcttcttgagatcctttttttctgcgcgtaatctgctgcttgcaaacaaaaaaaccaccgctaccagcggtggtttgtttgccggatcaagagctaccaactctttttccgaaggtaactggcttcagcagagcgcagataccaaatactgttcttctagtgtagccgtagttaggccaccacttcaagaactctgtagcaccgcctacatacctcgctctgctaatcctgttaccagtggctgctgccagtggcgataagtcgtgtcttaccgggttggactcaagacgatagttaccggataaggcgcagcggtcgggctgaacggggggttcgtgcacacagcccagcttggagcgaacgacctacaccgaactgagatacctacagcgtgagctatgagaaagcgccacgcttcccgaagggagaaaggcggacaggtatccggtaagcggcagggtcggaacaggagagcgcacgagggagcttccagggggaaacgcctggtatctttatagtcctgtcgggtttcgccacctctgacttgagcgtcgatttttgtgatgctcgtcaggggggcggagcctatggaaaaacgccagcaacgcggcctttttacggttcctggccttttgctggccttttgctcacatgttctttcctgcgttatcccctgattctgtggataaccgtattaccgcctttgagtgagctgataccgctcgccgcagccgaacgaccgagcgcagcgagtcagtgagcgaggaagcggaagagcaagcttaatatttttcaataaatagtgttgaaacaaccataagttgatatttacaaccataagctgatatttaatacaaccataacttgatattgcctctttttagaccatacttatgtaagtttactacatatggtgaaagaggcaattttatgcaaccttctcctgcaacgacatatcaaacagactctcctcttgagttcgcatttactcaaccagctagaaagttaacaaaatctcgtgggaaaaatatacatcgttacgttagcattaaaacaaagcgagccctgagttgggatccatggagaaaaaaatcactggatataccaccgttgatatatcccaatggcatcgtaaagaacattttgaggcatttcagtcagttgctcaatgtacctataaccagaccgttcagctggatattacggcctttttaaagaccgtaaagaaaaataagcacaagttttatccggcctttattcacattcttgcccgcctgatgaatgctcatccggagttccgtatggcaatgaaagacggtgagctggtgatatgggatagtgttcacccttgttacaccgttttccatgagcaaactgaaacgttttcatcgctctggagtgaataccacgacgatttccggcagtttctacacatatattcgcaagatgtggcgtgttacggtgaaaacctggcctatttccctaaagggtttattgagaatatgtttttcgtctcagccaatccctgggtgagtttcaccagttttgatttaaacgtggccaatatggacaacttcttcgcccccgttttcactatgggcaaatattatacgcaaggcgacaaggtgctgatgccgctggcgattcaggttcatcatgccgtttgtgatggcttccatgtcggcagaatgcttaatgaattacaacagtactgcgatgagtggcagggcggggcgtaatttttttaaggcagttattggtgccctggtaccctgtgcagctaccacctgttatccccctagtatcagaattgtttcaaccacagcgagaatcttacaatattcaatactaatgccataaatatacttaaacagtaaaaaagatgtaagtaactttcttacaatcaatcttcataattagtaataaacctatgaaaatatcaacttatggttgttttgaataatatcaacatatggttgtatttttattaagaaattgatttatataaaaatattgaatatcaagttatggttgtatcaacaaatagtattgaaacagccttataaagacgtcaggtggcacttttcggggaaatgtgcgcggaacccctatttgtttatttttctaaatacattcaaatatgtatccgctcatgagacaataaccctgataaatgcttcaataatattgaaaaaggaagagtatgagtattcaacatttccgtgtcgcccttattcccttttttgcggcattttgccttcctgtttttgctcacccagaaacgctggtgaaagtaaaagatgctgaagatcagttgggtgcacgagtgggttacatcgaactggatctcaacagcggtaagatccttgagagttttcgccccgaagaacgttttccaatgatgagcacttttaaagttctgctatgtggcgcggtattatcccgtattgacgccgggcaagagcaactcggtcgccgcatacactattctcagaatgacttggttgagtactcaccagtcacagaaaagcatcttacggatggcatgacagtaagagaattatgcagtgctgccataaccatgagtgataacactgcggccaacttacttctgacaacgatcggaggaccgaaggagctaaccgcttttttgcacaacatgggggatcatgtaactcgccttgatcgttgggaaccggagctgaatgaagccataccaaacgacgagcgtgacaccacgatgcctgtagcaatggcaacaacgttgcgcaaactattaactggcgaactacttactctagcttcccggcaacaattaatagactggatggaggcggataaagttgcaggaccacttctgcgctcggcccttccggctggctggtttattgctgataaatctggagccggtgagcgtgggtctcgcggtatcattgcagcactggggccagatggtaagccctcccgtatcgtagttatctacacgacggggagtcaggcaactatggatgaacgaaatagacagatcgctgagataggtgcctcactgattaagcattggtaa

SEQ ID NO: 1617 - DNA, 3229 bp, Synthetic construct
  source 1..3229: mol_type = other DNA
ctgtcagaccaagtttactcatatatactttagattgatttaaaacttcatttttaatttaaaaggatctaggtgaagatcctttttgataatctcatgaccaaaatcccttaacgtgagttttcgttccactgagcgtcagaccccgtagaaaagatcaaaggatcttcttgagatcctttttttctgcgcgtaatctgctgcttgcaaacaaaaaaaccaccgctaccagcggtggtttgtttgccggatcaagagctaccaactctttttccgaaggtaactggcttcagcagagcgcagataccaaatactgttcttctagtgtagccgtagttaggccaccacttcaagaactctgtagcaccgcctacatacctcgctctgctaatcctgttaccagtggctgctgccagtggcgataagtcgtgtcttaccgggttggactcaagacgatagttaccggataaggcgcagcggtcgggctgaacggggggttcgtgcacacagcccagcttggagcgaacgacctacaccgaactgagatacctacagcgtgagctatgagaaagcgccacgcttcccgaagggagaaaggcggacaggtatccggtaagcggcagggtcggaacaggagagcgcacgagggagcttccagggggaaacgcctggtatctttatagtcctgtcgggtttcgccacctctgacttgagcgtcgatttttgtgatgctcgtcaggggggcggagcctatggaaaaacgccagcaacgcggcctttttacggttcctggccttttgctggccttttgctcacatgttctttcctgcgttatcccctgattctgtggataaccgtattaccgcctttgagtgagctgataccgctcgccgcagccgaacgaccgagcgcagcgagtcagtgagcgaggaagcggaagagcactgccacccaaattcctcatttggtgttgtttgaagtataagttgacatatttgtactaaaagatggcataaattggaagtataaggtggcatagtctagtatttaaccaaatggttagatggttgactcacatgtacagaagaaaactcaaacactcccgtgttaaaaaccttcataaatttgctagtcaaaaaaataaatctacctgtttagttgaatcctctttagagtttgatgcctgttttcattttgaattttcaccatcaatagccgattagacggacgcaatcttgggatccatggagaaaaaaatcactggatataccaccgttgatatatcccaatggcatcgtaaagaacattttgaggcatttcagtcagttgctcaatgtacctataaccagaccgttcagctggatattacggcctttttaaagaccgtaaagaaaaataagcacaagttttatccggcctttattcacattcttgcccgcctgatgaatgctcatccggagttccgtatggcaatgaaagacggtgagctggtgatatgggatagtgttcacccttgttacaccgttttccatgagcaaactgaaacgttttcatcgctctggagtgaataccacgacgatttccggcagtttctacacatatattcgcaagatgtggcgtgttacggtgaaaacctggcctatttccctaaagggtttattgagaatatgtttttcgtctcagccaatccctgggtgagtttcaccagttttgatttaaacgtggccaatatggacaacttcttcgcccccgttttcactatgggcaaatattatacgcaaggcgacaaggtgctgatgccgctggcgattcaggttcatcatgccgtttgtgatggcttccatgtcggcagaatgcttaatgaattacaacagtactgcgatgagtggcagggcggggcgtaatttttttaaggcagttattggtgccctggtaccggtagctcggctgtgaatgaaatggacttaccaattaaagtaaaaggtgatgatttattcatcaaagtttttgtgccagtgtaaaccattttccaaactgtttaagagtgatttacaacgcgtagcatgtttactttgcgttttataaagctgtatttggtagctttatgccatctattgcttcaatactatgccaatatacacttcacttaccacgctgtaagttaataaaaccgagtttggttatgtcaacttatacttcaaacaacatttgggtgaaaatacattcctttttgacgtcaggtggcacttttcggggaaatgtgcgcggaacccctatttgtttatttttctaaatacattcaaatatgtatccgctcatgagacaataaccctgataaatgcttcaataatattgaaaaaggaagagtatgagtattcaacatttccgtgtcgcccttattcccttttttgcggcattttgccttcctgtttttgctcacccagaaacgctggtgaaagtaaaagatgctgaagatcagttgggtgcacgagtgggttacatcgaactggatctcaacagcggtaagatccttgagagttttcgccccgaagaacgttttccaatgatgagcacttttaaagttctgctatgtggcgcggtattatcccgtattgacgccgggcaagagcaactcggtcgccgcatacactattctcagaatgacttggttgagtactcaccagtcacagaaaagcatcttacggatggcatgacagtaagagaattatgcagtgctgccataaccatgagtgataacactgcggccaacttacttctgacaacgatcggaggaccgaaggagctaaccgcttttttgcacaacatgggggatcatgtaactcgccttgatcgttgggaaccggagctgaatgaagccataccaaacgacgagcgtgacaccacgatgcctgtagcaatggcaacaacgttgcgcaaactattaactggcgaactacttactctagcttcccggcaacaattaatagactggatggaggcggataaagttgcaggaccacttctgcgctcggcccttccggctggctggtttattgctgataaatctggagccggtgagcgtgggtctcgcggtatcattgcagcactggggccagatggtaagccctcccgtatcgtagttatctacacgacggggagtcaggcaactatggatgaacgaaatagacagatcgctgagataggtgcctcactgattaagcattggtaa

SEQ ID NO: 1618 - DNA, 3229 bp, Synthetic construct
  source 1..3229: mol_type = other DNA
ctgtcagaccaagtttactcatatatactttagattgatttaaaacttcatttttaatttaaaaggatctaggtgaagatcctttttgataatctcatgaccaaaatcccttaacgtgagttttcgttccactgagcgtcagaccccgtagaaaagatcaaaggatcttcttgagatcctttttttctgcgcgtaatctgctgcttgcaaacaaaaaaaccaccgctaccagcggtggtttgtttgccggatcaagagctaccaactctttttccgaaggtaactggcttcagcagagcgcagataccaaatactgttcttctagtgtagccgtagttaggccaccacttcaagaactctgtagcaccgcctacatacctcgctctgctaatcctgttaccagtggctgctgccagtggcgataagtcgtgtcttaccgggttggactcaagacgatagttaccggataaggcgcagcggtcgggctgaacggggggttcgtgcacacagcccagcttggagcgaacgacctacaccgaactgagatacctacagcgtgagctatgagaaagcgccacgcttcccgaagggagaaaggcggacaggtatccggtaagcggcagggtcggaacaggagagcgcacgagggagcttccagggggaaacgcctggtatctttatagtcctgtcgggtttcgccacctctgacttgagcgtcgatttttgtgatgctcgtcaggggggcggagcctatggaaaaacgccagcaacgcggcctttttacggttcctggccttttgctggccttttgctcacatgttctttcctgcgttatcccctgattctgtggataaccgtattaccgcctttgagtgagctgataccgctcgccgcagccgaacgaccgagcgcagcgagtcagtgagcgaggaagcggaagagcaggctgccacccaaatttccccctttgttgtttgaagtataagttgacaaatttgaagttaaagttgacataaatttgaacaataagttgtcatagcctattttttagtcagtgcgctaaaaaaagaaacggctatgtatagacgcaatcccaagtcatctagagtcaaacaccaattcaaattcgctagtcaaaagagcaagaacacttgtttcgcagaatcagcattagagttcgatgcttgtttccactttgagtattcctcagcgattgtccagtttttgctcggcatcctggatccatggagaaaaaaatcactggatataccaccgttgatatatcccaatggcatcgtaaagaacattttgaggcatttcagtcagttgctcaatgtacctataaccagaccgttcagctggatattacggcctttttaaagaccgtaaagaaaaataagcacaagttttatccggcctttattcacattcttgcccgcctgatgaatgctcatccggagttccgtatggcaatgaaagacggtgagctggtgatatgggatagtgttcacccttgttacaccgttttccatgagcaaactgaaacgttttcatcgctctggagtgaataccacgacgatttccggcagtttctacacatatattcgcaagatgtggcgtgttacggtgaaaacctggcctatttccctaaagggtttattgagaatatgtttttcgtctcagccaatccctgggtgagtttcaccagttttgatttaaacgtggccaatatggacaacttcttcgcccccgttttcactatgggcaaatattatacgcaaggcgacaaggtgctgatgccgctggcgattcaggttcatcatgccgtttgtgatggcttccatgtcggcagaatgcttaatgaattacaacagtactgcgatgagtggcagggcggggcgtaatttttttaaggcagttattggtgccctggtaccgtcccgttctgggaatggaaactggtcggctctaactcatttctgtccaaaaatgaattggtgtgaacgtctgattatttaattagttgtatgacgcactagccgaacgactgaaaatgcacaaaaggtacgcgcgaggggcaatattaggacagtaagggactttttgtcatcttttacttcaaacttatgtcaacttatacttccgtaacacccagatagagcctagggcaagggcccgtcttatgtcaacttatacttcaaacgacacccttgttgtttgaagtataagttggacgtcaggtggcacttttcggggaaatgtgcgcggaacccctatttgtttatttttctaaatacattcaaatatgtatccgctcatgagacaataaccctgataaatgcttcaataatattgaaaaaggaagagtatgagtattcaacatttccgtgtcgcccttattcccttttttgcggcattttgccttcctgtttttgctcacccagaaacgctggtgaaagtaaaagatgctgaagatcagttgggtgcacgagtgggttacatcgaactggatctcaacagcggtaagatccttgagagttttcgccccgaagaacgttttccaatgatgagcacttttaaagttctgctatgtggcgcggtattatcccgtattgacgccgggcaagagcaactcggtcgccgcatacactattctcagaatgacttggttgagtactcaccagtcacagaaaagcatcttacggatggcatgacagtaagagaattatgcagtgctgccataaccatgagtgataacactgcggccaacttacttctgacaacgatcggaggaccgaaggagctaaccgcttttttgcacaacatgggggatcatgtaactcgccttgatcgttgggaaccggagctgaatgaagccataccaaacgacgagcgtgacaccacgatgcctgtagcaatggcaacaacgttgcgcaaactattaactggcgaactacttactctagcttcccggcaacaattaatagactggatggaggcggataaagttgcaggaccacttctgcgctcggcccttccggctggctggtttattgctgataaatctggagccggtgagcgtgggtctcgcggtatcattgcagcactggggccagatggtaagccctcccgtatcgtagttatctacacgacggggagtcaggcaactatggatgaacgaaatagacagatcgctgagataggtgcctcactgattaagcattggtaa

SEQ ID NO: 1619 - DNA, 3229 bp, Synthetic construct
  source 1..3229: mol_type = other DNA
ctgtcagaccaagtttactcatatatactttagattgatttaaaacttcatttttaatttaaaaggatctaggtgaagatcctttttgataatctcatgaccaaaatcccttaacgtgagttttcgttccactgagcgtcagaccccgtagaaaagatcaaaggatcttcttgagatcctttttttctgcgcgtaatctgctgcttgcaaacaaaaaaaccaccgctaccagcggtggtttgtttgccggatcaagagctaccaactctttttccgaaggtaactggcttcagcagagcgcagataccaaatactgttcttctagtgtagccgtagttaggccaccacttcaagaactctgtagcaccgcctacatacctcgctctgctaatcctgttaccagtggctgctgccagtggcgataagtcgtgtcttaccgggttggactcaagacgatagttaccggataaggcgcagcggtcgggctgaacggggggttcgtgcacacagcccagcttggagcgaacgacctacaccgaactgagatacctacagcgtgagctatgagaaagcgccacgcttcccgaagggagaaaggcggacaggtatccggtaagcggcagggtcggaacaggagagcgcacgagggagcttccagggggaaacgcctggtatctttatagtcctgtcgggtttcgccacctctgacttgagcgtcgatttttgtgatgctcgtcaggggggcggagcctatggaaaaacgccagcaacgcggcctttttacggttcctggccttttgctggccttttgctcacatgttctttcctgcgttatcccctgattctgtggataaccgtattaccgcctttgagtgagctgataccgctcgccgcagccgaacgaccgagcgcagcgagtcagtgagcgaggaagcggaagagctggggcttccacccatctgaagctttgtagtttgcaccataagcctgcatatcttccttgataccctgcataattggtacaataagcgtgcataagctatttttgttgtagtttaacaacaaacaggctggtctactatgtaccgccgaaagctcaaacattcccgcgtaaaaaatctttttaagttcgtcagtgccaaaatgaatcaggctatgacggttgaatcctacttagagttcgatacctgctttcacctagaatattcatcatccatcccaactaggaagtgactcttggatccatggagaaaaaaatcactggatataccaccgttgatatatcccaatggcatcgtaaagaacattttgaggcatttcagtcagttgctcaatgtacctataaccagaccgttcagctggatattacggcctttttaaagaccgtaaagaaaaataagcacaagttttatccggcctttattcacattcttgcccgcctgatgaatgctcatccggagttccgtatggcaatgaaagacggtgagctggtgatatgggatagtgttcacccttgttacaccgttttccatgagcaaactgaaacgttttcatcgctctggagtgaataccacgacgatttccggcagtttctacacatatattcgcaagatgtggcgtgttacggtgaaaacctggcctatttccctaaagggtttattgagaatatgtttttcgtctcagccaatccctgggtgagtttcaccagttttgatttaaacgtggccaatatggacaacttcttcgcccccgttttcactatgggcaaatattatacgcaaggcgacaaggtgctgatgccgctggcgattcaggttcatcatgccgtttgtgatggcttccatgtcggcagaatgcttaatgaattacaacagtactgcgatgagtggcagggcggggcgtaatttttttaaggcagttattggtgccctggtaccgtgaacaccgtgtactgatgcgcaatccaataagagtcgttaatagctctaagcaagataagcccgcttgatgcgggttttgtttctttgaggcatctggttctgttcttcatgtaagaaaataacttacatgtaactgagaggcagaatgttcgcatgtagtgttatgtcgggttatgctgcctttttatgcatgcttatggtgaagagaaataactaagcttctgatttataagtggttggctatgtagccttatggtgcaagctacaagcttgaaaattttccacaagtctagacgtcaggtggcacttttcggggaaatgtgcgcggaacccctatttgtttatttttctaaatacattcaaatatgtatccgctcatgagacaataaccctgataaatgcttcaataatattgaaaaaggaagagtatgagtattcaacatttccgtgtcgcccttattcccttttttgcggcattttgccttcctgtttttgctcacccagaaacgctggtgaaagtaaaagatgctgaagatcagttgggtgcacgagtgggttacatcgaactggatctcaacagcggtaagatccttgagagttttcgccccgaagaacgttttccaatgatgagcacttttaaagttctgctatgtggcgcggtattatcccgtattgacgccgggcaagagcaactcggtcgccgcatacactattctcagaatgacttggttgagtactcaccagtcacagaaaagcatcttacggatggcatgacagtaagagaattatgcagtgctgccataaccatgagtgataacactgcggccaacttacttctgacaacgatcggaggaccgaaggagctaaccgcttttttgcacaacatgggggatcatgtaactcgccttgatcgttgggaaccggagctgaatgaagccataccaaacgacgagcgtgacaccacgatgcctgtagcaatggcaacaacgttgcgcaaactattaactggcgaactacttactctagcttcccggcaacaattaatagactggatggaggcggataaagttgcaggaccacttctgcgctcggcccttccggctggctggtttattgctgataaatctggagccggtgagcgtgggtctcgcggtatcattgcagcactggggccagatggtaagccctcccgtatcgtagttatctacacgacggggagtcaggcaactatggatgaacgaaatagacagatcgctgagataggtgcctcactgattaagcattggtaa

SEQ ID NO: 1620 - DNA, 3229 bp, Synthetic construct
  source 1..3229: mol_type = other DNA
ctgtcagaccaagtttactcatatatactttagattgatttaaaacttcatttttaatttaaaaggatctaggtgaagatcctttttgataatctcatgaccaaaatcccttaacgtgagttttcgttccactgagcgtcagaccccgtagaaaagatcaaaggatcttcttgagatcctttttttctgcgcgtaatctgctgcttgcaaacaaaaaaaccaccgctaccagcggtggtttgtttgccggatcaagagctaccaactctttttccgaaggtaactggcttcagcagagcgcagataccaaatactgttcttctagtgtagccgtagttaggccaccacttcaagaactctgtagcaccgcctacatacctcgctctgctaatcctgttaccagtggctgctgccagtggcgataagtcgtgtcttaccgggttggactcaagacgatagttaccggataaggcgcagcggtcgggctgaacggggggttcgtgcacacagcccagcttggagcgaacgacctacaccgaactgagatacctacagcgtgagctatgagaaagcgccacgcttcccgaagggagaaaggcggacaggtatccggtaagcggcagggtcggaacaggagagcgcacgagggagcttccagggggaaacgcctggtatctttatagtcctgtcgggtttcgccacctctgacttgagcgtcgatttttgtgatgctcgtcaggggggcggagcctatggaaaaacgccagcaacgcggcctttttacggttcctggccttttgctggccttttgctcacatgttctttcctgcgttatcccctgattctgtggataaccgtattaccgcctttgagtgagctgataccgctcgccgcagccgaacgaccgagcgcagcgagtcagtgagcgaggaagcggaagagctttttagctatagctttatttttcatgtcgctgaaagcatacattgacataagacaaccatagtctgacaaatttaaagcatagtttgacataaaatagcatttttgtattttagctacataatttaatattattaaaatcaattacttgagttaaaagttaaagcgtagtctgacaaatttgacaaaacatcgagcagctgtacactaagtgtacctaagttgcttgagttttgcgcatgtatattcgaaatttacgtaagccttcgcccaataagaaggctggcctgtgtgtaggatccatggagaaaaaaatcactggatataccaccgttgatatatcccaatggcatcgtaaagaacattttgaggcatttcagtcagttgctcaatgtacctataaccagaccgttcagctggatattacggcctttttaaagaccgtaaagaaaaataagcacaagttttatccggcctttattcacattcttgcccgcctgatgaatgctcatccggagttccgtatggcaatgaaagacggtgagctggtgatatgggatagtgttcacccttgttacaccgttttccatgagcaaactgaaacgttttcatcgctctggagtgaataccacgacgatttccggcagtttctacacatatattcgcaagatgtggcgtgttacggtgaaaacctggcctatttccctaaagggtttattgagaatatgtttttcgtctcagccaatccctgggtgagtttcaccagttttgatttaaacgtggccaatatggacaacttcttcgcccccgttttcactatgggcaaatattatacgcaaggcgacaaggtgctgatgccgctggcgattcaggttcatcatgccgtttgtgatggcttccatgtcggcagaatgcttaatgaattacaacagtactgcgatgagtggcagggcggggcgtaatttttttaaggcagttattggtgccctggtaccgatcaagtggccgacagcttcgagttaggagtaggtcttgagttttaaagaatgagaatagctaaattattgccattcttctaaatcatataatgtaaatgatatttgtcgcattatgttgtcataaaagtacatggaaaagttttggctccagagattgcttcaatttgtcagcttacggttatattttatgtcaggatatggttatatttttcaactaagctattgaaagtttgaagcgacctatgtcaggttatgcttccagcgacatttcagttagtggtcgataacaacagacgtcaggtggcacttttcggggaaatgtgcgcggaacccctatttgtttatttttctaaatacattcaaatatgtatccgctcatgagacaataaccctgataaatgcttcaataatattgaaaaaggaagagtatgagtattcaacatttccgtgtcgcccttattcccttttttgcggcattttgccttcctgtttttgctcacccagaaacgctggtgaaagtaaaagatgctgaagatcagttgggtgcacgagtgggttacatcgaactggatctcaacagcggtaagatccttgagagttttcgccccgaagaacgttttccaatgatgagcacttttaaagttctgctatgtggcgcggtattatcccgtattgacgccgggcaagagcaactcggtcgccgcatacactattctcagaatgacttggttgagtactcaccagtcacagaaaagcatcttacggatggcatgacagtaagagaattatgcagtgctgccataaccatgagtgataacactgcggccaacttacttctgacaacgatcggaggaccgaaggagctaaccgcttttttgcacaacatgggggatcatgtaactcgccttgatcgttgggaaccggagctgaatgaagccataccaaacgacgagcgtgacaccacgatgcctgtagcaatggcaacaacgttgcgcaaactattaactggcgaactacttactctagcttcccggcaacaattaatagactggatggaggcggataaagttgcaggaccacttctgcgctcggcccttccggctggctggtttattgctgataaatctggagccggtgagcgtgggtctcgcggtatcattgcagcactggggccagatggtaagccctcccgtatcgtagttatctacacgacggggagtcaggcaactatggatgaacgaaatagacagatcgctgagataggtgcctcactgattaagcattggtaa

SEQ ID NO: 1621 - DNA, 3229 bp, Synthetic construct
  source 1..3229: mol_type = other DNA
ctgtcagaccaagtttactcatatatactttagattgatttaaaacttcatttttaatttaaaaggatctaggtgaagatcctttttgataatctcatgaccaaaatcccttaacgtgagttttcgttccactgagcgtcagaccccgtagaaaagatcaaaggatcttcttgagatcctttttttctgcgcgtaatctgctgcttgcaaacaaaaaaaccaccgctaccagcggtggtttgtttgccggatcaagagctaccaactctttttccgaaggtaactggcttcagcagagcgcagataccaaatactgttcttctagtgtagccgtagttaggccaccacttcaagaactctgtagcaccgcctacatacctcgctctgctaatcctgttaccagtggctgctgccagtggcgataagtcgtgtcttaccgggttggactcaagacgatagttaccggataaggcgcagcggtcgggctgaacggggggttcgtgcacacagcccagcttggagcgaacgacctacaccgaactgagatacctacagcgtgagctatgagaaagcgccacgcttcccgaagggagaaaggcggacaggtatccggtaagcggcagggtcggaacaggagagcgcacgagggagcttccagggggaaacgcctggtatctttatagtcctgtcgggtttcgccacctctgacttgagcgtcgatttttgtgatgctcgtcaggggggcggagcctatggaaaaacgccagcaacgcggcctttttacggttcctggccttttgctggccttttgctcacatgttctttcctgcgttatcccctgattctgtggataaccgtattaccgcctttgagtgagctgataccgctcgccgcagccgaacgaccgagcgcagcgagtcagtgagcgaggaagcggaagagcatgtggctggggcctccgcccatcttgtcgctgaaagcataaagtgtccaattaaaagcataagctgtccttttaaaactcataaagtgtcctaaacttaatttggttgttttattacaacgttaagggacaagttatgtacgttcgaaatctccgcaaaccatctgcaacaaaaaatgtgtacaagtttgcgagttctaaaaaccgaagtgtcattttgtgtgaaagttctttagaacgagattgttgttaccatctcgaatactctaaggacgagcgcggatcactttttaagggatccatggagaaaaaaatcactggatataccaccgttgatatatcccaatggcatcgtaaagaacattttgaggcatttcagtcagttgctcaatgtacctataaccagaccgttcagctggatattacggcctttttaaagaccgtaaagaaaaataagcacaagttttatccggcctttattcacattcttgcccgcctgatgaatgctcatccggagttccgtatggcaatgaaagacggtgagctggtgatatgggatagtgttcacccttgttacaccgttttccatgagcaaactgaaacgttttcatcgctctggagtgaataccacgacgatttccggcagtttctacacatatattcgcaagatgtggcgtgttacggtgaaaacctggcctatttccctaaagggtttattgagaatatgtttttcgtctcagccaatccctgggtgagtttcaccagttttgatttaaacgtggccaatatggacaacttcttcgcccccgttttcactatgggcaaatattatacgcaaggcgacaaggtgctgatgccgctggcgattcaggttcatcatgccgtttgtgatggcttccatgtcggcagaatgcttaatgaattacaacagtactgcgatgagtggcagggcggggcgtaatttttttaaggcagttattggtgccctggtaccgcaacaagccctgcccttaaagagcataaggcctaactgatttatgtccaaaaaattgttatacgtaagatgccagtatttgttcaatgttaatgctgaaaacactcgtttttcgtaagtaagtttctttcatgcccagatatcgcttgttctaacgaacaatacatgggacaccttattctttcagtttaggacgctttatggttttagattgattttaactatttgattttctgtgatcgcataggacatcttatgctttcagcgacacatctgacgttctaaaaatccaattgacgtcaggtggcacttttcggggaaatgtgcgcggaacccctatttgtttatttttctaaatacattcaaatatgtatccgctcatgagacaataaccctgataaatgcttcaataatattgaaaaaggaagagtatgagtattcaacatttccgtgtcgcccttattcccttttttgcggcattttgccttcctgtttttgctcacccagaaacgctggtgaaagtaaaagatgctgaagatcagttgggtgcacgagtgggttacatcgaactggatctcaacagcggtaagatccttgagagttttcgccccgaagaacgttttccaatgatgagcacttttaaagttctgctatgtggcgcggtattatcccgtattgacgccgggcaagagcaactcggtcgccgcatacactattctcagaatgacttggttgagtactcaccagtcacagaaaagcatcttacggatggcatgacagtaagagaattatgcagtgctgccataaccatgagtgataacactgcggccaacttacttctgacaacgatcggaggaccgaaggagctaaccgcttttttgcacaacatgggggatcatgtaactcgccttgatcgttgggaaccggagctgaatgaagccataccaaacgacgagcgtgacaccacgatgcctgtagcaatggcaacaacgttgcgcaaactattaactggcgaactacttactctagcttcccggcaacaattaatagactggatggaggcggataaagttgcaggaccacttctgcgctcggcccttccggctggctggtttattgctgataaatctggagccggtgagcgtgggtctcgcggtatcattgcagcactggggccagatggtaagccctcccgtatcgtagttatctacacgacggggagtcaggcaactatggatgaacgaaatagacagatcgctgagataggtgcctcactgattaagcattggtaa

SEQ ID NO: 1622 - DNA, 3229 bp, Synthetic construct
  source 1..3229: mol_type = other DNA
ctgtcagaccaagtttactcatatatactttagattgatttaaaacttcatttttaatttaaaaggatctaggtgaagatcctttttgataatctcatgaccaaaatcccttaacgtgagttttcgttccactgagcgtcagaccccgtagaaaagatcaaaggatcttcttgagatcctttttttctgcgcgtaatctgctgcttgcaaacaaaaaaaccaccgctaccagcggtggtttgtttgccggatcaagagctaccaactctttttccgaaggtaactggcttcagcagagcgcagataccaaatactgttcttctagtgtagccgtagttaggccaccacttcaagaactctgtagcaccgcctacatacctcgctctgctaatcctgttaccagtggctgctgccagtggcgataagtcgtgtcttaccgggttggactcaagacgatagttaccggataaggcgcagcggtcgggctgaacggggggttcgtgcacacagcccagcttggagcgaacgacctacaccgaactgagatacctacagcgtgagctatgagaaagcgccacgcttcccgaagggagaaaggcggacaggtatccggtaagcggcagggtcggaacaggagagcgcacgagggagcttccagggggaaacgcctggtatctttatagtcctgtcgggtttcgccacctctgacttgagcgtcgatttttgtgatgctcgtcaggggggcggagcctatggaaaaacgccagcaacgcggcctttttacggttcctggccttttgctggccttttgctcacatgttctttcctgcgttatcccctgattctgtggataaccgtattaccgcctttgagtgagctgataccgctcgccgcagccgaacgaccgagcgcagcgagtcagtgagcgaggaagcggaagagcgatgtggctggggcctccgcccatctgatgtttgcaaaataagttcgcataaattgcagaatatttcgcaaatttgcactataagtctgcatagactacgttttgttgtaggtttacaacaaaagtgacttagctatgtttgaccaaactaagaaatcatctcatgtgcacaacatctgtaagttcatgagcttgaagaatgatgctgttgttcgcactctctccattctggagttcgatttctgttttcacctcgaatacaacccaaacatcaactagcttgtgagggtggttaggatccatggagaaaaaaatcactggatataccaccgttgatatatcccaatggcatcgtaaagaacattttgaggcatttcagtcagttgctcaatgtacctataaccagaccgttcagctggatattacggcctttttaaagaccgtaaagaaaaataagcacaagttttatccggcctttattcacattcttgcccgcctgatgaatgctcatccggagttccgtatggcaatgaaagacggtgagctggtgatatgggatagtgttcacccttgttacaccgttttccatgagcaaactgaaacgttttcatcgctctggagtgaataccacgacgatttccggcagtttctacacatatattcgcaagatgtggcgtgttacggtgaaaacctggcctatttccctaaagggtttattgagaatatgtttttcgtctcagccaatccctgggtgagtttcaccagttttgatttaaacgtggccaatatggacaacttcttcgcccccgttttcactatgggcaaatattatacgcaaggcgacaaggtgctgatgccgctggcgattcaggttcatcatgccgtttgtgatggcttccatgtcggcagaatgcttaatgaattacaacagtactgcgatgagtggcagggcggggcgtaatttttttaaggcagttattggtgccctggtacctgggtagccgtaatcaagaactttctctgttttatatgttgtccaagaaatactgacgcctatcacatcctcaaattgtactctgtgagtagaaatgtaagacatcgatcattgaaagaatattgttgtagtaactttacaacgtagaatttagatacctactcaaatatgctgacttttgatgcaatcttatgcgaacttattctgcaaatttcttcgtaactacttgaaagctagctctgtctatgcagacttatgctgcaagcatcaccatctgacgttctaaaaatccaatgacgtcaggtggcacttttcggggaaatgtgcgcggaacccctatttgtttatttttctaaatacattcaaatatgtatccgctcatgagacaataaccctgataaatgcttcaataatattgaaaaaggaagagtatgagtattcaacatttccgtgtcgcccttattcccttttttgcggcattttgccttcctgtttttgctcacccagaaacgctggtgaaagtaaaagatgctgaagatcagttgggtgcacgagtgggttacatcgaactggatctcaacagcggtaagatccttgagagttttcgccccgaagaacgttttccaatgatgagcacttttaaagttctgctatgtggcgcggtattatcccgtattgacgccgggcaagagcaactcggtcgccgcatacactattctcagaatgacttggttgagtactcaccagtcacagaaaagcatcttacggatggcatgacagtaagagaattatgcagtgctgccataaccatgagtgataacactgcggccaacttacttctgacaacgatcggaggaccgaaggagctaaccgcttttttgcacaacatgggggatcatgtaactcgccttgatcgttgggaaccggagctgaatgaagccataccaaacgacgagcgtgacaccacgatgcctgtagcaatggcaacaacgttgcgcaaactattaactggcgaactacttactctagcttcccggcaacaattaatagactggatggaggcggataaagttgcaggaccacttctgcgctcggcccttccggctggctggtttattgctgataaatctggagccggtgagcgtgggtctcgcggtatcattgcagcactggggccagatggtaagccctcccgtatcgtagttatctacacgacggggagtcaggcaactatggatgaacgaaatagacagatcgctgagataggtgcctcactgattaagcattggtaa

SEQ ID NO: 1623 - DNA, 11816 bp, Synthetic construct
  source 1..11816: mol_type = other DNA
aacgtggctggcctggttcaccacgcgggaaacggtctgataagagacaccggcatactctgcgacatcgtataacgttactggtttcacattcaccaccctgaattgactctcttccgggcgctatcatgccataccgcgaaaggttttgcgccattcgatggtgtccgggatctcgacgctctcccttatgcgactcctgcattaggaaattaatacgactcactataggggaattgtgagcggataacaattcccctgtagaaataattttgtttaactttaataaggagatataccatgggtgaactgccgagtaggtagctgataacagtacagcgcggctgaaatcatcattaaagcggtgaactgccgagtaggtagctgataactagcgaattccgagcgaaggagatatacatatgaaaacgatgttactgcaacgaccaaagccatttgaagatgaaagtcttgagagctatttaatccgaatagcaaacagaaatggttatcaagatgttgatcgttttttgtctgcacttaaacactatttgtgtgatggggattctgaaaaattttcctcattccccactgacatccgtcgaataaacccatattcctcaaaacatagttcagctgctagaagtcatgctctccataagataggtcaattaacatttacggaatccgttgatttactgaagttagccatcaatcgttcgccacttaaatattccccctcagtaacagcagttatccgtggtcacgaggttttccctcgctctttactaaggaccaatatcataccagtatgccctgtttgccttcaggaaaatggttacgccagctatttatggcattttgaaggttatgactactgccatattcacgatctcgctctaacgtataactgtcaatgtggcaaaccttgcgactaccgagtaagcggtttacaactagtttgcagctcatgtggaacgacactaactcatttattagaaaagccaactgataggtcatccgatatttctcactggctggcaggcgaaaccataaaatggttgccagcagttcccgtaagttatcgttgggggctagttcattggtggatgaataataaaaaatcaaaagaactggaaacagagagcttcacgattttttggaaaaattggcccaattcctttcataacctaattcaagaaactcttagttacaatcagacctactcactggtagcacccacccaatggagacttaaagacttactaggggaaatactttttagctcaataaacttgccaggtcgaaatctacaatacaacttgatactgagagagcttttccattatctggaaaatcatttgtgggaaaacaatggattaattgcaaacctaagactaagcgcctttgaggtttctctaattttaggctgtagcactgaagaagtagcgtctatgtcagaacaaggattgttgattcccatacaaaaccggaaacgttatgaacctatgagtctaacaaactgcatttttcattttggtgacgtcttttgcatttggttagctgaatttcagacagacgagttcaaccgttcattttatacctcacgatggtgataaaatgactttagatgagctattggcaactactaaatatgaagaattagtatcttcaactaaacggtcatttcgtccattatccccactgattgacatcactaacaatccgatgacggcattgactatcttagtcaatctgacagagaaagggatctccaataaaaatcttcttgataaagagcgttgtaaagaaaaactgagggatgacaaatggtgggctgcggtccttaagccagcccaataccgtcacagccataatgttaaatttcctgatattcgttctacaggcacaattcgtacagtagcacctgataaccttccggcttatttcatcacgtcgagcaaactgcctaacgtaggatggacttactcaaaggattcctctgacatcaatcgctgtctgttttttacctctgaatttttatgggctggacaaccatgctgtttagccagagcgttaacggatagtgaacacccactttggagtacactcaaaaaacttgggtgttatgagaaaaataaaaaactggcagcaaagctgctttctcaaatccccggcgaactcattgatgttgatttaaccggaaattacctcagccaagtttcttttccagatggtcgggatagttatctgtctttctctcccgtcgcatctcaagctatgcaaagttgtgtttatcaatcactagaacagcattatcgacaaacggcccttatgcgatttgaccgagcaaccaatatggggctactttcagccagttgtggtggccgatttcgcctgattgaaacgaaaccctacatcaaagataaacgacaccactatatttcagaactaccaaactggctcaccaaagaagctattcaatcagtagagcagtttctaagatcagaacaatggctagttacccataatgataagccacgtaatatggcgatagtaaaatcttccattcgttctatggtgaatcgctggttaagctctcgtacaaatacagaagccctgtctccggctgagttagcggaacaacttaataacgacatagcttccaaacgtattataaaaagatacgcttaccaacctaagttgactcggttattcatacaacttatagaaaatactggagaagataacgcttacaaagaagatagaaaaccgacaacgaatagtcagtaccttttgatccctgaactcagaatctctggaggttctgccataagttcatcggtcagtgtaggactattttcaatgatgtcgctttatggatttatccatgcgtttgaacggaatatgcagcttgtactgacgagttttaccattgatagttttgccatttgcgtccatgactatcacttggaaaaacgagggttaaccaaagagccgattaaaaaggcaaaagtacgcaaagatgaacaagaaaaaatagcacctcctgctatctatgatgattatcaattcgatagttgtatcagtctaattatcaaaacatcagaatcaaaaactatacccgctgaaaaaatggtggcattacttccaaaacgctttgcgaggggcgcaatccgattgtccattgatggcattcaagaaataggagcgtttcccaagccattacccgcaatacaggcaataaaaaatccacttggtagttggctgtcgtttgaacctgacttgtctttaatatcaactgattcaatagtcgatatagctaccaatcacaataatttatggttgacagtgatgggataccagtatttagaaccacccacaacaaaacctagttcgctacgagactaccctcatgcccttgtcgaaaatatcttgggatttgttaagcctagaaccgtaacaaaatcgaccaatttagatgatctattttggcgctatcaaatccagccatttggcgtctgcttactaccaaggagtatcaaatgaagcttcctatccatctagcctatgaacgctcaatttccccttcagatgttgcctttttagtcatttggccagatggatacaaagagccactgccttgttacagtcgcacaatccttggccttaacgaaggttcacacgttggctatgatggttctggcgccgtacgaaataacttaaaaatgaatacgctggtcgatggcaatattcatgaattggactattgttctgtgccgtatggagcgaaatcaatagagtgttgtttctccgtttccttttcttctgaattactcaagccttataaatgttcagatgcaggcgtaaaaaagacacttagagaatttgttagtctatataaccaacacgtagggttagaagaactgataatcaagtacctgactaatattgcactaggcacctggctttggcacaacaccaaacgaagctattgtgtctccatagaaattcggccgtggccttgggaaggtgagacaatcatcattgatgatatacgcaaatatctcaagggcgatagagcgaccaacgacttactcaactggaacaagctgattgaacaagtaaaagaggctttcacagaccctatgggcttatgcatattggaggtaaaagctaacttaatcaaaccctcgatggcgcagctttatcctagccaaatgttcaaagaagcagccaagaaagagaacaaccgtctctatcaatcaaccatcattgatggtatcaaatcacccattatgggctgttacaaaactggggcggctatcgctactatagatacttggtatccagacgccgaggaaccaattcgggttggtcactacggtgtagatcgagaaaacagtactgcatatcgacatcccgatacaggaaaggacttctttagtattttaaagcgaatagacgaattggttgatcgactaaaagatgccaaagagttaagtcaagacgaactcaaagatatgcatttccttatggctaatctaatcaaaggtgggctatttcaggaaaaaggggaatgacgacatgatactttactatcgaacagttacctttttgccaaaaataaaaaataacgaagcattagtgggacactgtctgaaggttcttcatggtgtatgtactaagtacacaatcaacactatcggagtgtcttttcctgagtggggagaagaaaccatcggtgacaaaattagttttatctcacccaaccagctcgaactggactttttacttcaacaaacctatttttctgaaatgacagcgcttggatacctaaacatatcgcagtcaaaatcggttcctgaacaatacaatttggctgttttccggcgcaatcaaaaaatcgaccaagcgacaccgaatggacaaagaatcagagccgaacgtttggctaaacgagctatgaatagaggcgattcaccgattcggtttaccccagaggacctcgtatttgaacattatcattctataccgataacaagtacccgtagtggcaaatcattcaggctaaatttgcaatatcaacgactagatacagttccagatggacaatgggcattttcaagttatgggttagcaaatcaagagcttgaaagtagtcctgttcccgtaatttgacctttaataaggagatatagcatgtctgctctaccttctccttctactaccaccctgattgcacttgaaagtgcatttgttactcctgctcgaaacttaactaagtcgcgtgggaaaaacatacaccgttacgtcagtgctaagatgggaaaaagagttacagtagaatcttttctcgagtgtgttgcttgttatcattttgattttgagcccagcatcgttcgcttttgttctcagccgataagattttcatacggtctaaatggtaagacccatacttatgttccagactttctagttcaatttgatacaggtgaatttaagttgtacgaagtaaagtccgatatggaaagctcaaaagaggaatttcaatgtgaatgggaagcaaaagttcaaggtgcgtttgagttaggtttggagctagagctggttacagaggaagaaatactggatgaggtcatatttagcaaccttaaacttttgcatcgatatgcttcaagagataacttgaatcactttcatcaaactctccttgccacctttaaattgaatggtacacaaaccgcaaagagtttaggacaccatcttggcctaaatggaagaaaaatattaccgttcctgtgtgatttgctctcacgaaacttactccaaacaagtttagagacgcctctgtcactggagtctgaatttgaattgggttgttatgcctaataaatcattttcgagttttcatcggaagtcagcatttcagcaagaaaaacttgagccgaatgatagggttgttgatgacaacgatgttgacgaagcaacatatcaagatatatccgcatttcctgacaatatagccactcagattacttttcgtctaagtatccttcgttatttagcaagtaagtgcgaacgaatcattccaaagactatcgaaccgcatcgagtcggtctacaacgtttacacgacaggaagattccaagtgccatatcaatataccgttggtggttagttttcagagcgtctggttgtaacccagttagcttagctcccaagaataaaaataagggtaacagtaaagccaaagtaccaacattcgttgatgctttgatggaacaagctgtagacagagttatctctgggagaaaagtgcgtataagaagtgcctacaggcgcgtgcgaaggaaattacgtcagcataatctgaacaatggaacgaagtacaaatacccaacttatgaatctcttcggaaacgggttaaaaagaaaactcctttcgagttactggctgcgaagaagggcgagcgagtcgcgaaaagagagttccgtcgtatgggaaaaaagatattgacttcttacgtccttgaaagggttgaaatagatcatacggtagtggatctctttgctgtacatgaagaacatcgcgtgccattgggccgaccttggcttactcaattagttgattgttacagcaaagcagttattggtttttacctggggtttgaaccaccgagctacgtatctgtgtcacttgctcttaaaaatgcaatactgcggaaagatgaccttttgagttcgttcgactcagtagaaaatgaatggctatgttacggtatccctgacttactcgtaactgataatggtaaagagtttttgtctaaggcttttgataaagcatgtgaatcactgttgatcaatgtacatcaaaacagagtcgaaacgcccgacgataaaccgcatgttgaacgcagctacggaactatcaatacttctctgctagacgatttaccagggaaggcttttagccaataccttcagagagaaggttatgattcagtgggcgaagctactcttacattggatgaaattaaagaaatttacttaatttggttagtcgatatttatcatccaaaatctaaccagagaggtactaattgtccgaatgtagcatggaaaaggggatgtcaagaatgggagcctgaagagtttaatggatctaaagatgaattggactttaaattcgctattgttgatcaaaaacaactaaccaaagctggtgtaactgtttataaagaactgacatacagtagtgaacgtttagctgagtataggggtaagaaaggaaatcataaagttcagttcaaatataatccagagtgtatggcggtcatttgggtgttagatgaggacctgaacgagtacttcacggttcacgcgatagactacgaatatgcaagtagagtgtctctctggcaacataaatacaatatgaagtatcaagcagagttaaattcagcagaatatgacgaggacaaggaaattgatgcagagataaaaattgaagaaatcgctgaccgttcgattgttaagactaagaaaatcagagcccggaggcgtggagctagacatcaagagaatagcgcaagagcaaaatccatcagcgatgccaagcctgtcccatcccagaaacatgaggacgaaattgtaattgttgataatgaagattgggatattgattatgtttaagaaatcatcagatgaatgaaactcgtgaagcacgcatctcaaaagctaaaagagcatttgtatccacgccgagtgttacgaaaatcttatgctacatggatagatgtagagatttatcagacttcgattctgagcctacttgcatgatggtctatggtgcttccggagtcggtaaaacgaccattatcaaaaaatatttaaatcaaaacaggcgagattctgaagttgggggcgatataattccagtcttgcatatagagctgccggacaatgcgaaaccagtagatgctgcgagggagttgctggttgaaatgggggacccgctggcgctttatgaaacagatttagccagattgacgaaaaaactgattgatttaatcccggtggttggtgtgaagttgattattatcgatgagttccagcatttagtagaagaaaggtcaaatcgggttctcacgcaagtaggtaactggctaaaaatgatactcaacaaaacgaaatgtccaatcgttcttttcggcatgccatattcaaaggttgtactacaagctaactcgcaacttcatggacgattttccattcagttcgagctgaggcccttcagttaccagggaggtgaaggcgtattcaaaacttttttggagtacctcgataaggctttaccttttgaaaagcaggctggcttagctaacgaaagtttgcagaaaaaattgtatgcattctctcaaggaaacatgcgctcattgagaaacctcatttatcaagcatctattgaagcgattgataatcagcatgcgacgatcaccgaagaagattttgtttttgcatcgaagttgacctcgggtgataaacctattacctggaaaaatccttttgatgagggtgttaaagtgacggaagatatgttgcgtccgccaccaaaggatattgggtgggaggattattatcataacgttaaacccaaaaaccaaagacgcaagggtagtaatatgtttgaataacctaggctgctgccaccgctgagcaataactagcataaccccttggggcctctaaacgggtcttgaggggttttttgctgaaacctcaggcatttgagaagcacacggtcacactgcttccggtagtcaataaaccggtaaaccagcaatagacataagcggctatttaacgaccctgccctgaaccgacgaccgggtcatcgtggccggatcttgcggcccctcggcttgaacgaattgttagacattatttgccgactaccttggtgatctcgcctttcacgtagtggacaaattcttccaactgatctgcgcgcgaggccaagcgatcttcttcttgtccaagataagcctgtctagcttcaagtatgacgggctgatactgggccggcaggcgctccattgcccagtcggcagcgacatccttcggcgcgattttgccggttactgcgctgtaccaaatgcgggacaacgtaagcactacatttcgctcatcgccagcccagtcgggcggcgagttccatagcgttaaggtttcatttagcgcctcaaatagatcctgttcaggaaccggatcaaagagttcctccgccgctggacctaccaaggcaacgctatgttctcttgcttttgtcagcaagatagccagatcaatgtcgatcgtggctggctcgaagatacctgcaagaatgtcattgcgctgccattctccaaattgcagttcgcgcttagctggataacgccacggaatgatgtcgtcgtgcacaacaatggtgacttctacagcgcggagaatctcgctctctccaggggaagccgaagtttccaaaaggtcgttgatcaaagctcgccgcgttgtttcatcaagccttacggtcaccgtaaccagcaaatcaatatcactgtgtggcttcaggccgccatccactgcggagccgtacaaatgtacggccagcaacgtcggttcgagatggcgctcgatgacgccaactacctctgatagttgagtcgatacttcggcgatcaccgcttccctcatactcttcctttttcaatattattgaagcatttatcagggttattgtctcatgagcggatacatatttgaatgtatttagaaaaataaacaaatagctagctcactcggtcgctacgctccgggcgtgagactgcggcgggcgctgcggacacatacaaagttacccacagattccgtggataagcaggggactaacatgtgaggcaaaacagcagggccgcgccggtggcgtttttccataggctccgccctcctgccagagttcacataaacagacgcttttccggtgcatctgtgggagccgtgaggctcaaccatgaatctgacagtacgggcgaaacccgacaggacttaaagatccccaccgtttccggcgggtcgctccctcttgcgctctcctgttccgaccctgccgtttaccggatacctgttccgcctttctcccttacgggaagtgtggcgctttctcatagctcacacactggtatctcggctcggtgtaggtcgttcgctccaagctgggctgtaagcaagaactccccgttcagcccgactgctgcgccttatccggtaactgttcacttgagtccaacccggaaaagcacggtaaaacgccactggcagcagccattggtaactgggagttcgcagaggatttgtttagctaaacacgcggttgctcttgaagtgtgcgccaaagtccggctacactggaaggacagatttggttgctgtgctctgcgaaagccagttaccacggttaagcagttccccaactgacttaaccttcgatcaaaccacctccccaggtggttttttcgtttacagggcaaaagattacgcgcagaaaaaaaggatctcaagaagatcctttgatcttttctactgaaccgctctagatttcagtgcaatttatctcttcaaatgtagcacctgaagtcagccccatacgatataagttgtaattctcatgttagtcatgccccgcgcccaccggaaggagctgactgggttgaaggctctcaagggcatcggtcgagatcccggtgcctaatgagtgagctaacttacattaattgcgttgcgctcactgcccgctttccagtcgggaaacctgtcgtgccagctgcattaatgaatcggccaacgcgcggggagaggcggtttgcgtattgggcgccagggtggtttttcttttcaccagtgagacgggcaacagctgattgcccttcaccgcctggccctgagagagttgcagcaagcggtccacgctggtttgccccagcaggcgaaaatcctgtttgatggtggttaacggcgggatataacatgagctgtcttcggtatcgtcgtatcccactaccgagatgtccgcaccaacgcgcagcccggactcggtaatggcgcgcattgcgcccagcgccatctgatcgttggcaaccagcatcgcagtgggaacgatgccctcattcagcatttgcatggtttgttgaaaaccggacatggcactccagtcgccttcccgttccgctatcggctgaatttgattgcgagtgagatatttatgccagccagccagacgcagacgcgccgagacagaacttaatgggcccgctaacagcgcgatttgctggtgacccaatgcgaccagatgctccacgcccagtcgcgtaccgtcttcatgggagaaaataatactgttgatgggtgtctggtcagagacatcaagaaataacgccggaacattagtgcaggcagcttccacagcaatggcatcctggtcatccagcggatagttaatgatcagcccactgacgcgttgcgcgagaagattgtgcaccgccgctttacaggcttcgacgccgcttcgttctaccatcgacaccaccacgctggcacccagttgatcggcgcgagatttaatcgccgcgacaatttgcgacggcgcgtgcagggccagactggaggtggcaacgccaatcagcaacgactgtttgcccgccagttgttgtgccacgcggttgggaatgtaattcagctccgccatcgccgcttccactttttcccgcgttttcgcaga

SEQ ID NO: 1624 - DNA, 11779 bp, Synthetic construct
  source 1..11779: mol_type = other DNA
aacgtggctggcctggttcaccacgcgggaaacggtctgataagagacaccggcatactctgcgacatcgtataacgttactggtttcacattcaccaccctgaattgactctcttccgggcgctatcatgccataccgcgaaaggttttgcgccattcgatggtgtccgggatctcgacgctctcccttatgcgactcctgcattaggaaattaatacgactcactataggggaattgtgagcggataacaattcccctgtagaaataattttgtttaactttaataaggagatataccatgggtgtactgccgagtaggcaactgataacagtacagcgcggctgaaatcatcattaaagcggtgtactgccgagtaggcaactgataactagcgaattccgagcgaaggagatatacatatgtttctacaaagaccagagccatattcagatgaaagtttagaaagttttttcatcagagttgcgaacaaaaatggctatgaagatattcatcggttcctcattgtaacaaaaaagtatttacaagatgaaaaccacgatagatttaaggctttccctactgatattaaaacaatcaatccttactcgtctaaaaacaatcatggttcaagagtagcagcactgcacaaaatagcccttatgacttttaatgagcaacctgagatactgtctttagcaataaataggacatctctaatatattcgccatcaacaaccgctctagtacgtggtagtgaggttattcctcgctcattattacgaaaaaacattattccatgttgcccaagatgtttacatgaggaaggttttggacattatttatggcatttcaacggttataattactgccacaaacataatactccattaatatataagtgcgcatgtggcgcagattatgattatcgaatagcaggcttaaatggattttgcagagaatgtgatacgtaccttaatccaaaccaacaacatccagatagtgccgaaagcaaaacttccgcttggctttcaggcaagactatcgagcaactgcctgacttgccccagagctatcgttggggtctaattcattggtggactcaccttactcaaaaagagtttgatggtgcttcctttattgacttttggcatcgttggcctgaatcctttcatcatttaatacaacaaaaaattgaatttaatttagagcattcaattattcatcatgataatttgaagctaaaagatctactgggagatttgttctttaactgtattcgattacctgaaaggaatttaaagtacaacattgtgcttaatgagttattgagatttatagatgataatttatggggtaacaatggacggcttgcaaatctaaaaatgaatgctgtagaagtctctattttcctcaactgctcgtgcgatcaaattgtattaatggtcgaacaacggtttttaaaacccagccggaaagctaaaccaaataaaccattaagttttactgattacttgtttcatctaggagatgtttattgcctttggttagctgaatttcaaaccgatgagtttaatcgaacatttatcatttcgaggtagtcaatgagtacactagctaaaattattaattcatcgtcatcagatataaatgttgaacttaagagagcttttcgcccactgagtccaaatattgacatcaccgacaacgaagatattgctctcatcattttaacgaacctagccgcaaaagtagacgcaaaaaaaaatttgaccgatagagaaaactgtaaaaaaaaattaaaagataacaactggtggtcacgttgtattaatacaatgaaatttcgacaaagccacaatgttaaatttcccgagataaaagcaaccggaataattagagcacacccaatgggtgaaatacccaagtacttactatcttcttcaaaattaaaacaaaaaactttggcttatgcgaatgattcaaaggatgtcagtgtcgctaattttttaatcagtgaatttatcttgcacggcaaaatttgttgcttgggcgtcttgcttacagatgagcagcatcctctctgggatcgtttaacaaaactgggctgttatcaaaaaacacgcaagtacgtagcaaaacaacttaaaaaaattccaaattcttgtattgaagtacagctaggtgctaattctgttcgacagatttcattacctgacgggaataactcttacttatctctatcccctgttacctctcaaacaatgcagagttcatgctatcagtctcttcataaacactattggttaagtaaaattacccgttatagcagagcttcaaatatgggtgtacttccgatgacctgcggtggaacattacgcatgttaagtcatactataagttttgaagatgtcaaacattgccaaatatcgcccaactcatcttggttaactaaagattcaatacaagcattctacgactattttgattcttcaaactggatgatgcctcacattcaaaagcaacaaaagttaaaaatactaaaaatcacaatcacagaaatgatttctcgttggttagcattacaaaaaaacacaatacaacataatcagttagagcttgtacataaactaaatttcgatctatcaaatacaaaatccttgagacaatttgcctacgatccaaaaacaactagatttctatttaccttaattgaaaatagatcaaacacacagcaacctaatgagaactttgataatcaatatcttcttttgcctcaaatttctgtttgtggtgcatctgctatgagttcatccatcactattggaataccctctttaaccgcattttatggctttattcatgcatttgagcgaaacatgcaaaaggtcttttcaaacctaaaagtcgattcatttgctatctgcattcatacttttcacttacaaaaaagagggatgactagggaaagtataataaaattgacaagtaatatatcttcccctgcaactcatgatgaatggcattgtgatctgaaatttagtctggctctcaaagtaaataatcttactcacctcaaccaaagcgaaatattgtatgcattgccaaaacgacttgctggaggctacgcaagaataaatatagatgacataaagacgattcaagtatcttctagctttaaggatttggttaaacaaatacccacttttcaaggacaatggctatccttatacaaggcgaaaattgattcctttgaaagcattattcaacaaataaaagcatcgcaaaatataatcccaacttgtgtgggttatcattacctagaaaagccgacagaacgcacttttgccctaagagactacaaacatgcgtttgctgagcctatcattggactcatcaaaccaataactattaaagaagatacaagtttgcatgatttgttttgggaccaaattaacaagccacactacaccacaatagagacaaggaatatgaataatgaagctccctattagtcttgcttatgaacgatcaatccatcccagcgatgtttgcttttttaccatttggccagatggaaataaagcccctttatcttttatgagccgaacagtacttggtcaaatggaaaccgcatcactcgcttacgatactaaaggaaaccctaaacaaacggctactcctgaagttcttgcacaaggaaaccctcatcacatggatttctgtagcgttccctttggcgcagagcatattgaatgcgttttttcagtttcattctcttcagagcttcgcaaaccttacaagtgtagcgagcctgaagttaaaaacactttgattgagctggtcaagctttatgagtcaaaaatcggttgggatgaactcgcaggtcggtttctaaccaatatttgtcaaggaaaatggttgtggaaaaacacgaaaaaaacgtaccaactaaatattgaaattaaaccttggccttggaaaaataaccccgtcatttttgaagatattagaacaaattacagtacttataatgactgccaatctgataccaaatggcaagaattaaaacaactcatcatcaatgctttctcctcaaaaaatggcctcgctattttcgagataaaagcacaattaactctaccaacaaatgctgagctttacccaagccaagcatttattgaaaaagataagaaagaaaaaaaacatcaatctagccgtatatttcaacatacatcaatcaatggacaaaaaagccctatcataggctgctataaagcaggagctggcatttttatgattgatgattggtatcctaatgcagaagaacctattcgtatagggagattcggtgtacaccaacaagatgtaacttgctatcgccccccttcaactcatcaagatctcttttctttattggagcagtctgaaaaatatatagctttattaaagaatagaaagaaaacacctcaaaaaacaataaatgaactgcactttttaatggctaaccttatcaaaggcgggttgttccagcataaaggagaataaacgatggattggtactataaaacgattcgatttattcctactaattgcaataatgaatttctagcagctaagtgtatcaatatattacacggttttagctaccgttatgatactcactctattggtatttcttttccaaactggtgtaatgaaaccgtaggagatcggatttcatttgtaagcatcgaaaaaatggcattagattacctactcactcaaaattactttaaagaaatgcaagatcttggttacttcgatatatcaaaaacattgattgttccaatcgaatgtaactttgcatgttttaagcgttatcaaaagatcgacaaatcgtcagcggctggttttcatcgaaagataaagaggcttgctaaaagagcgcataatagaggtgaggtttttgataacaagaagtataacatttacaaacaatgcgatattggacactatcattcattagcagaagaaagtaaaagtaaagggtatggatttagattaaacattcaaagaactaatgaaatcagcatcaataatatacctatttttagtagctatggattagcaaacacagcacacgcattacaatctgttcccataatttaacctttaataaggagatatagcatgcaaccttctcctgcaacgacatatcaaacagactctcctcttgagttcgcatttactcaaccagctagaaagttaacaaaatctcgtgggaaaaatatacatcgttacgttagcattaaaatgaatactatcatttcagttgaatcgacattggagttcgatgcctgttttcattttgattttaataaaaatatctctcgattttgctcacaacctattagatatagttatgtcattgatggaattattcgtacttatgttcctgactttttatgcgaattttattgtggtgagatggttctatacgaagttaaggcaccaaatgctgttaattcaaaacgttttactaaagagtttgaggcaaaaagacagtatgcgagaaaactttttgatgtagatcttgaattgattgaagaacacgatattagacatattcctcttcttaaaaacttaaaacgtatgcacagatatgcatctcattctgaattaacttatgagcaaacaactattctgaagtatttgaataaacatggctcaacaaagctcgagacaataattgatcattttagtaatagtaaaaatataattccgatgatttatgatttattgtctaagtacttgataaatactgaccttagagttcttctgaataaccaaactgaattaaagacaacttatgtctaggacatcattttctagttttcatggaaccccaacatctgatagcgaaaatgcttccagtaagctcacatttatcgaaaatgatgatttgcaagatttaacatcatttagcaaaaaagctcaaaatgaagctaaactcagattaagtatacttcgtaatatattgaataaaagttcagaaataaacttagttttaattgaacgcttacgggctgatcttcaacaacaaggagagcgatcaataccaagtgcaattactatctatcgatggtggttaacttataaaaaatcaaactttagtattttatctttagtaccaaagactaagcaaaagggaaatagaaacacgaaagtacctaaaacaatatcagtctatattgatcaagctgttgaacaagtaatttctgccaataaaatcaatgttagtacagcttttagacgagtcagaagaaaagtaagacaatataatcttacccataaaacaaagcatacctacccttcatacgaagccataagaaagcgcgtaaaaaaaatcaccccctatgaaaaattagctgcaagcaaaggagatcgaatagcaaaacgagagttccgtcgtatggggaaaaaaatccaaactgagtacttactagaacgagtagaagttgatcatacatggttagatttatttgctgttcatgaagaacatcgagtacctataggtcgtccttatttaactcaactagtagattgtcatagcaaatcagtaattggtttctaccttggctttgaaccaccaagttatatgtctgttgctttagcattaaaaaatgcaatcaaacgcaaagataatctattacaaaactatccatcaattcaaaatgagtggttatgttatggaatccctgacctacttgttacggataatggtaaagagtttttgtctaaagactttactcttgcttgtgacagtttacttataaacattcatcaaaacagagtagaaacacctgataataaaccgcatacagaacggcagtatggaaccactaacactgaattacttaatgatcttcctggtaaaacatttagtaattacttacaaagagagggctacaattccagcgacgaagcctcattaacattaagtgaaatcaaacaaatataccttacatggcttgttgatatttttcatcctagaccaaattcaagagggacaaattgcccaaatagagtatggaaacacgctgaaaaaaattggcctccgaatgaatttcttggaaccgacgaagaacttgatttctattttactaagttagataaacgaatgttaagaaaagaagggattggactagcaacagagcttttttatagcagtgaacgattagcagaataccgaggtaagaaaggtaatcataaagttgcgataaaatataaccgcgaaaatatgggctttatatgggttcttgatgaagatacagaatcttatttcaaagtccctgctattgattatgaatatgcgagtacagtaactttatggatgcataaaaaaaacctaaaaataaaacaagaactcaatattaccgaacataacttagactctgaaattgatgctgaattaagaattgatgaaattgttgatcaatctattcaaaagaaaaaaacaacaataacaaataaacgtcgtgctgctcgttatcaagaaaacgaacaaatggctgctaatgctcgacaacctaaagaaaaaaaatctgctaataatcaaaagacatctactaaaaatattgaaaaagaagatagttccggatgggatattgattatgtataggatctaaattatggatgacaacattacaagaattaccaaagcaaaaaaagcgtttgtatctacgcctgatgtagctgctatcataaacaatatagatcgatgcagaaggctctctaaatttggggcagaaccatcgtgtatgatggtatatggcgcatctggcgttggtaaaacctcaattataagaaaatacctaaaagcgaatgataaagactcaacagcacgacaagatattgtccctgttgtttatatcgaattaccagagaatgcaaaacctgtagatgccgctcgtgaactcctgctctaccttgaagatcccttagctctttatgaatcagacttagctattttaacaaaacgaatagtagatttagtaccaacaatgaaaatagagcttattatcattgatgaatttcaacacttagtagaaaaatcttcaaatagaatactctcaagagttggtgactggttaaagatgttaataaataagacaaaatgtcctgtcattctttttggtatgccctattcaaaagtagtcttggcagcaaacagtcagctgagaagccgcttttcgatacagtttgaattaaaaccatttagttatatcaataattatggcatttatgctggttttctcagacgtttagatgaagccttaccttttgatcaattatcaaaccttgcatcagaacctatagcaaaaaaaatctatgcattttcgcaaggaaatatgcgttcacttcgtaatttagtctttcatgctgcggtaaatgcaatcgaaaacgacaataactgcatcagtaaaaacgactgggaatttgcctctaatttgacatctggcaataaactctcaacatggaaaaacccttttgctcaaggcgtcaagatcacagatagaatgttgcaagaccaacctaatgacttaggttgggaagattatatgcgcaacaatagaggaaaaagaaaacctttcgatgagagtaagatctttagctaacctaggctgctgccaccgctgagcaataactagcataaccccttggggcctctaaacgggtcttgaggggttttttgctgaaacctcaggcatttgagaagcacacggtcacactgcttccggtagtcaataaaccggtaaaccagcaatagacataagcggctatttaacgaccctgccctgaaccgacgaccgggtcatcgtggccggatcttgcggcccctcggcttgaacgaattgttagacattatttgccgactaccttggtgatctcgcctttcacgtagtggacaaattcttccaactgatctgcgcgcgaggccaagcgatcttcttcttgtccaagataagcctgtctagcttcaagtatgacgggctgatactgggccggcaggcgctccattgcccagtcggcagcgacatccttcggcgcgattttgccggttactgcgctgtaccaaatgcgggacaacgtaagcactacatttcgctcatcgccagcccagtcgggcggcgagttccatagcgttaaggtttcatttagcgcctcaaatagatcctgttcaggaaccggatcaaagagttcctccgccgctggacctaccaaggcaacgctatgttctcttgcttttgtcagcaagatagccagatcaatgtcgatcgtggctggctcgaagatacctgcaagaatgtcattgcgctgccattctccaaattgcagttcgcgcttagctggataacgccacggaatgatgtcgtcgtgcacaacaatggtgacttctacagcgcggagaatctcgctctctccaggggaagccgaagtttccaaaaggtcgttgatcaaagctcgccgcgttgtttcatcaagccttacggtcaccgtaaccagcaaatcaatatcactgtgtggcttcaggccgccatccactgcggagccgtacaaatgtacggccagcaacgtcggttcgagatggcgctcgatgacgccaactacctctgatagttgagtcgatacttcggcgatcaccgcttccctcatactcttcctttttcaatattattgaagcatttatcagggttattgtctcatgagcggatacatatttgaatgtatttagaaaaataaacaaatagctagctcactcggtcgctacgctccgggcgtgagactgcggcgggcgctgcggacacatacaaagttacccacagattccgtggataagcaggggactaacatgtgaggcaaaacagcagggccgcgccggtggcgtttttccataggctccgccctcctgccagagttcacataaacagacgcttttccggtgcatctgtgggagccgtgaggctcaaccatgaatctgacagtacgggcgaaacccgacaggacttaaagatccccaccgtttccggcgggtcgctccctcttgcgctctcctgttccgaccctgccgtttaccggatacctgttccgcctttctcccttacgggaagtgtggcgctttctcatagctcacacactggtatctcggctcggtgtaggtcgttcgctccaagctgggctgtaagcaagaactccccgttcagcccgactgctgcgccttatccggtaactgttcacttgagtccaacccggaaaagcacggtaaaacgccactggcagcagccattggtaactgggagttcgcagaggatttgtttagctaaacacgcggttgctcttgaagtgtgcgccaaagtccggctacactggaaggacagatttggttgctgtgctctgcgaaagccagttaccacggttaagcagttccccaactgacttaaccttcgatcaaaccacctccccaggtggttttttcgtttacagggcaaaagattacgcgcagaaaaaaaggatctcaagaagatcctttgatcttttctactgaaccgctctagatttcagtgcaatttatctcttcaaatgtagcacctgaagtcagccccatacgatataagttgtaattctcatgttagtcatgccccgcgcccaccggaaggagctgactgggttgaaggctctcaagggcatcggtcgagatcccggtgcctaatgagtgagctaacttacattaattgcgttgcgctcactgcccgctttccagtcgggaaacctgtcgtgccagctgcattaatgaatcggccaacgcgcggggagaggcggtttgcgtattgggcgccagggtggtttttcttttcaccagtgagacgggcaacagctgattgcccttcaccgcctggccctgagagagttgcagcaagcggtccacgctggtttgccccagcaggcgaaaatcctgtttgatggtggttaacggcgggatataacatgagctgtcttcggtatcgtcgtatcccactaccgagatgtccgcaccaacgcgcagcccggactcggtaatggcgcgcattgcgcccagcgccatctgatcgttggcaaccagcatcgcagtgggaacgatgccctcattcagcatttgcatggtttgttgaaaaccggacatggcactccagtcgccttcccgttccgctatcggctgaatttgattgcgagtgagatatttatgccagccagccagacgcagacgcgccgagacagaacttaatgggcccgctaacagcgcgatttgctggtgacccaatgcgaccagatgctccacgcccagtcgcgtaccgtcttcatgggagaaaataatactgttgatgggtgtctggtcagagacatcaagaaataacgccggaacattagtgcaggcagcttccacagcaatggcatcctggtcatccagcggatagttaatgatcagcccactgacgcgttgcgcgagaagattgtgcaccgccgctttacaggcttcgacgccgcttcgttctaccatcgacaccaccacgctggcacccagttgatcggcgcgagatttaatcgccgcgacaatttgcgacggcgcgtgcagggccagactggaggtggcaacgccaatcagcaacgactgtttgcccgccagttgttgtgccacgcggttgggaatgtaattcagctccgccatcgccgcttccactttttcccgcgttttcgcaga

SEQ ID NO: 1625 - DNA, 11867 bp, Synthetic construct
  source 1..11867: mol_type = other DNA
aacgtggctggcctggttcaccacgcgggaaacggtctgataagagacaccggcatactctgcgacatcgtataacgttactggtttcacattcaccaccctgaattgactctcttccgggcgctatcatgccataccgcgaaaggttttgcgccattcgatggtgtccgggatctcgacgctctcccttatgcgactcctgcattaggaaattaatacgactcactataggggaattgtgagcggataacaattcccctgtagaaataattttgtttaactttaataaggagatataccatgggtgaactgccgagtaggtagctggaaatagtacagcgcggctgaaatcatcattaaagcggtgaactgccgagtaggtagctggaaattagcgaattccgagcgaaggagatatacatatgcattttttagttcaaacaaaactttatcctgatgaggctcttgaaagctatttgctaaggcttgctagggataactcatacgatggctatagtgagcttgctgatattttatggcaatggcttgtagagcaagatcatgatcttgaaggtgcgttgccgttagagctgggtaaagttgatgtttatcatgctaggcaagcgagtagctttagaataagagcgctcaagttggtagctcaattagctgatgtaaacgctggtaatattcttgcgcttgcatggcggcgcagtaattttaaatttggcaacttagtagcagtaagccgtaatgagcagacaattcctcttgagttacttcgcactgataatatacctgtttgcattgaatgcttgtttgaatcttcttacgttccttttcattggcatttaaagccctataagacgtgccataagcataaatcacaattaactacacattgtaaggaatgccataacttaattgattacagagcttctgaggagtttttagagtgcagttgtggttgtaaactaaccaatagtgaacagttaaacgatgcagactttaaaattgcatttgcgcttgcaagtagtaacagccataaaatagtggggttaatatcttggtttgcgaaggttaagcaacttgatgtaagcgatgctgactttaaccgtacttttgttgattactttagtacttggcctgaaagccttactactgaattagatttactcacaaacaatgcgcgcctcaagcaacttaacccttttaataaaactaagttcaactctgtttatggaaatgtgatccgtgatggtcaaatagctgcaacaagtaaccgtaaaaacaaagtacttgatgaactaattaaatattttgttgaattagttgatagtaatcctaaaactaaacatccaaatattgcagatttactgctttgtacttttgataccgcagtattattaaacaccaccacagagcaagtttataggcttcatcaagaaggctttttaaactgcgcttacccacaaaaaaagcacgaacagctcagagctgatagtcatgttttttatttacgccaagtgattgagctacagcaagcattcgcagctgaaacgcctcaaacaaaaaaacaatttatagcgccgtggtaacttatgaacttacaagatgcatttgcgattgaatcacttaaggaaaaaaccacagcacttagaaagttgtttactccatatatgtctcatgttgcggtagatggctttgaagaacaagcgctgactgtgctcattaacctagtttataaacgaagtgagattgatgatttaacaagtacaagaaccgctaaaagtgtattacgtgatgaagtgttactgagtaaatgtattaacgaagttaaatggtttcatactcataatttaaaatatcctgatatacgcgtaagccatcaacgtttaattagtaaggtagtaagtgaagatattgcgggtatttgtagccggtcattacctttaagttttggatggtcgcacaacagtgctgaaattaatcatgcaaagttatttttaacctcatttacttggcaaggtgaagtaacttgtttagcaaatttactaataaatgaggagcctgtttggattaatttaataaggacatacgggtttactaaaaaggcggttttaggcatcgcgggtaaaataaaacagcttttgccagtggcagaactcccattagaagtaagctctttttcaccacaattacaaatgccatttcagcaaagctaccttgcggttacgcctgtagtaagtcacgcaatgctggctaaaattcagcaattaacaacagatcgtaagttaaattttggtttagttgagcactcaagacctgccaatgttggcgatttagcaagctcagtaggtggtaatattagagtgctgcgttactttcctaaaacatattcaaaggctgttaactgctctgaagtattcaataatgatagtgagaaagcatttaaaattcgtgcgctattaaacagtcaatttcaacaggcgcttttggtattggtcggtattaaacagtttaatacgttaaggcaaaagcgattagcgcgagtagcggctattaggcaagtacgtgttagcttgcagttgtggctggataacattctggaagctaaaaataacgctcaagggcaagcctaccctgagtgggcaaagcattacttagatcagagtattactaactgcattagccaatttagtaacgtactaaatgagagccttggtaatttaagtaagctcaaacgctttgcgtatcaccctaatttaatgggggtgtttaaaacgcagttaaactatgtgtttactcactgtattcctgatgaagaaacattaaatgatgagcaaatagtgtatgtgcattgccaagatatgcgagtgtttgatgctgaggcaatggctaatccgtatattcaaggtatgccgtcacttacagctttaaatgggcttgctcataactttgagcgtaagctaaaaaattttatagacccttcaattaagtgtattggtagtgccattaacattgaaagttatcaactacatacaggtaaaccattacctgaaccaagtaagttaaaacaagttgctggccgtagtcatgtcataagatcaggaattatcgataaacctaaatgcgatataacactcgatttagtctttaggctttttgtaccaaacattaagctgttagataagttaaatagtcagcttgtgaaacccgcactaccatctatgtttgcaggcgggactatgcatccaccttcgttataccaaaatattgactggtgccatttacatactaaaccaagtgagctgtttaaaaatataaaggcaaaatcgttaaatggcagttggttgtacccttcaaaaaaagtagtcaaaagttttgaacagttgattgatgcgcttaacggtaactttaatttaagacctgctgccattggttttgctgcgcttgaagaacccataaagcgagatgtagccttacatgaataccattgttatgctgagcccgtaattgggcttttagagtgtgttagcaatacatcagttaagtacgcaggggctaagcagttcttccatgacgcattttgggttatggatgttcaaaaagagtctatgcttatgaaaaagtctaagtttgagtatgaataatgcaattacctcggcatttaagttacacgcgttcgctttcacccagtaaagcggtatttttttataaaacatcggagtctgattttgaaccgctgcaaatagagcaaaataagcttgttgggcaaaagtcagggtttggcgatgcgtatcaaaagcaaaatgtggctaaaaatttagcgccacaagatctagcgtttggaaacccacaaacgattgatgtgtgctacgtacctccagcagtaaatgagctattttgccgtttttcactcagggttgaggctaatagcaatgaaccacacgtttgtgatgaccctaaagttatttattggttaaaacggttttttgaaacctacaaaaaacacaatggtcttaatgaagttgcaactcgctatgctaaaaatatactgatggggaactggctttggcgtaaccgccaatcaccaaatgttgatattgaaatccttactgaacatgcagccccgatcattgttgaaggtgcacaaaaactaaaatggcaaggcaactggcaaaacaatcaaacagcattaataacattatcagaagctattcaagaagggcttagcaatcctcaaaattattgttatttagatataaccgcaaaaattaaaaatgcatttagccaagaggttcaccctagtcaaaagtttgtagacaatgttgaacaaggcatgtcatctaaacaacttgcatacactcaagtcggcgataaaaaagcagccagtttaaactcacaaaaagtaggggctgcgattcaaactattgatgattggtatgagggaggttacaaacctttacgcactcacgagtatggtgcagataagcaaatattagttgcacatagaacgcctaagagccattcagacttttattcattacttccgcgcattgccttgcatattaagcacatggaaaagcatggtttagagcaaagtgaagaatcaaacgcagttcactttattgcagcagtgttgatcaaaggcggcttgttccaaaggagtaaggcatgaagcgctattattttactattacttatttacctaaaaattgtgatgtaagcctccttgcagggcgttgtatcggcatattgcatgggtttatgagttcgcgtgaaattagtaatataggtgtgtgttttcctaaatggaatgagcaagagataggtaatgaattggcgtttgtatcgacagataaaaagcaattaaccaatctatctcagcaaagctattttgagatgatggctcaggataaattatttggcttatcaaaaatactcgaagtaccaacaaaccaaaatgaggttatgtttattcgcaaccaatcagtagctaaggcttttgttggcgaaaagcaaagacgtttaaaacgcgctaaaaaacgagctgaagccagaggtgaagtttataatcctgaatatcaatttgaggcaaaagacataggccattttcattcaatacctgtatcaagcaaagccaacggccaaagttatgttctgcatatacaaaaaattgaaaatactaatgcgacagaaaatcaatttaataattatggctttgctacaaatcaaacatttcaaggtacggttccttctttgaatacccaataacctttaataaggagatatagcatgtacagaagaaaactcaaacactcccgtgttaaaaaccttcataaatttgctagtcaaaaaaataaatctacctgtttagttgaatcctctttagagtttgatgcctgttttcattttgaattttcaccatcaatagccgcatttgaggcacaaccactaggttatgaatatgagtttgataaccgtatttgccgttacacacctgactttttacttacccacacagacggcacgcaaaaatttatagaagtaaaaccgcaaagcaaaattgctgacgaggactttcgtgcacgttttattgaaaagcaaaccatcgctaaacaagatggacgcgacttaatactggttactgataaacaaatccgtgtatacccaacactcaataacttaaaacttttacatcgctattctggttttcagtctttaacagagctgcaagcatcggtgctcgagcttgttaagcaatacggctctattaaagtgggccagttagttaactttttaaaagtaactgccggtgagctacttgctactgtgctacgcttattatcactagggcagttatttgccgacttaactacaaatgaaatatcaatagaaacagcaatttggtctaacaatgtttaatgacggtttgtttgatgatgagtttaaccagccattaccaaaagtagaaaccaaactacctcaaaattacgccaaagatttacaagcccttcctgaaaaaattaaaaatacaacatttgctaaacttaaatatattcaatggcttgaggctaatattcaaggtggctggacacaaaaaaaccttgagcctttattgaaagtaatgcctgaagttgagggtgaaaaaaagcctagctggagaacagctgcacgatggtatagcgcttatacaaatgcagataaaaatatcatggcgctaataccaagccatcaaaaaaagggtaacagggagcgcgatacagccaccgataagttttttgaaaaagcacttgagcgttacttagtaaaagaaaagccatcagtggcttctgcttacaagtattacgcagacttagttatcattgaaaacgacagcgttgtgggcagtgttttaaagcctttaacatacaaagcgtttaaaaatagaatcgataatttaccgcaatacgacgtgatggtttctcgctatggtaagcgtcttgctgatattgcttttaataaagtagaagggcatacacggcctacccgagtactcgaaaaagttgaaattgaccatacaccgcttgatcttattttattagatgatgagctacatatcccgcttggtaggccaacacttaccatgttagtcgatgtgtatagccattgtattgttggcttctactttagcttcagcgagcctagctatgatgcagtaaggcgagcaatgctaaatgcaatgaaacctaaaagtgatgtggcaaaactatacccagatacgataaatgagtggaaatgtgctggcaaaattgaaactctcgttgttgataatggcgctgaattttggagtaacagccttgaacttgcttgtgaagaaattggtattaatactcaatataaccctgttgcaaagccgtggttaaaaccctttgtagaacgtatgtttggcacaattaacactgaattattagaccctgttcctggtaaaaccttttctaacattttacaaaagcatgaatacaatcccaaaaaagatgcaatcatgcgctttacaacctttatgcagctattccataaatgggtagtagacgtttaccatcaagatgccgatagccgctttaagtacatacctagccaactatgggagcaaggctttaatacgttaccgccaacagtgctgagtaatgctgatcttcaacaattagatgttgtgctcagtatttcaaaccatagggtgcttcgtaaaggtggaatacggctagaaaatttaagctacgacagtactgaactagccaactatagaaaacagtttagccataaagtatctcaagaagttttaattaaattaaaccccgatgatatttcttatatatatgtttacctcgataagctagagcattacataaaagtgccatgcatagatccaaacggttacacccaaaatttaagtttgaatcagcataaaataaatatacgtattcatcgcgattttatttccggatctatcgataatgtaggcttagcaaaagcgcgtatgtttattcataataaaattcaaaacgagtttgaagagttaaaaaatgcaccaaaacactcaaaagtaaaagggggtaaagcattagctaagcatcaaaatgtaagtagtgactcacaaaaatcaatagctcagagcgagccattagaacccaaaaaggttacacctaaagagcaaccaacagatagctgggatgactttatttcagacctagatggattttaattatgctgaccgataaacaaaaagcaaaacttaatgaatttcgcgatgtatttattgaatacccaataataactactgtatttaacgactttgacagattaagacttggtaaaggattagcgggcgaaaagccctgcatgctgttaaatggcgatacaggcacaggtaaaacagcactaataaaacagtataaagaacgccatttaccgcaatttattaatggagtgatgaaccaccctgtattagtaagccgcatacctagtaacccgacactagaatctactttagccgagcttcttaaagacttagggcaagtaggtagtacagagcgcaagctgagaataaacggtacgcggttaacgacatcattaataaaatgcctaaaaacgtgtggcacagagcttataattattgatgagtttcaagagctgattgagcacaaccaaggtaaaaagcgccgcgagattgctaatcgattaaaatacattaacgatgaagcgggtgtatcgattgtattggtgggtatgccgtgggcagaaaaaatagcagacgaaccccagtggtcatcgcgtttattagtaaggcggcagctgccttattttaaattatcagaaaacccaaagcattttgtacagttaataattggcctagctaaccgtatgccattcaccgaaaagccaaaattaagtgagcaagcaacagtatttgctttgttctcattgtcaaaaggctgttttagaactcttaaatactttttagatgatgccgtactttatgcattaatggataacgcgaaaaccctcacaaccaagcatctagttaaagcatttggagtactgtttcctgatgtaccaaacctatttaccttgcccgttgcagaaattacagcaagtgaagttgagcgctattcactttataaacttgaaagcgcccaagatgaagatccgtttatagcgactaagtttactgaccaaatgccgattagtcagttgttgaggaagtaacctaggctgctgccaccgctgagcaataactagcataaccccttggggcctctaaacgggtcttgaggggttttttgctgaaacctcaggcatttgagaagcacacggtcacactgcttccggtagtcaataaaccggtaaaccagcaatagacataagcggctatttaacgaccctgccctgaaccgacgaccgggtcatcgtggccggatcttgcggcccctcggcttgaacgaattgttagacattatttgccgactaccttggtgatctcgcctttcacgtagtggacaaattcttccaactgatctgcgcgcgaggccaagcgatcttcttcttgtccaagataagcctgtctagcttcaagtatgacgggctgatactgggccggcaggcgctccattgcccagtcggcagcgacatccttcggcgcgattttgccggttactgcgctgtaccaaatgcgggacaacgtaagcactacatttcgctcatcgccagcccagtcgggcggcgagttccatagcgttaaggtttcatttagcgcctcaaatagatcctgttcaggaaccggatcaaagagttcctccgccgctggacctaccaaggcaacgctatgttctcttgcttttgtcagcaagatagccagatcaatgtcgatcgtggctggctcgaagatacctgcaagaatgtcattgcgctgccattctccaaattgcagttcgcgcttagctggataacgccacggaatgatgtcgtcgtgcacaacaatggtgacttctacagcgcggagaatctcgctctctccaggggaagccgaagtttccaaaaggtcgttgatcaaagctcgccgcgttgtttcatcaagccttacggtcaccgtaaccagcaaatcaatatcactgtgtggcttcaggccgccatccactgcggagccgtacaaatgtacggccagcaacgtcggttcgagatggcgctcgatgacgccaactacctctgatagttgagtcgatacttcggcgatcaccgcttccctcatactcttcctttttcaatattattgaagcatttatcagggttattgtctcatgagcggatacatatttgaatgtatttagaaaaataaacaaatagctagctcactcggtcgctacgctccgggcgtgagactgcggcgggcgctgcggacacatacaaagttacccacagattccgtggataagcaggggactaacatgtgaggcaaaacagcagggccgcgccggtggcgtttttccataggctccgccctcctgccagagttcacataaacagacgcttttccggtgcatctgtgggagccgtgaggctcaaccatgaatctgacagtacgggcgaaacccgacaggacttaaagatccccaccgtttccggcgggtcgctccctcttgcgctctcctgttccgaccctgccgtttaccggatacctgttccgcctttctcccttacgggaagtgtggcgctttctcatagctcacacactggtatctcggctcggtgtaggtcgttcgctccaagctgggctgtaagcaagaactccccgttcagcccgactgctgcgccttatccggtaactgttcacttgagtccaacccggaaaagcacggtaaaacgccactggcagcagccattggtaactgggagttcgcagaggatttgtttagctaaacacgcggttgctcttgaagtgtgcgccaaagtccggctacactggaaggacagatttggttgctgtgctctgcgaaagccagttaccacggttaagcagttccccaactgacttaaccttcgatcaaaccacctccccaggtggttttttcgtttacagggcaaaagattacgcgcagaaaaaaaggatctcaagaagatcctttgatcttttctactgaaccgctctagatttcagtgcaatttatctcttcaaatgtagcacctgaagtcagccccatacgatataagttgtaattctcatgttagtcatgccccgcgcccaccggaaggagctgactgggttgaaggctctcaagggcatcggtcgagatcccggtgcctaatgagtgagctaacttacattaattgcgttgcgctcactgcccgctttccagtcgggaaacctgtcgtgccagctgcattaatgaatcggccaacgcgcggggagaggcggtttgcgtattgggcgccagggtggtttttcttttcaccagtgagacgggcaacagctgattgcccttcaccgcctggccctgagagagttgcagcaagcggtccacgctggtttgccccagcaggcgaaaatcctgtttgatggtggttaacggcgggatataacatgagctgtcttcggtatcgtcgtatcccactaccgagatgtccgcaccaacgcgcagcccggactcggtaatggcgcgcattgcgcccagcgccatctgatcgttggcaaccagcatcgcagtgggaacgatgccctcattcagcatttgcatggtttgttgaaaaccggacatggcactccagtcgccttcccgttccgctatcggctgaatttgattgcgagtgagatatttatgccagccagccagacgcagacgcgccgagacagaacttaatgggcccgctaacagcgcgatttgctggtgacccaatgcgaccagatgctccacgcccagtcgcgtaccgtcttcatgggagaaaataatactgttgatgggtgtctggtcagagacatcaagaaataacgccggaacattagtgcaggcagcttccacagcaatggcatcctggtcatccagcggatagttaatgatcagcccactgacgcgttgcgcgagaagattgtgcaccgccgctttacaggcttcgacgccgcttcgttctaccatcgacaccaccacgctggcacccagttgatcggcgcgagatttaatcgccgcgacaatttgcgacggcgcgtgcagggccagactggaggtggcaacgccaatcagcaacgactgtttgcccgccagttgttgtgccacgcggttgggaatgtaattcagctccgccatcgccgcttccactttttcccgcgttttcgcaga

SEQ ID NO: 1626 - DNA, 11896 bp, Synthetic construct
  source 1..11896: mol_type = other DNA
aacgtggctggcctggttcaccacgcgggaaacggtctgataagagacaccggcatactctgcgacatcgtataacgttactggtttcacattcaccaccctgaattgactctcttccgggcgctatcatgccataccgcgaaaggttttgcgccattcgatggtgtccgggatctcgacgctctcccttatgcgactcctgcattaggaaattaatacgactcactataggggaattgtgagcggataacaattcccctgtagaaataattttgtttaactttaataaggagatataccatgggtgaactgccgagtaggcagctgaaaagtacagcgcggctgaaatcatcattaaagcggtgaactgccgagtaggcagctgaaatagcgaattccgagcgaaggagatttacatatgcactttttagttcaaaccaagccctttagggatgaaaccctagaaagctacttattacgtttaacgcgagataacgcttataccgactaccatgagctggccgatattatttggcagagattggttgagtgtgaccatgagttagaaggggcatttccgctagaactgaaaactgccaatctataccacgccagccaatcaagctgttttcgcgtcagggcgttcaagctcgttgcgcagtgggctgctctggagccgcttgaacttattcgcttgtcctggctgcgaagcaatactcagtttgggcatttatcggcgcttattcgcgatcagttgctcattccccgaacgctcctaagagagagtcacatcccggtgtgcctaagttgtttaaaggaagagggctacattccctattattggcatttaaagccctacaaggcctgtcacaagcacaaaatgcaattacagtctcattgtgctgagtgtggcgaactaatcgattacagagcgtctgagcggttctctcagtgcaactgtggtgcaaagctaaagactacagctcctgcaagtgaagcggacatagcggttagtgaagggctcagcggtgcggatgcgcacgatttggtgggtaagttgacatggtttgcttaccagtacggccaagaccaagagcacgccagcttcaatgaggctttcatcgcttatttcaaatattggcctgataactttttcgctgaactcgatgaaaaagcatctagggcacgagaaaaacagctaaggccattcaatcatacaaaatttgatagtgtttttggtgatgtgatcaaagtcagcaaagtagccgggcccaatgtcttgagaacgaatattatcgttgattcattactggagtttttcagtgacctagttgagaagaacccaaaacaaaagcacccaaatatcgcagacttgctggtaaatagttcggatgccgcaactttgatcggtacgaccttggagcaggtgtttaggctataccaagaggggcagttgacttgttgcgagaggttgaacaagaacgaacgtttgcagccagacaggtgtgttttctacttgcgtcaggtagttgaattggcgcaatcacaaggacgctatgtcggtgacttcaaaaatcaacttatcacgccttggtgaattatggacttagctgaagcattggcaatcaaatctgtgcgtgagaaatctgatgcgctgcgaaaactttttgctccatacgcttcatccgttgcggttgacggatatgagcagcaggtggctaccgtgctaatcaacttggtttacaagcgcaatgaacaaattgatctggcaagcatcaaagcggcgaaagatgtgcttaaggatacagagctaatggcgaagtgtatcagtgaggtgaaatggtttcacacccataacctgaaatatcccgatattcgagtcagtcaccaacgcttgattgcacaagtaatcgataaggatattccagctatcaccagcgcttctttacctaaattgctgggctggtcccacaacagtgccgagatcaatcatgcaaaactgtttttgacctcatttaagtggcagggcgaagtaaataatctagcgggtgttttggttgacgaacatcccgcttggatagaagcgatgagaaacttgggtttaaccaaaaagtccgtaatggcattagctacgcatatccgagagttattacctgccactgacttgccgggcgaggtcagcgagttcacccctcagttgatgatgccctatggaaaagactacctcagtgtttctcctgtgctgagccatgcaatgctggtcagggttcagcaactggctcgggataaagtagtgaattggggagtggttgaacatacacgacctgcaaatgttggtgatttacctagttccttgggtggtaatgtacgcgtgctcaggtattttcctgcaacatcgctaaaaggcagcttaggagaatatatagaaaacgacccgaacgaaagactattcaagcataaggtactaacgagcaaaagttttaaaacgtcacttattattttgactggtaaatcagtttataacaccttgaggcagaaacgattagcgcgtattgctgcgatacgtcaattacgaagtactttgatgcactggttagataaaattatagagtttcaaaataatggcaaccacaatcttgtgccagagcctatgaagtcgttcatagaaaatttgaaaccgaatcttaatggtgtagtttgcgagttaagtggcttgttgaatgagcagttgtcctcccatcactcattgaagaaatttgcataccatcctgacttaatgtcggtattgaaacgccagctgcaatatgtgctaacgcacggggaaacggtagacgaaaccttagttgattctcaaattttgtacgttcactgtaaagggctgcgaatatttgatgctgagggaatgccaaatccttatttgcagggcattccgtcgttaaccgcattggcgggagttgcacataaatttcagcgcaaacttcagtctattgttgacccttctatcgagtgtattggttcggctatattcgtacacagctatcaattacataccggcaagccattgcctgagcagaatcagcttaaaactaaccaaggaataacctcggcaaaaagaccggggatagttgataagcccaaatgtgatatgacgattgatttggtatttcggctttttgtgcctcacgagagcactcggactcaattaaccgacaatatgtttaaggcagctttccctacctcttttgctggcggcaccatgcacccgccatcgctgtatgaaaccgtcgagtggtgccaggcattcaccagcccaacccagctttttggagaactgagtttgctgccgtcgagaggttgttggctttatccttcaaaacaccaggtgagaacgttcgaggacatggtggaattactagacgcagatccaaatcaacggcccgctgggttagggtttgcgtcactggaacagccgacccagaggaaagaggcgttaggatctaagcattgttatgttgagcccgcgattggtttattagaatgcgttaacccaattactacacgcatgggaggagcaaaggcattctttcataatgccttctgggtaataggagtcgagaaaacgtctatgcttatgaaaaaagccaagtttgagtacactcaatgcgactcccgcgacacctaagttatacgcgttccttgtctccgggcaaggccgtattcttttatcaaactcctgaatccgattttgaaccattgcagatagagcagaacaagcttattgggcagaaatccggttttaccgatgcatatcaaaagctcggagaacccaaaagccttgcaccccaagatctagcttttgggaatccacagaccatagacgtatgctatgtgccaccgactgtgaatgagattttttgccgtttttctctgcgggtagaggcgaacagtgttgaaccatacgtttgcgatgaccgtaaagtgagctattggctgaagcgctttgtcgaaacctacaaggagcatggtggttttaaagaattagcctcacgttatgcgaaaaacatactgatgggaaattggttatggcgtaataagcaatcaccgggctttgatgttgaagtgctcacggaacactcagaaccaatcgtgattgagggtgctcaaaggttaaaatggaatggcgtttggggaaacgatgaggctgcattagcaaccttgaccgaggctattgaaaatggtttggctaatccacaggcctattgctatttggacattaccagcagaattaaaacggccttttgccaggagatccaccccagtcagaagtttgtagacaatgttgaacaaggaatgtcatccaagcaactagcctacactcaggtggatggtaaacaagttgcaagtttgaatgcgcaaaaagttggcgctgcaattcaaaccatagacgactggtacacagaagatctcaagcgtttgcgtattcacgaatacggtgcagacaagcaggtattagttgcgcatagaacgccaaagaatggtttggatttttactctctacttccaaaggtcgctgtttatatcaggcacatggagagggatggtctggaagatgatgaagagtctaagcacattcactatctggcatcgatcctgttgaaaggtggtttattccaaaggtctaaaggatgaagcgcagctatttcacagtcacctatctcccaattaattgcgattactcgctgcttgctggcaggtgtattggcattttgcatggctatttaagcagatttgaacttgatggaataggtgtgagttttcccaaatggaacgaggagactgtaggtaatcaaatcgcatttgtctccgagagcgagagccatttacagacactacggcagcaaaactactttcagatgatgagccatgacggcctattcaaattatctgtgactagaacagttccagagcaggttgatgaaattcagtttgtgcgcaaccagtccatatccaaagcctttgtcggcgaaagacgcagaagaatggtaagggcaaagctaagagctgaagcccgaggggaagagtacaacccgatttatgaatttgagcccacagaaatagagcattttcactcaataccgatcacaagtaaaagcaataacaatgagtttgtattacatatccagcggcgggaatgttctggtacagcgggtggatttaataaatacggttttgccacaaacgaacatcacctcggtacagtaccgagcctttctggccttttaattagttaacctttaataaggagatatagcatgtatagacgcaatcccaagtcatccagagtcaaacaccaattcaaattcgctagtcaaaagagcaagaacacttgtttcgcagaatcagcattagagttcgatgcttgtttccactttgagtattcctcagcgattgtcgcgttcgagactcagcctcttggctttaagtacgactttgaaggccgtacttgcccatatacacctgattttctattaactcacagcgatggcacgcaaaagtatatcgagataaagccggtaaaagagcttgctaaggatgagtttcggcaacgctttgagcagaagcagttggcatcaaagcaactgggtattgagcttatattggtgacagataagcaaattcgagtatttcctgttttagataatctgaagctattacatcgttactccggattccaggtattgactgaattacatacggttgtggtcgggttagtaaaaagtactgggttagtgaaggtcgcgcagcttgtaaattacctaaaggtttctgccggagaagttttatccatcgttgcaaggctgttgtgcatcgggcagttggcaacagatctcactacagatgcactttcattagactctgtaatttgggcctcagatgaacagtaaaagtctggggttgtttgacgatgagttccagcatccgataccccaagtagaagcaccaaaaagcaccaaagctgaaaaagatctcagtgcctacccgcaagaaatacagcagacaacctatgcacggcttaaatacattcggtggcttaaagagcgtatagttgggggctggactgagaaaaaccttgcgccactcataaacgaaatgcctaaagtcgaaggtgcagataaacctaactggcgtactgcggctcgttggtttaaatcttattctgaatctgatgaatccatttttgctcttattcccaaacaccaaaagaaagggaaaagaacacaaagaacagacacagacaagttctttgaaaaagcacttgaacgatttttggtaaaagaaaggccttctgttagctcagcttatcaatattacaaagacttagtggtaatagagaacgaaaaagtaataggtgaagatttaaggcctttaacgtacaaggcgtttaagaaccgaatagataaattaccacattatgaagtattacgagcccgctatggtaaacgtatcgcagatttagcttacaacaaagtagagagccacaagaggccgacacgagtgttagaaagggtagaggtagatcacactccattagacttaattttattggatgatgagttacaaataccgctaggacggccaaccctaaccattttaattgatgtctatagccattgtattgtcgggttttaccttggtttcaatgatcctagttacgatgcaattcggcgggcgatgctaaacgcaatgaaacccaaaaactggataaaagagcagtatccagatataacccacgattggcattgttgcggaaagattgaaaccctcgtagtagacaatggtgttgaattttggagtaatagttttgagtctgcgtgcgcgcagatcggcattagtttgcaatacaacccagttggcaagccctggcttaaaccatttgtggagcgaatatttggagtaataaatacccagttattggaccctattccaggaaaaaccttttcaaatatgatgaaaaaggagggctatgacccaaataaagacgccatcatgcgctttagcgcgtttatggaagtattccaccactggattatagacgtctatcaccaagaagctgacagccgctttagttacattcccgcccttgagtgggatagggggtacgagcagctcccgccagcgccattatctagtgacgacatccagcgattggaaatcgtgctgggtataagcacttggcggcatatccgtaagggcggtattcattttgaaaatttacgttacgacagtaacgaacttgctgattacagaaagcgctttagccccaaggcttcagtaaaactgatgttgaaggtgaatccagaggacctttctagggtctatgcctttttacctgagttagatcactacattgaagtgctatgtatcgatcctaatggttatacagcgggcttgagtctacaccaacataaggtcaatgttcgcttacagcgtgattttatcggttctcacatggatgttgctgctctcgctagggcgaggatgctaattcacgaaaaaattcaaaatgaagttgagttgttagccaactcgacaaaaaaacctaaagcaaggggcggtaaggcattggccaaatatcaaaatgtcgccagtgacaatcttgtatcggtgaagcctagttcacccactaaaaagccacctgagaaagtagaaacagaggaagcgcagaataaaggtgattgggacgacttcgtgtcagatctcgagggcttctgattatgctctcagagatacaaacgcagcgcctaaatgaatttattgacgtattcattgaatacccattaatgactacaatcctcaatgattttgaacgattaaggacgggtcaaaaacttgccggcgagaagcagtgtatgttgctaacgggtgacacaggctgtgggaaatcttctgtaattaaccactacaagaataaacatccggcatgtcacattgacggtgtttaccatcacccagtattagtttcccgcatccccagccgtcccacgttagaatcaaccatagcgcagctacttagcgaccttggtcaggtaggagctgcaaaaaggaaattaaaacgcaatgatgccaatcttaccgattcattaattactaatttaaaatcgtgtggcactgaactcatcattattaatgaatttcaggaactagtggaatccaatcaagggaaaaagcgcaacgaaattgcaaataggctcaaatacctaaacgaagaggcgggtattccgatcgttttggtaggtatgccttgggccgaacaaatagccgaggagcctcagtggtcctccagattgatggttagacgctttataccttactttaaactctcaaaagatttaacactgttcgttcgggtattgatgggcttggctacacgtatgccgtttcgtgataagccccgtttgcaagagcaagatattgtctatgccttgtttgcggtatcgaaaggctgtttccgtaccttgaagtattttctgaatgaagctgtaaaacaggctttgatgtacggctcagagacgttaaccaagcagcatctcagcgccgcatttgaagtgttttacccgggtatagaggacccgtttaagctatcggtggatgagataacggcctgtgaggtagagagctactcggtatatcacaccgacagtagctcggataacgaggcgcataatcggacgaggtttacggaaaaaatgcctatcaaccagttgctaaaaaaataacctaggctgctgccaccgctgagcaataactagcataaccccttggggcctctaaacgggtcttgaggggttttttgctgaaacctcaggcatttgagaagcacacggtcacactgcttccggtagtcaataaaccggtaaaccagcaatagacataagcggctatttaacgaccctgccctgaaccgacgaccgggtcatcgtggccggatcttgcggcccctcggcttgaacgaattgttagacattatttgccgactaccttggtgatctcgcctttcacgtagtggacaaattcttccaactgatctgcgcgcgaggccaagcgatcttcttcttgtccaagataagcctgtctagcttcaagtatgacgggctgatactgggccggcaggcgctccattgcccagtcggcagcgacatccttcggcgcgattttgccggttactgcgctgtaccaaatgcgggacaacgtaagcactacatttcgctcatcgccagcccagtcgggcggcgagttccatagcgttaaggtttcatttagcgcctcaaatagatcctgttcaggaaccggatcaaagagttcctccgccgctggacctaccaaggcaacgctatgttctcttgcttttgtcagcaagatagccagatcaatgtcgatcgtggctggctcgaagatacctgcaagaatgtcattgcgctgccattctccaaattgcagttcgcgcttagctggataacgccacggaatgatgtcgtcgtgcacaacaatggtgacttctacagcgcggagaatctcgctctctccaggggaagccgaagtttccaaaaggtcgttgatcaaagctcgccgcgttgtttcatcaagccttacggtcaccgtaaccagcaaatcaatatcactgtgtggcttcaggccgccatccactgcggagccgtacaaatgtacggccagcaacgtcggttcgagatggcgctcgatgacgccaactacctctgatagttgagtcgatacttcggcgatcaccgcttccctcatactcttcctttttcaatattattgaagcatttatcagggttattgtctcatgagcggatacatatttgaatgtatttagaaaaataaacaaatagctagctcactcggtcgctacgctccgggcgtgagactgcggcgggcgctgcggacacatacaaagttacccacagattccgtggataagcaggggactaacatgtgaggcaaaacagcagggccgcgccggtggcgtttttccataggctccgccctcctgccagagttcacataaacagacgcttttccggtgcatctgtgggagccgtgaggctcaaccatgaatctgacagtacgggcgaaacccgacaggacttaaagatccccaccgtttccggcgggtcgctccctcttgcgctctcctgttccgaccctgccgtttaccggatacctgttccgcctttctcccttacgggaagtgtggcgctttctcatagctcacacactggtatctcggctcggtgtaggtcgttcgctccaagctgggctgtaagcaagaactccccgttcagcccgactgctgcgccttatccggtaactgttcacttgagtccaacccggaaaagcacggtaaaacgccactggcagcagccattggtaactgggagttcgcagaggatttgtttagctaaacacgcggttgctcttgaagtgtgcgccaaagtccggctacactggaaggacagatttggttgctgtgctctgcgaaagccagttaccacggttaagcagttccccaactgacttaaccttcgatcaaaccacctccccaggtggttttttcgtttacagggcaaaagattacgcgcagaaaaaaaggatctcaagaagatcctttgatcttttctactgaaccgctctagatttcagtgcaatttatctcttcaaatgtagcacctgaagtcagccccatacgatataagttgtaattctcatgttagtcatgccccgcgcccaccggaaggagctgactgggttgaaggctctcaagggcatcggtcgagatcccggtgcctaatgagtgagctaacttacattaattgcgttgcgctcactgcccgctttccagtcgggaaacctgtcgtgccagctgcattaatgaatcggccaacgcgcggggagaggcggtttgcgtattgggcgccagggtggtttttcttttcaccagtgagacgggcaacagctgattgcccttcaccgcctggccctgagagagttgcagcaagcggtccacgctggtttgccccagcaggcgaaaatcctgtttgatggtggttaacggcgggatataacatgagctgtcttcggtatcgtcgtatcccactaccgagatgtccgcaccaacgcgcagcccggactcggtaatggcgcgcattgcgcccagcgccatctgatcgttggcaaccagcatcgcagtgggaacgatgccctcattcagcatttgcatggtttgttgaaaaccggacatggcactccagtcgccttcccgttccgctatcggctgaatttgattgcgagtgagatatttatgccagccagccagacgcagacgcgccgagacagaacttaatgggcccgctaacagcgcgatttgctggtgacccaatgcgaccagatgctccacgcccagtcgcgtaccgtcttcatgggagaaaataatactgttgatgggtgtctggtcagagacatcaagaaataacgccggaacattagtgcaggcagcttccacagcaatggcatcctggtcatccagcggatagttaatgatcagcccactgacgcgttgcgcgagaagattgtgcaccgccgctttacaggcttcgacgccgcttcgttctaccatcgacaccaccacgctggcacccagttgatcggcgcgagatttaatcgccgcgacaatttgcgacggcgcgtgcagggccagactggaggtggcaacgccaatcagcaacgactgtttgcccgccagttgttgtgccacgcggttgggaatgtaattcagctccgccatcgccgcttccactttttcccgcgttttcgcaga

SEQ ID NO: 1627 - DNA, 12025 bp, Synthetic construct
  source 1..12025: mol_type = other DNA
aacgtggctggcctggttcaccacgcgggaaacggtctgataagagacaccggcatactctgcgacatcgtataacgttactggtttcacattcaccaccctgaattgactctcttccgggcgctatcatgccataccgcgaaaggttttgcgccattcgatggtgtccgggatctcgacgctctcccttatgcgactcctgcattaggaaattaatacgactcactataggggaattgtgagcggataacaattcccctgtagaaataattttgtttaactttaataaggagatataccatgggtgacctgccggataggcagctgagaaaagtacagcgcggctgaaatcatcattaaagcggtgacctgccggataggcagctgagaaatagcgaattccgagcgaaggagatattcatatgtttctcattcatcccgaaaaacactaccaagatgagtcccttgaaagttttttgattcggctttgtgagtgtaatggctttgagtcgtttcggttgttgagtggtgcgctatgggaatggctcgttgataacgaccatcaagcagcaggggcgctttcccgtcagttgtgtgagataaacctttatcatgccaagcattccagtggttttagagtacgagcttttgagctactagattcattgtttaaggggaacgctagaccattgatgcaacatgcgctgttgcattcagccgtaactttttcccccaacttaacgtcagtctttcgggctggtatacatatccctcgctgttttcttcggcaaagttacacgcctgtctgtccggcatgtttaacggaagctccatacattcgccaatattggcacttaaagccttatcagagctgtcatcgtcatggtgttgccatgttgttccattgcccatcatgcagtgccgttctgaattatcaagatactgagcaaatcgagacttgtagttgtgggtttgatcttcgtgatgcagggacaaatgttgcttcatcagagcaaattgcaatcagccagcttgttgttgaaggggaaatgcaaaatgctctctcaattagtcattggttaggcgcactactttggttttatcggtacaagcagtctcagctttctctcaatgtggtcaaagaacctgagtttggccgggcagttgaatatttttcacagtggcccaatgcgtttgtgcgtgatttgcatgagttggctacacaggctgaaatgaaacttgtcagaggatttaatcacacgcgcttttcggaggtatttggcgatctcctgagttcatcacgtaaattgccatcgagcgatactcaacaaaatttcatcctcaaggccgtgatcgattttcttcagcagttggtgcgagataacccgaaagccaaagagacgaatattgctgatgtgaagttgacggtcgtggaggccgcagccctgttaacaacttcgacagaacaagtgtatcggctttatgaagaagggtacttgcaatcatctgtgcgttttaaactgcattcaaagttatcgcctaatgatgcggtgttttttctacggcatgttgtggagttacgtatggctgggatggcatcggattacagtgctaatgatgtttatcttccatcatggtgagatcaatgcatttatcggagttactactcgttcaagatacagaagaacgcaatcagttattgagaaaagcacttgcgccttatacctgtctcgttgacgtaacaggctatgaacgccagctattgatgattgctattaatataacggtgccgagaaaagatgtagacgatgttttggataagaagctggccaaatcattgctgaccaatacaaagcaccttcaacgttgtattgatgaagtgcaatggttccatacccacaatgtgaaataccctgattctcgggtaaaggggcaacgcattatctcccttaagcaagatgaggttgacggggttttgtgtagtgccaatcttccttcatcattgggttgggcgcataacagttctcaggttaatcctgctaaatttttctctattcgctttatttggcaaggccgagcaatgtcactgcttgaaaccgtgattgatgctccttctgaatggaaggtggcatttcgatctttagggataataaaaaaacagttatcggagttcagggaaatattttcgacctactatacctctagtcagatcccatctgaagtcagtgattattcaacgcaaatacgcgtgccatatcagggctattattgtgctctaacccctgtcatcagtcacagcgttcaatcgaaaatccaaaagatggcatttggccgaaaggtgaaatcgagcaatgtagaacatcatcatcccgcgagtgtgggaagtttggttgctgcgttaggggggaatattcgggtactggattatcctcctaatgttcgtcagaaaacatcagaggctttttcactgtaccgagcggtaagtgaaaaggaggtatttgatcactcgattattaaagagaagcgctttctggatgcattgagtcgcattgcgggagagaaccctacaccaacactgaggcagcgacgacaactgcgagtatctgcattacgctttgtacgaaagcagcttgccttatggctggctccgatgatggagtggcgagatagtattggtggggaatctcgtcattctcccattgaaacactagaagaacagttgctttacctgcccattgcacacttaccggatgtccttagcgatttaaacacacgttttcatcaagcattgcaataccatcgtcgaggggcgcgttatgcctaccatccagaggtcttgtttccgattaaacagcagttgaaatggctgcttcgttatatggcaaatcaacaagatgcacttataacgcctgagccaaattgtgtgtacctgcatcttcagcaacttgtggttcatgacgcttcacttctgtctaacccttatgtttcaggaatacctgccttaacagcgttggggggattgatgcataactatcagagaagattgagtgcattgatggagtgtgaatgcttaattcaacgaggtgcttggtttattgcccactatcatcagcagaagatcaagaaacttcccgaaccggataaggtgaggtatctgaagaaaagatcagatgttcagcgaccaggtattaccgatggaaaatatggtgacttaaccatgaatttggtgctggaattacagttacccgagtcagtatcaatacctgaactatcccttttacaagccgcgttcccatcgcgttttgcaggcgggacgcttcaccctccatcattgtttgagcaaacagattggttatcggtttactctaaccaaagtgaattgttttctgttttagctcgcttacctcgaagtgggtgttgggtttatcctgatgataaaggtgtgagttcgtttgatgaactggcttctcgtttggataatgaccctgacttaaagcctgttggtctgggttttatcccactggaagaacctcattgccgagtagggagtatcgcgccttaccattgttatgtcgaaccatgcattggtgttgttcggtgtatgaaccccattaacgttaggctctcaggtagccagcaattctatcagtcggctttttggcactttgatattgcaaatgacgctatgcttatgaaaaaggcaacatgaggtcatgtgaaatgcaaatttgccgccacttaaactatgttcgctcattatcaccgggaaaggcggtgttttactatcaaacacccgagtctgattttgtaccgattcaggtagaaacgaaccgaattagagcagcaaaatccggatttactgaagcgtatgataagaaccaaaatctcaaaaatgttgccccgcaagatctcgcttacagtaatcctcagtgcattgatgcttgttatgtcccgccgaatatttcagagatacattgccgtttttcactcagagtagaagctaactctcttcagcctgatagctgtgaagatcagaaagtaaggcgttatcttattcaattagcatcaatttatgcgcaagtgggcggctaccaagaattggcaaagcgttactgtaaaaatattctgatgggtacatggttatggcgcaataatcacacgttaggaactcggattgatgtgattacgtcgagtggccgctgttacgccattgacgatgcccgttatttggattggattgattggccggaagaagaacaagtaatgctgaatgacttggcttcagaaatggcggcggcattgtgtgaacccaaacaattttggtttgcagacataaaagcgacgttgaaaacggggttttgtcaggagcttcatcccagccagaagtttactgatagtcatgaacaaggagagtcatctaaacagtacgccacggtagaatgtcctaatggtattcaagctgcatgttttcatgccgagaaggttggggcggcgctacatctgattgatgattggtgggatgaggttgcagataagaggctgcgaactcatgaatacggggcagatcgagactacctgatcgctcgccgccacccaatgaagaagcaagacttttattcgttactgacactaactgctgtgtttatcaggcagcttaggaacgtcagggataaagggggggaaattccgcctcaagttcattacctaatggctgtgttgtgcaaagccggtatgtttcagcgaggtaaaagctgatggctaatcgtttttattttctgattcgttatatgccagaagatgtggatgaggggttattagctgggcgttgtattagtatcttgcatggtgtgttgtcctcggatcagaatgatattgatggcggtattggcgtggtttttccgcaatggagctgtacgtctttagggcggagtatcgcatttgtttccgataatcagcgacatttagaacagttaagccagcaacattactttgctgtgatgaagggggataacctctttgacatctcgcatatccaagcagtaccatcaggcttatcagaaatacgattcaaacgtaaccaaggaatcgcgaagtgctttgcaggtgaaaaacgtagaaggttagctagggcaaagcgtcgagcagaagcaagaggtgaagtctttaatccaaagcacggtatgtcagatcgtgaagtgagcctatttcacaaagcggttatgaccagtaaaagcacaggccaaaaatacttactgcatattcaaagagaaacagttacaggatcgagtgtgagtcagtattcgcaatatgggctggcaaccaacattgagtgcatgggcacggtgcctgatttaagtccgataataccctttttttgacctttaataaggagatatagcatgtaccgccgaaagctcaaacattcccgcgtaaaaaatctttttaagttcgtcagtgccaaaatgaatcaggctatgacggttgaatcctacttagagttcgatacctgctttcacctagaatattcatcatccatcatctcttttgcggctcagccggaaggtttcatctatcgtattgatggccgagattgctcttatacgccagattttcaaatacttgaaaatgaagaggtaaagtggattgaagtgaagcctttcgtgaaaactcaacgtccagattttcttcagcgttttaaagtgaaacaagaaaaagccttagcgcttggtgttcctctcattttggtgacagagaaacaaatcagggtgaatcccgtcttgaataatctcaagatactgcaccgttattcgggttttcagtcgcttacagatttacatatccgtcttttgtcattggttaaaacggtgggaaaaataagcgtgagtgatgcagcctgtcggttaggtattgatcaggggatgatggtgaaatcggcttttagcttggtgtcatccggtatgctaacggctgatttagtacatgatgaattgggtttacattccattgtttggagtgaacacaatggctaaagacatcagtaccggactttttcaagatgagatggcagttgcatccagcagtgagccagttgaagcattacccagttcaacggatgatttctttgaacgtgacctcgcttcttatcctgatgaaattcaaatagaagtcagacgtaggattgaataccttcaatggattgaaaagcaccttgtaggaggctggacacaaaaaaacttagacccactgattgaaaaagcagccagagaaatagactttcctcctccaaaatggcgagcattagcgaagtggtggagtgtctattcatcatctgggaaaatgttggcgtcattagtgcctaagcttcatcgtaaaggtaatcgaaatctaaaaataaccaatgaattatcattttttgatcgcgctgttgaacgttatttagtccccgaacgtccttctatttccgctgtttatcagtattacaccgatcttattcgcattgagaatcagcatcttgtcggcgagaaagttcaagccctctcatacaaaggcttctataaccgaataaagaagctgccagcttatgaggttgcagtagcaagacatggtaaatacctcgctgacatggagttcaacaagatcgatgcgcatcaaccacctagccgagtattggaaaaggttgaaatagaccattcaccattagatcttatcctacttgatgatgagctaaatattccgctaggacgcccttatctgacactactgattgatcagtacagtaaaagcattatgggttttcatttagggtttaaagaacccagctactattcggtaatgaaggccatccttaatgcgataaagcctaaagatgatattgcggagcgatttccaggtgttgtgcatgactggtattgtcagggcaagatggagtcactggttgttgataatggggcggaattttggagtaagagtcttgagcagtcctgccttgaagttggtattcatattcaatataaccccgttcgcaaaccttggttgaagccgttggtggagcgaatttttagaaccatcggcagcaagttgctagtgactattcccggaaagaccttctctaatattttagcgcgtgaagagtatgatccgcgaaaagatgcggtgatgcatttttcagtattcaatgaactgtttcataaatggattattgatgtgtatcactatgaatcggattcccgaaagcgtgcaattccttatgtgaaatggcaggaaggggttgtggtgatgccacccattagttatgagccggaagatctggaaaagctatctgtggttttagggatcaaagaattacgcaaacatcgacggggtggtattcaccttcatgggttacgctatgacagcgaagagttagcggattaccgccgaatgtactcgcgagacatcgacgtactcacgaaaactaaccctgatgatatttcaagcatttatgtctatttagagcataagcagcaatacttgaaagtgccatgcatcgaccctatcggttacacgaaaagcctatctctcactcagcatcatattaatcaacgcttgcatcgagatttcattgacagtcaactagacctagaagggttggctcgcgtcagaatgtatattcatgatcggattgaacaagaagcagacgagattaagaaccttaaccgagggaggcctcgacgtactacaaaaggtatggcgagattagctaaacataacggtgttgccagcgatgttcaaaccagttgtgtaccagaaacactaccggaactgtcgatgccagataaagggaaagaatccaaacagttgccggactctgatgaatgggatgatttcatatctgatctcgagccatattgatggatagtttgtctcctgaagatgaagcgaagtatcaggcgtttgttgatatttttgtcgagcagccgatagccacaatggttatggctgattttgaccgattgagatacaaccgacaatttggtggtgatcagcaatgtatgttactcacgggagatacgggttctgggaagtcttttttaatcaaagagtattgtcggcgtcttgctcaaaccaacccaatgaaacaagcattggtactttcaagtcgcatccccagtaaaccgactcttgaatccacgatcattgaattgctcaaagattttggccattttggtgcgacgtaccgaaaagggaaaagcaaagatcaatccttaaccgtctcattgattaaatgcttaaaggcatcttgcgtagaactcattatcattaatgagtttcaggagttggtagagtttaaaacagggcgagcattgaatgagatagcaacgcgcttgaagcacatcagtgaagaggcgacagtaccgattgtgttggttggcatgccctgggctgcgaagatagccaatgagccgcaatgggcgtcaagactgcttatcaggcgagaattaccatactttaaactctccgaagaaccagaacacttcatccggtttatcaaagggcttgccgccagaatgccttttaccgaactgccaaaactggataacaagcagacgatactggctctgttctctgcctctaacggccagactcggcgtttaaagcaattattaaatgaagccgttaaactggctttagttcagaatgcggtgacgttaaccaatgaacatttagcggatgttttccgtatgatattccctgccatccctaatccattcttagcgtcgatagagcaaatagaagggcaagaagtgagtttaccctctcattacgacagtggtgcagacaatgaatttgaagccattatcccgactcagtacacagatcgccttcctttatcgcaactattgcgtaaaagtagaaaaactaagtaacctaggctgctgccaccgctgagcaataactagcataaccccttggggcctctaaacgggtcttgaggggttttttgctgaaacctcaggcatttgagaagcacacggtcacactgcttccggtagtcaataaaccggtaaaccagcaatagacataagcggctatttaacgaccctgccctgaaccgacgaccgggtcatcgtggccggatcttgcggcccctcggcttgaacgaattgttagacattatttgccgactaccttggtgatctcgcctttcacgtagtggacaaattcttccaactgatctgcgcgcgaggccaagcgatcttcttcttgtccaagataagcctgtctagcttcaagtatgacgggctgatactgggccggcaggcgctccattgcccagtcggcagcgacatccttcggcgcgattttgccggttactgcgctgtaccaaatgcgggacaacgtaagcactacatttcgctcatcgccagcccagtcgggcggcgagttccatagcgttaaggtttcatttagcgcctcaaatagatcctgttcaggaaccggatcaaagagttcctccgccgctggacctaccaaggcaacgctatgttctcttgcttttgtcagcaagatagccagatcaatgtcgatcgtggctggctcgaagatacctgcaagaatgtcattgcgctgccattctccaaattgcagttcgcgcttagctggataacgccacggaatgatgtcgtcgtgcacaacaatggtgacttctacagcgcggagaatctcgctctctccaggggaagccgaagtttccaaaaggtcgttgatcaaagctcgccgcgttgtttcatcaagccttacggtcaccgtaaccagcaaatcaatatcactgtgtggcttcaggccgccatccactgcggagccgtacaaatgtacggccagcaacgtcggttcgagatggcgctcgatgacgccaactacctctgatagttgagtcgatacttcggcgatcaccgcttccctcatactcttcctttttcaatattattgaagcatttatcagggttattgtctcatgagcggatacatatttgaatgtatttagaaaaataaacaaatagctagctcactcggtcgctacgctccgggcgtgagactgcggcgggcgctgcggacacatacaaagttacccacagattccgtggataagcaggggactaacatgtgaggcaaaacagcagggccgcgccggtggcgtttttccataggctccgccctcctgccagagttcacataaacagacgcttttccggtgcatctgtgggagccgtgaggctcaaccatgaatctgacagtacgggcgaaacccgacaggacttaaagatccccaccgtttccggcgggtcgctccctcttgcgctctcctgttccgaccctgccgtttaccggatacctgttccgcctttctcccttacgggaagtgtggcgctttctcatagctcacacactggtatctcggctcggtgtaggtcgttcgctccaagctgggctgtaagcaagaactccccgttcagcccgactgctgcgccttatccggtaactgttcacttgagtccaacccggaaaagcacggtaaaacgccactggcagcagccattggtaactgggagttcgcagaggatttgtttagctaaacacgcggttgctcttgaagtgtgcgccaaagtccggctacactggaaggacagatttggttgctgtgctctgcgaaagccagttaccacggttaagcagttccccaactgacttaaccttcgatcaaaccacctccccaggtggttttttcgtttacagggcaaaagattacgcgcagaaaaaaaggatctcaagaagatcctttgatcttttctactgaaccgctctagatttcagtgcaatttatctcttcaaatgtagcacctgaagtcagccccatacgatataagttgtaattctcatgttagtcatgccccgcgcccaccggaaggagctgactgggttgaaggctctcaagggcatcggtcgagatcccggtgcctaatgagtgagctaacttacattaattgcgttgcgctcactgcccgctttccagtcgggaaacctgtcgtgccagctgcattaatgaatcggccaacgcgcggggagaggcggtttgcgtattgggcgccagggtggtttttcttttcaccagtgagacgggcaacagctgattgcccttcaccgcctggccctgagagagttgcagcaagcggtccacgctggtttgccccagcaggcgaaaatcctgtttgatggtggttaacggcgggatataacatgagctgtcttcggtatcgtcgtatcccactaccgagatgtccgcaccaacgcgcagcccggactcggtaatggcgcgcattgcgcccagcgccatctgatcgttggcaaccagcatcgcagtgggaacgatgccctcattcagcatttgcatggtttgttgaaaaccggacatggcactccagtcgccttcccgttccgctatcggctgaatttgattgcgagtgagatatttatgccagccagccagacgcagacgcgccgagacagaacttaatgggcccgctaacagcgcgatttgctggtgacccaatgcgaccagatgctccacgcccagtcgcgtaccgtcttcatgggagaaaataatactgttgatgggtgtctggtcagagacatcaagaaataacgccggaacattagtgcaggcagcttccacagcaatggcatcctggtcatccagcggatagttaatgatcagcccactgacgcgttgcgcgagaagattgtgcaccgccgctttacaggcttcgacgccgcttcgttctaccatcgacaccaccacgctggcacccagttgatcggcgcgagatttaatcgccgcgacaatttgcgacggcgcgtgcagggccagactggaggtggcaacgccaatcagcaacgactgtttgcccgccagttgttgtgccacgcggttgggaatgtaattcagctccgccatcgccgcttccactttttcccgcgttttcgcaga

SEQ ID NO: 1628 - DNA, 12107 bp, Synthetic construct
  source 1..12107: mol_type = other DNA
aacgtggctggcctggttcaccacgcgggaaacggtctgataagagacaccggcatactctgcgacatcgtataacgttactggtttcacattcaccaccctgaattgactctcttccgggcgctatcatgccataccgcgaaaggttttgcgccattcgatggtgtccgggatctcgacgctctcccttatgcgactcctgcattaggaaattaatacgactcactataggggaattgtgagcggataacaattcccctgtagaaataattttgtttaactttaataaggagatataccatgggtgaactgccgaataggcagctgaaaatagtacagcgcggctgaaatcatcattaaagcggtgaactgccgaataggcagctgaaaattagcgaattccgagcgaaggagatatacatatggcttttcttttttctcctaaagcgcgatcatttagtgatgagtcacttgagagttacctgctgcgagttgttgctgagaacttctttgattcctatcagcagctgagtttagccataagggaagagttacatgaacttgattttgaagctcatggcgcatttcctgtagaactaaaacgacttaatgtttatcacgctaagcacaatagccactttagaatgcgggcattaggcttacttgaatctctccttgatttgccgcctcatgagctacaaaaactagcactacttcgctcgaacaaaaggtttgtgggaggtatgtcggcagtgcatcgtaatggtgtagacattccattgagctttattcgttgcgctgatgaggacggtatcgaaagcctacctatttgccctcaatgcctgaaagaggagccctatattcgtcaggcttggcatattaagccgattgaagtgtgtgccaagcatgagtgtgaactgattcatcattgccctgattgccaacaacctatcagttacattgagaatgaatctattactcactgctcatgcggttttgagtttgccaccgcttcgagcgagaaagccgatagccaagcggttgtattgtcccgtagcttgtttgatggtgatgcattatctaacaatcctctgttatttatgggtacttcagtgactcatcgatttgccgctttgctttggtatctgaagcgtcatgttcaaaatatagagtgtaaattggatgagtctgtaaattactttgaggcttggcctgaaaacttttatcaagagttagatgagcttttagctggtgctgagctgaaacttattgatttgtttaatcgaacgtctttgagttttatttttggtgagttgattttacagtctcaatgtttattgccagaagataaaacaccacactttatcgatatggggttaatggaataccttggcaaattagttgagtcacatcctaagtctaaaaagcctaatgtggctgatatgttggtgtctgtgactgaaaccgcagttttgctctctaccagtcatgagcaagtgtatcggctttatcaagatggtgtgttaactgctggatttaaacaaaagattcgcactcgaatcgatcctcatattggtgtgttctatttaagacaagttattgagtacaaaacgagttttggtaacgataaacaagggatgtatttatcagcatggtagataaacttaagttccacgaattgctcgatattgacgacatctctgagcgtaatattgctttaaggcgagcatttactggctatacagtgccgatggatgtgacgggcaatgaggcctctgcgttaactattttacttaatctgacttaccctagaaaacgggttgatgatctacttgataaacggttagccaagcagacactcaatactgatgcacacctagatgccagtattgacgaagtgcaatggttacatacgcataatttaaagtatccagacatacgagtaagcaagcaaaggctgattacagcatctccgctatcacactctcatatattgagtagtgcaaactgcataagcaccttgggttggtcacatgacagtgccaaagtgaatttagcaaagttgttttcatgtcattttaattggcaagaccgtgtttgttgtcttgcaactttgttgtcagatcctcctaaaatttggaaagaggcttttcaagcgttaggcatgcttgtgaaggactttatgaatttgtgtggcaggattaaggcttcattgcctagctatgagagtcccagtcgtgtcgataaatattcgattcaagttcgcctgccttatcgagatggctatttggcgatcacaccagttgttagccatgcacttcaagctgaaatacaacaagctgcaatggctaagcagtgccgatacactaattttgagtttacacgtcctgcggctgttagtgagctgtcggcctctcttggtggtaacgtcaaagcgctgaattatccacctcggataggaaatgcagtgcatggattaagtgactcttggttattaaaatttcaagcaggtcaaacagtattaaaccaaggtgcgttatcacaacctcgatttaagagagccttagagggccttctatcaaatggttttgaactggcattgaagcaacgcaggctgcataaagtagcaagcatgaggcagataagagcaaccttgactgaatggttgtcaccattattagagtggcgtttagaggttgaagagaacaagaataatgttagcgaactcgcctgtattcatggctcatttgagtatcagtttttaactgcgcaaaaagaaaaccttgtcgggttactaaacccaatgtttagcctgttaaatacaatcttgtctaactcaaacacattacaaaaatatgccttccatcagcgtttgatgaggccactgaaatgtagtttgaaatggttgctcgataacctctcgaaagaatcgaatgcaatagattcagatgaggacaatcaacagcgttatttgtatttgaaaggcataagagtatttgatgcccaagcgttatctaacccttattgtgcaggtttaccttcattaacggctgtatggggcatggttcataactaccaacggcgattaaataaaaggctaggtactcagcttagattgacctcattttcatggtttattcgccagtactcatctgtagcgggtaaaaaactgcctgagtacggtatgcaagggcaaaaagaaaaccagtttagacgggctgggattgtagataacaaacattgtgatttagtgtttgatcttgtagtgcacattgatggctatgaagaggacttagatgcaatcgataattctacagatgctataaaagccagttttcctgcaacatttgccggaggtgtaatgcatcctccagagatcggctcagtcgatgagtggtgtgagctgtatcctagtgaaacatcactttattctaagctaaggcggcttcctgcatccggtaaatgggttatgccaactaggtatcaaatggatagccttgatgggttgcttcagctattgaagcttaatgtagcactctgcccagtcatgtcaggctatctgatgttaggaccccctgaaagccgcaaaaattcgttagagccattacattgttatgctgagcccgcgataggagtggttgagtgtgccactgctattgatataaggttgcaagggatgagtaacttttttagacgggctttttggatgctcgatataaaagagacttcaatgctaatgaaacggatttgaggatgctttatggagttatgtaatgttttaaagtacgaccgctctttgtacccaggtaaggcggttttcttctacaaaacagctgaaagtgactttgtccctcttgaggctgaaatcaatcgtattcgaggtcaaaaagcaggctttacagaagcctttactcctcagttcaaatccaaaaacttagcaccccaagatttagcccactgcaatccccttatccttgaagagtgttatgttccgccaaatgttgagtatatttattgtcgtttctcattgagagtacaagctaactctcttaaaccagctggttgcagcgaaccgacagtatttgctttacttgaagagttcgctgccatatttaaagcgtgtggcggttacaaagaactagctactcgatactgtaaaaacgtgctgttaggcacctggctctggcgtaaccaaaatacggggaactctcaaatagatattaaaactagcgctggtaattgctatcaaatagctaatactcgccaacttgcttgggacagtcgttggcctgccgatgctcagcaagtattggaagagttaagtgatgaggttcatcaagcgttaactgatcctactgtattttggcatgccaatatcaccgcaaaaattgaaacggctttctgccaagagatctatccaagccagtcttttggcgaaaaggcggcacagggtgaagcatcaaaacaatttgctaaagtgaagtgtgttgatggtcgttatgccgttagctttaattcggtaaaaatcggcgctgcactgcaattaatagatgattggtgggatgttgacgattccaagcgattacgtattcatgaatacggtgcagacaaagaattaggtgttgcgcgccgcgctcccgaatctaagcagagtttttattctctatttatcaatacagaactctatcttgcagagcttaatcaacagctcgctgaggatgaatattccattagcccaaatatttactatctgtttgcggtgttaataaagggcggcatgttccagaaaaaggctgaagctaaaagcaaatcaaaagccgaaacctccaccgctaaaataactcctgctaaggcctagtatgcatcgatattattttatggtgcgatttttacctgaacaagcaaacttagctctgttaatgggacgctgcatttcaatcatgcatggctttatttgtaagcatgacattcaagggcttggtgtgagttttccagcttggtctgatgcatcaataggcaatatgattgcttttgtccacacagatatagctgcattgaacgagttaaagctacaaggctattttcaagatatgcaggagtgtggcgtttttaaagtcgataatgttgaagcggttcctgatgattgcgtggaagttaggtttaagcgcaatcaaggtattgcaaaaatgtttgttggtgaagctaggagacgattaaaacgtctggagaaacgtgctctagcaagaggggaggtttttaatccaaataaaaacgatgagccgagagagttagattgctttcattgcatagcaataggaagcaccagtactgaacaggattttcttttgcatgttcaaaaagaaattgtacaaaagtacgaagaacctgagtttaatcaatatggattagctacaaataagttactgagagggacagttcctgaatttagtgaattttaacctttaataaggagatatagcatgtatattcgtaatttacgtaagccttcgcccaataaaaacgtctttaaattcgcgagtgcaaaagtgagcgaaacgataatgtgtgaaagtacattggagttcgatgcatgtttccaccatgaatataatgagacaatcgagacttttggcagccagcctaaagggttttattactgttttgaggggaaaaggttgccttatacgcctgatgcgttacttcactacattgatgggacgacaaagtttcatgaatataaaccttacagcaagacattcgaccctatttttagagcaaagtttgtagctaagaaagaggctgctcaggcactcggcactgagcttatacttgttactgataagcaaattcgtgtaaatccaatcttaaataatctcaaattgcttcatagatactccggaatctatggtgtgactgacatccagcgtgagttgctacagttgattcgacactcaggaaagattcagttagatgatgttgctgatgaatatgagctttcagtcggtgaaactcgctcgtttctttattcactaatcaataaaggcttgctagaggcagatctaactcaagatgaccttagctgtaatccatttgtttggtgtaatgcatgattgaatttaaagatgagtttacagagtctacatctgtcaaaaagcccgatacccctggtcaatacatcaagttagatgatgctgagatacttaaacgcgatcttgatacttttcctgactttcttaaagaaaaagcctttgataaatataaactaattagttttattgagcaggaaaactcagggggatggacgcaaaaaaagctagatccaattcttgataaactatttgaaggcaatagagataaacggcctaattggcgtaccgtggttcgttggcgtaagagttatatcgatagtaatggtgatttagcctctttggttgttaagcgccataaaatgggcaaccgaaagaaacgagtggaaggcgacgaggtattttttgagcgagcattatctcgtttcctagatgccaaaagaccgaaagtgacaacggcctaccagtactataaagatgccatcacgattgagaatgaaacaatcgtcgatggggaaatccctattatttcctataccgccttcaatcaaagaataaagtcactgccaccttatcctatagctgtcgctaggcatggtaagttcaaagctgatcagtggtttgcatattgttcttctcatataccaccaactcggattttagaacgggttgaaatagatcatactccacttgatttaatccttctcgatgatgaattacagctccctcttggaaggccctacctgactttaatcgttgatgtttttagtaattgtgttttaggttttcatttgagttataaagctccctcttatgtatcagcggctaaagctattgtgcatgcgataaagcctaaaactctgggtattgtgggaatagagcttcaaaatgattggccttgttatggcaaatttgaaaccttagttgttgataatggagctgagttttggtcaaagagtttagaccatgcttgtaaagaagctggtataaatattcaatataaccccgtgcgtaagccgtggttaaagccgtttgttgagcgtttctttggcatgattaaccaatattttttaaccgaactcccagggaaaacgttttcaaatattctcgagaaagaggactacaaacctgaaaaagacgccattatgcgtttttcagtatttgttgaagagtttcatcgctggattgttgatatttatcatcaggattcagactctcgtgatacgcgtattccaataaagcagtggcagcatggctttgatgtctatcctccattgcagatgagtgtggaagatgagaaacgttttaatgttctcatggggatcactgatgaaagaacattaactcgaaatggttttaaatttgaagagttgatgtatgactcaactgcattagcggattatcgtaagcactacccacaaactaaagacacaataaaaaagctgattaaaatagaccctgatgatctctctaatatccatgtttacctcgaagagttagagggctacctcaaagtaccttgtaccgatactacagggtatgccaatggtttgagtctgcatgagcataaagtgattaagaagattaaccgtgaaattatacgcgagagtaaagacaacttaggtttagccaaagctagaatggcaattcatgctcgtgtacaacaagagcaagaactctttaatgaatccaaaacgaaagctaaaatctccgcagtaaagaagcaagctcaactcgccgatattagtaacacaggtcaaggtactattaggcttgaaaacagtgacaccctttcagacataaccaacaaaccagagtctaatatcagtgacatcctcgataactgggatgataatatagaggggtttgaatgaataccttaaccgctcatcagatggagcagttgggcaggtttaatgattgttttgtcatgcatcctcaagctaaggtcattttcaatgattttgatgatctaaggttaaatcgaaactttcaatcagaccaacagtgcatgttgttgaccggagatacaggtgtaggtaaaagtcatctgattaacaactataaaaaacgagtgttagctagtcaaacatatagccgtacttcaatgccggtattagttacccggatctcaagtcataaaggtcttgatgcgactctgaggcagatgttaactgatttggaatcatttggcagccaacaacgaaaagggcagaattataaaatagatttgaaaactcagttggttaaaaatttagttagagcgaatgtagagctacttattttcaatgaatttcaagagttaatagagtttaaaacacctaaagagcgtcaaacaatagctaatgaattgaaattcatcagcgaagaagcaagagttccaatcgtcttagttggcatgccttggactgaacaaatcgctgaagaaccacaatggtcatctcgcttaatacgtagaagaaaacttgaatattttagtctccaaaaagacagtaaatattatcgtcaatatctaataggattagccaagcacatgccctttgatgagcctcccaagattgaagataaacatattgctataccattatttgcagcctgccgaggtgaaagtagggtattaaatcatctactatcagagacattaaaacttgtaatggtgaatggtgatcgcagtcttgatattaggcatttagctcaaacttatagaaaactttatgagagtcaggaaagtgaggctgcttcggttttttttaacccttttcttgagccgctagataaggtccttatttcagaagttgttaagccatcccgatataaccccaatgcgatgacccctgatgagatgttgattaagcgcgagttttctgcgccgagtaccttagctcaattactcagtaaatgacctaggctgctgccaccgctgagcaataactagcataaccccttggggcctctaaacgggtcttgaggggttttttgctgaaacctcaggcatttgagaagcacacggtcacactgcttccggtagtcaataaaccggtaaaccagcaatagacataagcggctatttaacgaccctgccctgaaccgacgaccgggtcatcgtggccggatcttgcggcccctcggcttgaacgaattgttagacattatttgccgactaccttggtgatctcgcctttcacgtagtggacaaattcttccaactgatctgcgcgcgaggccaagcgatcttcttcttgtccaagataagcctgtctagcttcaagtatgacgggctgatactgggccggcaggcgctccattgcccagtcggcagcgacatccttcggcgcgattttgccggttactgcgctgtaccaaatgcgggacaacgtaagcactacatttcgctcatcgccagcccagtcgggcggcgagttccatagcgttaaggtttcatttagcgcctcaaatagatcctgttcaggaaccggatcaaagagttcctccgccgctggacctaccaaggcaacgctatgttctcttgcttttgtcagcaagatagccagatcaatgtcgatcgtggctggctcgaagatacctgcaagaatgtcattgcgctgccattctccaaattgcagttcgcgcttagctggataacgccacggaatgatgtcgtcgtgcacaacaatggtgacttctacagcgcggagaatctcgctctctccaggggaagccgaagtttccaaaaggtcgttgatcaaagctcgccgcgttgtttcatcaagccttacggtcaccgtaaccagcaaatcaatatcactgtgtggcttcaggccgccatccactgcggagccgtacaaatgtacggccagcaacgtcggttcgagatggcgctcgatgacgccaactacctctgatagttgagtcgatacttcggcgatcaccgcttccctcatactcttcctttttcaatattattgaagcatttatcagggttattgtctcatgagcggatacatatttgaatgtatttagaaaaataaacaaatagctagctcactcggtcgctacgctccgggcgtgagactgcggcgggcgctgcggacacatacaaagttacccacagattccgtggataagcaggggactaacatgtgaggcaaaacagcagggccgcgccggtggcgtttttccataggctccgccctcctgccagagttcacataaacagacgcttttccggtgcatctgtgggagccgtgaggctcaaccatgaatctgacagtacgggcgaaacccgacaggacttaaagatccccaccgtttccggcgggtcgctccctcttgcgctctcctgttccgaccctgccgtttaccggatacctgttccgcctttctcccttacgggaagtgtggcgctttctcatagctcacacactggtatctcggctcggtgtaggtcgttcgctccaagctgggctgtaagcaagaactccccgttcagcccgactgctgcgccttatccggtaactgttcacttgagtccaacccggaaaagcacggtaaaacgccactggcagcagccattggtaactgggagttcgcagaggatttgtttagctaaacacgcggttgctcttgaagtgtgcgccaaagtccggctacactggaaggacagatttggttgctgtgctctgcgaaagccagttaccacggttaagcagttccccaactgacttaaccttcgatcaaaccacctccccaggtggttttttcgtttacagggcaaaagattacgcgcagaaaaaaaggatctcaagaagatcctttgatcttttctactgaaccgctctagatttcagtgcaatttatctcttcaaatgtagcacctgaagtcagccccatacgatataagttgtaattctcatgttagtcatgccccgcgcccaccggaaggagctgactgggttgaaggctctcaagggcatcggtcgagatcccggtgcctaatgagtgagctaacttacattaattgcgttgcgctcactgcccgctttccagtcgggaaacctgtcgtgccagctgcattaatgaatcggccaacgcgcggggagaggcggtttgcgtattgggcgccagggtggtttttcttttcaccagtgagacgggcaacagctgattgcccttcaccgcctggccctgagagagttgcagcaagcggtccacgctggtttgccccagcaggcgaaaatcctgtttgatggtggttaacggcgggatataacatgagctgtcttcggtatcgtcgtatcccactaccgagatgtccgcaccaacgcgcagcccggactcggtaatggcgcgcattgcgcccagcgccatctgatcgttggcaaccagcatcgcagtgggaacgatgccctcattcagcatttgcatggtttgttgaaaaccggacatggcactccagtcgccttcccgttccgctatcggctgaatttgattgcgagtgagatatttatgccagccagccagacgcagacgcgccgagacagaacttaatgggcccgctaacagcgcgatttgctggtgacccaatgcgaccagatgctccacgcccagtcgcgtaccgtcttcatgggagaaaataatactgttgatgggtgtctggtcagagacatcaagaaataacgccggaacattagtgcaggcagcttccacagcaatggcatcctggtcatccagcggatagttaatgatcagcccactgacgcgttgcgcgagaagattgtgcaccgccgctttacaggcttcgacgccgcttcgttctaccatcgacaccaccacgctggcacccagttgatcggcgcgagatttaatcgccgcgacaatttgcgacggcgcgtgcagggccagactggaggtggcaacgccaatcagcaacgactgtttgcccgccagttgttgtgccacgcggttgggaatgtaattcagctccgccatcgccgcttccactttttcccgcgttttcgcaga

SEQ ID NO: 1629 - DNA, 12074 bp, Synthetic construct
  source 1..12074: mol_type = other DNA
aacgtggctggcctggttcaccacgcgggaaacggtctgataagagacaccggcatactctgcgacatcgtataacgttactggtttcacattcaccaccctgaattgactctcttccgggcgctatcatgccataccgcgaaaggttttgcgccattcgatggtgtccgggatctcgacgctctcccttatgcgactcctgcattaggaaattaatacgactcactataggggaattgtgagcggataacaattcccctgtagaaataattttgtttaactttaataaggagatataccatgggtgttctgccgaataggcagccaagaaaagtacagcgcggctgaaatcatcattaaagcggtgttctgccgaataggcagccaagaaatagcgaattccgagcgaaggagatattcatatgaatacagacattcaactttaccctgacgaatcgctcgaaagtttcttgctgcgcttatcgcaagaacaaggctacgagcgattttctcattttgctgaggacatctggttcgacacgttagatcagcatgaagcgattcccggtgctttccccttagaactcaaccgaatcaatatctaccatgcgcaaaccacaagccaaatgcgggtgcgagttcttatccatcttgagaaccaattaaaactcaataactttggtgcactgcgccttgcgttgtcacattcaaaagctcaattttctcccgaatacaaagccgtgcatcggttgggagctgattatccttttgtttttcttgctaaacgcttcacgcctatttgccctttatgtattagtgaggctccatacattcgccagcagtggcaatttctttctcagcaagtttgtgagcgccacggctgtaaattggttcatcactgcccagagtgccaatcgagattggaataccaaaccaccgaaagtattagccaatgcgaatgcggttttgaactccgcaactcacctgtagcagatgcgccagtggctgcgctactggttgcaagatggttgtcaggaaatgactcaaaacctttgggattactgaaggctgaaatgacgccctctgagcgctatggttttttactatggtacgttaatcgttacggtgatattgagaacatcagtttcgagtcatttgttgagtattgctcttgttggccaagagtgctccaggaagaacttgatgagttggtaaacaaagccgatctcattcgtatcaaagattggaaaaagacgtttttcaatgaagtttttggcgctttacttaaagattgccgccagttaccaagtaggcagttagagcgtaatagcgtgctcacgcaagtgttagcctactttacaaagttaatggcaacactaccttcaagcagcaaagggaatgtaggcgatgtgctgttgagccccttagaagtgtctacattgctttcttgcacaacggatgaggtgtatcggttgtatgagtttggtgagattaaagcagcgattaggccgcggatgcataccaaaattgccagtcatgaatcggcgttcaccctaagaagtgtcatcgaaacaaagctgactcgcatgtgctctgaaaatgacggtttaagcgtgtatctacctgagtggtaattatgacgaaattaagtgatctactagctattgaggacgaagcaataaaacaaactgctcttaagaagatgtttatgccctatacagaggacgtttgtgttgatgggtatgaacaagaaacgttgacgattttgcttaatctcagttctagtcatcaagctgataggtgctcggattggttagatgtagctcgggctcaaaggtatttaaaagaccgcgaaaacttagatgcctctcttgctgaaatccagtggttccacacacataacctaaagtttccagactgtcgagttaaggaccaacggataattgcgcgacctctttctacagccgaggagtttatttcaagtgcagtattggatcagcgattgggctgggctcataactctgctgtctatcgtcacacattatggttactgaatccttttaaatggcaatcacagccagtgtgtattctttcgcttattcagcagaaaaatccagtttggcttgatctgcttacagaatttggcttggatgtgaagtcacttgctcgcttacaacgtgcgattgaagaacagcttcctgagaatagttttcccgacagtgttagtacttacagtaagcaattacggtttcctttgggggatgattatgtttcgatcacccccgttgtgagtcacgcacttcagtgcgaactagaaataagagcgcgaagtccagaaaacaagttcagttttgtctcttcgtcactgcctaactctgccagtattgggaacctgtgtggcagtttgggtgggtatatgagagtcctaaattacccgctaggtgttaagcaggccaagggtgggacgttaacggaaaaccgtcaaaagagtggtcattactttgatgactatcaggtaactaacgccaaaatttgtcaggtgctaaatcgcctaattgggtctgagccatccaaaacacagcggcaaagagaaagggctcgtaaggttagaagtaagattttacgaaagcaaatagccttatggatgctgccactcattgagttaagagacatcgccgaatctgaacccaatcagcaacaactagagcatgacgacactttagctcaagcctttttgtcgttgccagaatgggagcttggctctttggctggtgagtttaaccgacgcttacatctcgcgtttcaaaataatatctattctgccaagtttgcttatcatcccaaactgatgcaggtagctaaagcacaagtgacatgggtgcttgagcaactaagtaagccaattaacaatcaagatacgttgacgggggagcaatatatctacctgtcgtcaatgagagtgcaagacgcggtagcgatgagtaacccttgtttgtgtggtgtgccgtctttgacggccatttggggattcatgcacgattatcaaaggcaatttaatcagttggttaacaatgattccccagttgagttttcgagtttcgctttttatgttcgtaacgagaatattcaatcaacagcgaagctgacagaaccaaactcagtcgccaaagctagaacggtttctaatgcgaaacgaccaaccattcgcagtgaacgattgtctgacctagaaatagacttagttatcagagttcatagtgaaagccgaatttcagattttagatcagcgcttaaaacggcccttcccgttgctttcgccggaggggcattataccaaccacagctatcgatgcagattgagtggcttagaacatttacaggcaggagtgaacttttccatgttttaaaaggattacctgcatacgggcgatggttatacccaagtgaaaagcaacctactaattttgatgagttagagcggttgctcactcaagacgatgataacttgcccgtttctcttggctaccatttattagagcatcctactaagaggggtaacgcaatcacaggttgtcatgcttatgcggagaatgcgatagggttagctaagcggataaacccgatagaggtccgttttagtggacgagatcactttttaaaccacgccttttggtcgatagaatgcagtagcgaaactattcttataaaaaactatagggattaatcgtttatggaactttgcactcagttgaactatgttcgatcactttctgctggcaaggcttatttctactatctatccgaaagtggtgagatgtgtccctttaatgtagatagaacccgattgcgcgcaccaaaagggagttattcagaagcatataaggggaacaagttcgttgacaagaatgttgccccccaagacttggcatattcaaaccctcagttcatcgaagagtgctatgtaaagcccggcgttgatgaaatctattgcgcattttcacttcgtattcgggccaattcgttaaccccagacatctgtagtgatgatgaagtgcgcagtaagctttctatgtttgctaagatttataaagaactcaacggatacaaagagttagctaatcgttatgcgaagaacatcttgcttggtacttggttatggcgaaatcgtgagtgcagaaatatcactattgaagtgacgaccagtgaattggatacctttgttgtcgaacatgctcaaaaactctcttggtatggtcattgggatggtgattcaacagaatgcttagaaaggcttactgcctatctggagcgagcattgtctgacccaactgaatacttctacatggacgtcaaagcgaaaatgcgggttggctggggagatgaggtttacccaagccaagagtttttggatagtcgagaagatggaatccctactaagcagctggccacagtagagcttttgagcggaaaagaaaccgtcgcgtttcacggacaaaaagttggtgcagcgttgcaatcgattgacgattggtggcatgaagaggctgataagcctttaagagtgaacgaatatggtgcagatcgagaatacgttatagcaagacgccatgtagcttatggaaatgacttctatcaattactcagaaatacagagaactggattgaaagtatgactgcttctgaatccattccgaatgacgtgcactttattatgtctgttttgatcaagggcggattgtttaattgcgccaaggccaattaagagggtctatcatgtctcaacggtactacttcttgatacgttacacgaatgctaatgccgactatggcttgctggcagggcgttgtatctcacaaatgcacttgtttatggttaatcaccaccaagcaatgaatagagtaggtgtgagttttcctgattggaatgaatcttcagttggtcaaaccattgcctttgtttccgaggacaaagagatgatgattggcctctcttttcagccctatttttcattgatggttaatgaaggtttgtttgagatctccagtgtttatgaggtgccagatacttccgaagaagtaaggtttgttcgtaatcagacgattgggaaaaactttttgggttccaaaaagcgtcgaatcaaacgcagtatggctagggccgagttatttggtattcaacaatcattaccagtaacgaatgaggaccgtgccatcgatagttttcatcaaatccctatttctagcggctcctcacggcaggattatattctgtttattcaaaaggaactcgcagatgagcgtgctgaatctggctttaatagctatggttttgcaaccaatcaagaaaaaagagcgacggttcctgacttacgttttaacccttttgacgaggactcttttttagttcagtagcctttaataaggagatatagcatgtacgtccgaaatctccgcaaaccatctgcaacaaaaaatgtgtacaagtttgcgagttctaaaaaccgaagtgtcattttgtgtgaaagttctttagaacgagattgttgttaccatctcgaatactctaaggacgttttttcattccaatcacaacccgaaggcttctattattcttcaggtaacaaacgttgtccctatactcctgattttctcgtgcgaaaccaagatggttcagagtattaccttgaagttaaacctctcgctaaaaccttttctgaagatttcaaacgttccttcgctctaaagcgtattgcagcacagcatcaaggaaaaccattagtattagtcacagataaacagatacgtaatggagtgtatctcgagaaccttaacttaatacatcgatatagtggactagtggatttcagcttgtcctcaacaaaaattgttgaggagttgagtactgctggaagaatgtgtattcgttcgcttgcggataacctgaaactatcgattggtgaagtgatagcagtcgtctttcgtttaattggattaggcagagttaatgtgcctttagattctgcaattaatgagatgtctgtgatctcggtgaattgaaatggtcatgccttttgatgatgagtttgaatccataaatgatgatactcaggccgaatatgattcaacttctgaggctaagctagttcgtaaacaatacctaccacttgattcagtcactattcatgaacgagatctgtcatctttttctgaagaacagaaaaacaaggcattagagcggtacaaacttatttctgctgtcgctaaagaaatatccggtggatggacacctaaaaatattaaccctttaattgataaatacggactcaatttatcgatcaaacggccaagttacaaatcagttattcgttggtataaatccttttgtgggagcgatggaaacattgtgtgtttagtggatcacaatcactcaaaaggaaatagaaccaaacgaattattgatgacgaatccttttttgttgaggccactgaacgttttcttgatgcaaaaagacccaactattcacaagcgtatcagttttactgcgacagaatcgaaattgaaaacagcaatattatctccggtcaaatatccaaagttagttatcaggcgtttaaagaaagattgaaaaaacttcccccttatgaagttgcattaaaacgatttggtcaaaattatgcgaacaaacttttcaattactaccaatcatcggttcctaccacgagaatattggaacgtgtagagctagaccatacaccactcgatttaatccttcttgatgatgacttactgatacctttaggtcgagcctatttgacgttattggtcgatgtgtttagtggctgtattgttggtttccatcttggtttcaatccccctagctatgtatctgttgctaaagcgatcatccattcagtaaaaagcaaagactatgttcatgatttgaatattgaactcactaatgactggttatgccacgggaaaatggaaacactggttgttgataatggagctgagttctggtcaaaaagtttagatcaagcatgcatggaggcaggtatacactatgaatattgtaaagtgggacaaccgtgggaaaagcctcgtgttgaaaggaaatttttagaaattattcagggaattgtaggatgggttccgggaaaaactttttctaatatattggaaaaagatcggtatgacccacaaaaagacgccgtaatgcggtttagtagttttgttgaggagctacatcgctggatcattgatgttcataatgcctcccctgactctcggaatacgaagattcccaattaccattggaaaaagagtgaagaagccttaccacccgcagcgcttagtgaccgagatgaaaagcagttccgaatcattatgggggttattcatgaaggcgttgtgacaactaaaggtataaaatataagcacttaatgtatgacaatgtggcgttagaacaatatcggaagcagtacccacaaacaaaaaagtctcgtaagaaaacaataaaaattgaccccgatgatctgtctagcatattcgtttatctggaggaaatcggtggatacatcgaagttccctgcaaatacgatcctttgggatacacaaagaatctgtcactgagtgagcatgttcgcattactaaaatacatcgtgattttataaaaggccaagtggatgctttatcattagcgaaagctcggcaggcacttcatgaacgtattaaaacggagcaagagcacctttctttaatgtcagttgagagtcgagcgaaaaaagccaaacatggtaagaaaatggcagctctttccggaatatcaaatgagcagcctatgtccatacagaatgctttagaaaacaaaaacaagccgttagatgacaactttgacgagcctactcctgtagacaatctaaaatcgctctggaataaacgcaaagcgatgaaaaggtctaaagaatgaatctatctgctaaacaagaaattgctgtcgatgaattactaactcaataccacaattcattcgttatttatccagatgtgcaacagatattcgatggccttgattggattgtacgtcgcagtcaatttggaaattttacgccatctatgcttataactggtggcacaggtgcgggcaaaacatcacttattaatcattatgcaaaatatcattttaatgacaatgaagtgttaatcactcgcgtcagaccaagttttatcgaaacacttatctgggccattgataagttgggtattccttataacactcgttctaaacgttcagaaattggtttacaggattatttcatcaatagtgttaagaaatccaatcttaaactgttggtcatagaagaggctcaagaattgtttgaatgtgcatctcctaaagaaagacaaaaaatacgtgaccgattaaagatgataagtgatgagtgccggttgcctatagtctttattgggattcctactgctaaacttattttggaagattcacagtgggatagacgaattatggttaaaagagaactgccttatattcgtataacatcggaatcttcgttagatgtatacatcgatttacttgaggagcttgaaaagcagcttcctatttctgttcaaccggagctttcagagatggacatcgcaatgcgattattatcggctaccaaagggatgctgggagccattaaagagttagtcggctatgcattagagctggcgctgctatcaggtaaatcagcaatcaccaacgacgaatttgcattgggattcgagagaatcaatggccccgatgtaacgaatccgtttacaacagaattggaaaagctattggtcccgcaagttattgagtacgaggggttcatcattgaccccgaaaatggcgaaatcaaatttactaaacaaatatttaaagacataccattagcagctctattgggttagcctaggctgctgccaccgctgagcaataactagcataaccccttggggcctctaaacgggtcttgaggggttttttgctgaaacctcaggcatttgagaagcacacggtcacactgcttccggtagtcaataaaccggtaaaccagcaatagacataagcggctatttaacgaccctgccctgaaccgacgaccgggtcatcgtggccggatcttgcggcccctcggcttgaacgaattgttagacattatttgccgactaccttggtgatctcgcctttcacgtagtggacaaattcttccaactgatctgcgcgcgaggccaagcgatcttcttcttgtccaagataagcctgtctagcttcaagtatgacgggctgatactgggccggcaggcgctccattgcccagtcggcagcgacatccttcggcgcgattttgccggttactgcgctgtaccaaatgcgggacaacgtaagcactacatttcgctcatcgccagcccagtcgggcggcgagttccatagcgttaaggtttcatttagcgcctcaaatagatcctgttcaggaaccggatcaaagagttcctccgccgctggacctaccaaggcaacgctatgttctcttgcttttgtcagcaagatagccagatcaatgtcgatcgtggctggctcgaagatacctgcaagaatgtcattgcgctgccattctccaaattgcagttcgcgcttagctggataacgccacggaatgatgtcgtcgtgcacaacaatggtgacttctacagcgcggagaatctcgctctctccaggggaagccgaagtttccaaaaggtcgttgatcaaagctcgccgcgttgtttcatcaagccttacggtcaccgtaaccagcaaatcaatatcactgtgtggcttcaggccgccatccactgcggagccgtacaaatgtacggccagcaacgtcggttcgagatggcgctcgatgacgccaactacctctgatagttgagtcgatacttcggcgatcaccgcttccctcatactcttcctttttcaatattattgaagcatttatcagggttattgtctcatgagcggatacatatttgaatgtatttagaaaaataaacaaatagctagctcactcggtcgctacgctccgggcgtgagactgcggcgggcgctgcggacacatacaaagttacccacagattccgtggataagcaggggactaacatgtgaggcaaaacagcagggccgcgccggtggcgtttttccataggctccgccctcctgccagagttcacataaacagacgcttttccggtgcatctgtgggagccgtgaggctcaaccatgaatctgacagtacgggcgaaacccgacaggacttaaagatccccaccgtttccggcgggtcgctccctcttgcgctctcctgttccgaccctgccgtttaccggatacctgttccgcctttctcccttacgggaagtgtggcgctttctcatagctcacacactggtatctcggctcggtgtaggtcgttcgctccaagctgggctgtaagcaagaactccccgttcagcccgactgctgcgccttatccggtaactgttcacttgagtccaacccggaaaagcacggtaaaacgccactggcagcagccattggtaactgggagttcgcagaggatttgtttagctaaacacgcggttgctcttgaagtgtgcgccaaagtccggctacactggaaggacagatttggttgctgtgctctgcgaaagccagttaccacggttaagcagttccccaactgacttaaccttcgatcaaaccacctccccaggtggttttttcgtttacagggcaaaagattacgcgcagaaaaaaaggatctcaagaagatcctttgatcttttctactgaaccgctctagatttcagtgcaatttatctcttcaaatgtagcacctgaagtcagccccatacgatataagttgtaattctcatgttagtcatgccccgcgcccaccggaaggagctgactgggttgaaggctctcaagggcatcggtcgagatcccggtgcctaatgagtgagctaacttacattaattgcgttgcgctcactgcccgctttccagtcgggaaacctgtcgtgccagctgcattaatgaatcggccaacgcgcggggagaggcggtttgcgtattgggcgccagggtggtttttcttttcaccagtgagacgggcaacagctgattgcccttcaccgcctggccctgagagagttgcagcaagcggtccacgctggtttgccccagcaggcgaaaatcctgtttgatggtggttaacggcgggatataacatgagctgtcttcggtatcgtcgtatcccactaccgagatgtccgcaccaacgcgcagcccggactcggtaatggcgcgcattgcgcccagcgccatctgatcgttggcaaccagcatcgcagtgggaacgatgccctcattcagcatttgcatggtttgttgaaaaccggacatggcactccagtcgccttcccgttccgctatcggctgaatttgattgcgagtgagatatttatgccagccagccagacgcagacgcgccgagacagaacttaatgggcccgctaacagcgcgatttgctggtgacccaatgcgaccagatgctccacgcccagtcgcgtaccgtcttcatgggagaaaataatactgttgatgggtgtctggtcagagacatcaagaaataacgccggaacattagtgcaggcagcttccacagcaatggcatcctggtcatccagcggatagttaatgatcagcccactgacgcgttgcgcgagaagattgtgcaccgccgctttacaggcttcgacgccgcttcgttctaccatcgacaccaccacgctggcacccagttgatcggcgcgagatttaatcgccgcgacaatttgcgacggcgcgtgcagggccagactggaggtggcaacgccaatcagcaacgactgtttgcccgccagttgttgtgccacgcggttgggaatgtaattcagctccgccatcgccgcttccactttttcccgcgttttcgcaga

SEQ ID NO: 1630 - DNA, 12096 bp, Synthetic construct
  source 1..12096: mol_type = other DNA
aacgtggctggcctggttcaccacgcgggaaacggtctgataagagacaccggcatactctgcgacatcgtataacgttactggtttcacattcaccaccctgaattgactctcttccgggcgctatcatgccataccgcgaaaggttttgcgccattcgatggtgtccgggatctcgacgctctcccttatgcgactcctgcattaggaaattaatacgactcactataggggaattgtgagcggataacaattcccctgtagaaataattttgtttaactttaataaggagatataccatgggtgttctgccgaataggcagccaagaaagtacagcgcggctgaaatcatcattaaagcggtgttctgccgaataggcagccaagaatagcgaattccgagcgaaggagatatacatatgaaaacggacattcaacattactctgacgaatcgcttgaaagtttcttgttgcgtttatcgcaagagcaaggttacgagcgattttctcatttcgccgaggacatttggttcgacactatggagcagcatgaagcgattgctggtgctttccccttagaactcaaccgaatcaatatttatcacgcccaaaccacaagccaaatgcgggtgcgagttcttatccatcttgagaaccaattaaaactcaataactttggtgtactgcgtctcgcgttgtcacattcaaaagctcaattttctcccgaatacaaagccgttcatcggttgggttctgattatcctttcgtttttcttggtaaacgcttcacgcctatttgccctttatgtattagtgaggctccatacattcgccagcagtggcaatttctttctcagcaagcctgtgagcgccacggttgtaaattggttcatcactgcccagagtgccaatcgagattggaataccaaacaactgagagtattagccaatgcgaatgcggttttgaactccgcaactcaccagtagaagatgcgccagtggctgcgctactggttgctcgatggttgtcaggaaatgactcaaaacctttgggattactgaaggctgaaatgacgctctctgagcgctatggttttttactatggtacgttaatcgttacggtgatattgagaacatcagttttgagtcatttgttgagtattgctcttgttggccaagagtgctgaaggaagaacttgatgagttggtaaacaaagccgatctcattcgtatcaaagattggaaaaagacgtttttcaatgaagtttttggcgctttgcttaaagattgccgccagttaccaagtaggcagttagagtgtaatagcgtgctcactcaagtgttagcctactttacaaagttaatggcagcaataccttcaagcagcaaagggaatgtaggcgatgtgctgttaagccccttagaggcttctacattactttcttgcacaacggatgaggtgtatcggttgtatgagtttggtgagattaaagcagcgattaggccgcggatgcataccaaaattgccagtcatgaatcggcgttcaccctaagaagtgtcatcgaaacaaagctgactcgcatgtgctctgaaaatgacggtttaagcgtgtatctacctgagtggtaattatgacgaaattaagtgatctactagcaatcgaggacgaagcaataaaacaaactgctcttaagaagatgtttatgccctatacagaggacgtttgtgttgatgggtatgaacaagaaacgttgacgattttgcttaatctcagttctagtcatcaagctgataggtgctcggattggttagatgtagctcgggctcaaaggtatttaaaagaccgcgaaaacttagatgcctctcttgctgaaatccagtggttccacacacataacctaaagtttccagactgtcgtgttaaggaccaacggataattgcgcgacctctttctacagccgaggagtttatttcaagtgcagtattggatcagcgattgggctgggctcataactctgctgtctatcgtcacacattgtggttactgaatccttttaaatggcaatcacagccagtgtgtattcttttgcttattcagcagaaaaatccagtgtggcttgatctgcttacagaatttggcttggatgtgaagtcacttgctcgcttacaacgtgctattgaagaacagcttcctgagaatagttttcccgacagtgttagtacttacagtaagcaattacggtttccgtggggtgatgattatgtttcgatcacccccgttgtgagtcatgctctccagtgcgaactagaaataagagcgcgaagtccagaaaacaagttcagttttgtctcttcgtcactgcctaattctgccagtattgggaacctgtgtggcagtttgggtgggtatatgagagtcctaaattacccgctaggtgttaagcaggccaagggtgggacgttaacggaaaaccgtcaaaagagtggtcattactttgatgactatcaggtaactaacgccaaaatttgtcaggtgctaaatcgcctaattgggtctgagccatccaaaacacagcggcaaagagaaagagcacgtaaggttagaagtaagattttacgaaagcaaatagccttatggatgctgccactcattgagttaagagacatcgccgaatctgaacccaatcagcaacaactagagcatgacgacactttagctcaagcctttttgtcgttgccagaatgggagcttggctctttggctggtgagtttaaccgacgcttacatctcgcgtttcaaaataatatctattctgccaagtttgcttatcatcccaaactgatgcaggtagctaaagcacaagtgacatgggtgcttgagcaacttagtaagccaattaacaatcaagatacggtgacgggggagcaatatatctacctgtcgtcaatgagagtgcaagacgcggtagcgatgagtaacccttgtttgtgtggtgtgccgtctttgacggccatttggggattcatgcacgattatcaaaggcaatttaatcagttggttaacaatgattccccagttgagttttctagtttcgctttttatgttcgtaacgagaatattcaatcaacagcgaagctgacagaaccaaactcaatcgccaaagctagaacggtttctaatgcgaaacgaccgaccattcgtagtaaacgattggccgacctagaaatagacttagttatcagagttcatagtgaaagccgaatttcagattttagatcagcgcttaaaacggcccttcccgttgctttcgccggaggggcattataccaaccacagctatcgacgcagattgagtggcttagaacatttacaggcaggagtgaacttttccatgttttaaaaggattacctgcatacgggcgatggttatacccaagtgaaaagcaacctactaattttgatgagttagagcggttgctcactcaagacgatgataacttgctcgtttctcttggataccatttgttagagcacccaactaagcgggataacgcaatcacaggttgtcatgcttatgcggagaatgcgatagggctggctaaacgaataaacccgatagaggtacgttttagtggacgagatcactttttaaaccacgccttttggtcgatagaatgcagtagcgaaactattcttataaaaaactatagggattaatcgtttatggaactttgcactcagttgaactatgtccgatcactttctgctggcaaggcttatttctactatctatccgaaagtggggagatgtgtccccttgatgtagatagaacccgattgcgcgcaccaaaagggagttattcagaagcatataaggggaataagttcgttgacaagaatgttgccccccaagacttggcatattcaaaccctcagttcattgaagagtgctatgtaaagcccggcgttgatgaaatctattgcgcattttcacttcgtattcgagccaattcgttaacaccggatatgtgtagtgatgatgaagtacgcagtaagctttctatgcttgctaaaatttataaagatctcaacggatacaaagagttagcccatcgttatgcgaagaacatcttgcttggtacttggttatggcgaaatcgtgagtgcagaaatatcactattgaagtgacgaccagtgaattggatacctttgttgtcgaacatgctcaaaaactctcttggtatggtcattgggatggtgattcaacagaatgcttagaaaggcttacagcctatctggagcgagcattgtctgacccaactgaatacttctacatggacgtcaaagcgaaaatgcgggttggctggggagatgaggtttacccaagccaagagtttttggatagtcgagaagatggaatccctactaagcagctggccacagtagagcttttgagcggaaaagaaaccgtcgcgttccacggacaaaaagttggtgcggcgttacaatcgattgatgattggtggaatgaaaacgcagataagccattaagagtgaatgaatatggtgctgaccgagagtacgttatagcaaggcgacacgtaacccacggaaatgacttttaccaattagtcagaaatacagagaattggattgagacaatgacagcttctcgaaccatcccaaatgatgtgcactttattatgtctgttttgatcaagggcggattgtttaattgcgccaaggccaattaagaggttctatcatgtctcaacggtactacttcttgatacgttacacgaatgctaatgccgactatggcttgctggcagggcgttgtatctcacaaatgcacttgtttatggttaatcaccaccaagcaatgaatagagtaggtgtgagttttcctgattggaatgaatcttcagttggtcaaaccattgcctttgtttccgaggacaaagagatgatgattggactctcttttcagccctatttttcattgatggttaatgaaggtttgtttgagatctccagtgtttatgaggtgccagatacttccgcagaagtaaggtttgttcgtaatcagacgattgggaaaaactttttgggttccaaaaagcgtcgaattaaacgcagtatggctagggccgagttatttggtgttgaacaatcattaccagtaacgaatgaggaccgtgtcatcgatagttttcatcgaatccctatttctagcggttcttcacggcaggattttattctgtttattcaaaaggaactcgcagatgagcgtgctaaatctggctttaatagctatggttttgcaaccaatcaagaaaaaagagcgacggttcctgacttacgttttaacctttttgaagaagattctttttagcctttaataaggagatatagcatgtttgaccaaactaagaaatcatctcatgtgcacaacatctgtaagttcatgagcttgaagaatgatgctgttgttcgcactctctccattctggagttcgatttctgttttcacctcgaatacaacccaaacatcaaaagttttacctctcaaccttttggtttccactatctattcaataaccgtaagtgtcgatatacccctgactttttagcaataggtcacaatgagcaatcaacattcttcgaggtcaaacactctagccagattcctaaacctgattttagggagcgctttgaagaaaagcagagagtagcgttgagtgagttcaacagacggttagttctcgttactgagaagcaaatcaggatggggccaacgctagataactttaagttgttacaccgctactcaggattgcgaacagtgaccgaatttcaaaagcgagttttggcatttattcaacgtaagcaaatggtgaagttgcaagaggtgtctttgtattttggtctatcagagcaagacacgcttatctctactctaccttggatctcttcggggcacgttaaaacagatctcaacactattggctttggtctggaaacttgcgtttggtgctaactatgccaccggactctaatagtatatttgggttctttgatgagtttgaagcgtcagaagaagaatcgcagttgctcccaaaagagctaattctcgagcccgttgaaatatcatcgaccatagatagtttgccagcaaaaattcaggaggaggttcttcgccgcataaaagtgattacttttgtggagaagcgcttgaaaggtgggtggacagagaaaaacttgaaccccattttaagtctcgttgaatcagaattacagcttactccccctagttggcggactgtagcaacttggaaaaaatcctacgctgaagcaggtagagaggcttcggcacttattccgaagcatacgtttaagggcaaccgccagaaagaaatggattcgcaatccttgattgacgaggcaattcagaacgtatacctgacacgtgaacgacttagcgttgcagaagcataccgatattataagagtcgagtgattcaaatgaatcgagggattgttgaaggaaaaatcaagccaatcgccgaacgttctttttataatagaataaatgagttacccccttatgaagtggcgattgcaagatttggtaaacgatatgcagatcgggagtatcggtcggttggtcagcaggtagttgcaactaaacctatggagtttgttgaaatagaccataccccagttccagtgatcttgattgacgatgaactagatattcctttgggccgcccttatttgacgatgctttatgaccgtttcagtaagtgcattgttggttgcagtatcaactttagagagccaagttttgactctgttagaaaggctctgttgaactcacttttggataaaagctggcttaaagcaaagtatccatcgattgagaatgagtggccttgccacggtaagattgattgcttggtcgtcgataacggtgccgagttttggagtcaaagtttggaagattcgttacggcctttggtgtctgacattcaatacagtcaagcagcgaagccttggcgaaagtcagggatcgaaaagttgttcgatcaaatgaataaagggttagttaacgcgctgcctggaaaaaccttcaccaatcctactcaactacaagattacaatccaaagaaggatgcggtggttagggtatcggtatttcttgaattacttcataaatggattgtcgattattaccacatggcaccagattccagagagcgcgagatcccataccacaagtggcaccaatcgaaatggacgccgtcttactatgatggtgctgagaaggagcaactcagagtagagttaggattgcttagacacaggacgattggagtggccgggatcaggctgcataacttacgctatcagtccgccgagcttattgaataccggaaatattgcacacctaataatggcaaacagctctttgttaagaccaaaacagatccttctgacatcagctacattcatgtttacctagaatcagaaaagaagtacataaaagttccagcagtagacaactccggatatacaaacggactttcactttttgaacaccaacgcatacaaaaagtacgcagactgaacaccaaggatcttgctgatgatgaggctcttgcggatacatttctgtatatgaaaaaacgtatccacgaagaaaccgatagattccgtcgtgttaaaagtagcaagcccaaccttcctaaaacaggtaacacgtcgagactagcaaagtttaatgatgtcggttctgagggaccaaactcaatcaacgtgactcctgttaggctcaaatctgaggttgtttccgatgcctcagagtacttagatgacgatgattttgaagatattgaagggtattagtttgaatttaacgccaaagcagcttgagcagctaaagtcctttgaaacctgctttatcgagtatcccgcgataactgaaatctactccattttcgatcaacttcgtttcaatcactctttaggtggtgaaccagaatctttcttgttaactggtgaggctggaagtggaaagacagctttgatcaacaactacttgtcacgctttcaatcgggttcaacttggggaaagcagccagtattaagcactagagtgccaagtcgtatcaatgaacagaatacgctgacccaatttttggttgatttagattgtaaatcaggaggacgaggtattcggcgccgtaatgaaattgcgcttggcgaagcggttgtaaagcaacttaaacgtaaatctgttgagctgattattgttaatgaaattcaagagcttgttgagttttcaaccgcagaacagagacaagttattgccaacacattcaaatatatgagtgaagaagcaagagtttcttttgtgcttgtgggtatgccttatgctgatgtgatagcgacagaaccacaatggaactcgcggctaagctggagaagaaagatagattatttcaaattgttgaaagcgaatagtcattcgagtaaaacggcatcttatgggtttgacttagaacaaaaaaaacattttgccagatttgtcgcgggtctgagttcaaggatggggtttgatgagccaccagtacttacaaagaatgaactgctatatcctttgtttgcaatgtgccgaggagaatgccgagcgttaaaacacttcttgaaagacgcgttgcttacgagcttcaacgacaatgcggatacgatagacaaagcaatattgtcacgcacttttgcatttaagttcccctacctagataacccgtttgatcgtcctttagagcagcttagtctccatcaaattgactctggttctgcttaccacttaaatgcaatcaccactgaagataaaatagtagcccctcgttttacggacgccattccgttgagcatgctattgagcaaaaatgggcttaaagcctagcctaggctgctgccaccgctgagcaataactagcataaccccttggggcctctaaacgggtcttgaggggttttttgctgaaacctcaggcatttgagaagcacacggtcacactgcttccggtagtcaataaaccggtaaaccagcaatagacataagcggctatttaacgaccctgccctgaaccgacgaccgggtcatcgtggccggatcttgcggcccctcggcttgaacgaattgttagacattatttgccgactaccttggtgatctcgcctttcacgtagtggacaaattcttccaactgatctgcgcgcgaggccaagcgatcttcttcttgtccaagataagcctgtctagcttcaagtatgacgggctgatactgggccggcaggcgctccattgcccagtcggcagcgacatccttcggcgcgattttgccggttactgcgctgtaccaaatgcgggacaacgtaagcactacatttcgctcatcgccagcccagtcgggcggcgagttccatagcgttaaggtttcatttagcgcctcaaatagatcctgttcaggaaccggatcaaagagttcctccgccgctggacctaccaaggcaacgctatgttctcttgcttttgtcagcaagatagccagatcaatgtcgatcgtggctggctcgaagatacctgcaagaatgtcattgcgctgccattctccaaattgcagttcgcgcttagctggataacgccacggaatgatgtcgtcgtgcacaacaatggtgacttctacagcgcggagaatctcgctctctccaggggaagccgaagtttccaaaaggtcgttgatcaaagctcgccgcgttgtttcatcaagccttacggtcaccgtaaccagcaaatcaatatcactgtgtggcttcaggccgccatccactgcggagccgtacaaatgtacggccagcaacgtcggttcgagatggcgctcgatgacgccaactacctctgatagttgagtcgatacttcggcgatcaccgcttccctcatactcttcctttttcaatattattgaagcatttatcagggttattgtctcatgagcggatacatatttgaatgtatttagaaaaataaacaaatagctagctcactcggtcgctacgctccgggcgtgagactgcggcgggcgctgcggacacatacaaagttacccacagattccgtggataagcaggggactaacatgtgaggcaaaacagcagggccgcgccggtggcgtttttccataggctccgccctcctgccagagttcacataaacagacgcttttccggtgcatctgtgggagccgtgaggctcaaccatgaatctgacagtacgggcgaaacccgacaggacttaaagatccccaccgtttccggcgggtcgctccctcttgcgctctcctgttccgaccctgccgtttaccggatacctgttccgcctttctcccttacgggaagtgtggcgctttctcatagctcacacactggtatctcggctcggtgtaggtcgttcgctccaagctgggctgtaagcaagaactccccgttcagcccgactgctgcgccttatccggtaactgttcacttgagtccaacccggaaaagcacggtaaaacgccactggcagcagccattggtaactgggagttcgcagaggatttgtttagctaaacacgcggttgctcttgaagtgtgcgccaaagtccggctacactggaaggacagatttggttgctgtgctctgcgaaagccagttaccacggttaagcagttccccaactgacttaaccttcgatcaaaccacctccccaggtggttttttcgtttacagggcaaaagattacgcgcagaaaaaaaggatctcaagaagatcctttgatcttttctactgaaccgctctagatttcagtgcaatttatctcttcaaatgtagcacctgaagtcagccccatacgatataagttgtaattctcatgttagtcatgccccgcgcccaccggaaggagctgactgggttgaaggctctcaagggcatcggtcgagatcccggtgcctaatgagtgagctaacttacattaattgcgttgcgctcactgcccgctttccagtcgggaaacctgtcgtgccagctgcattaatgaatcggccaacgcgcggggagaggcggtttgcgtattgggcgccagggtggtttttcttttcaccagtgagacgggcaacagctgattgcccttcaccgcctggccctgagagagttgcagcaagcggtccacgctggtttgccccagcaggcgaaaatcctgtttgatggtggttaacggcgggatataacatgagctgtcttcggtatcgtcgtatcccactaccgagatgtccgcaccaacgcgcagcccggactcggtaatggcgcgcattgcgcccagcgccatctgatcgttggcaaccagcatcgcagtgggaacgatgccctcattcagcatttgcatggtttgttgaaaaccggacatggcactccagtcgccttcccgttccgctatcggctgaatttgattgcgagtgagatatttatgccagccagccagacgcagacgcgccgagacagaacttaatgggcccgctaacagcgcgatttgctggtgacccaatgcgaccagatgctccacgcccagtcgcgtaccgtcttcatgggagaaaataatactgttgatgggtgtctggtcagagacatcaagaaataacgccggaacattagtgcaggcagcttccacagcaatggcatcctggtcatccagcggatagttaatgatcagcccactgacgcgttgcgcgagaagattgtgcaccgccgctttacaggcttcgacgccgcttcgttctaccatcgacaccaccacgctggcacccagttgatcggcgcgagatttaatcgccgcgacaatttgcgacggcgcgtgcagggccagactggaggtggcaacgccaatcagcaacgactgtttgcccgccagttgttgtgccacgcggttgggaatgtaattcagctccgccatcgccgcttccactttttcccgcgttttcgcaga

SEQ ID NO: 1631 - DNA, 3910 bp, Synthetic construct; identical to SEQ ID NO: 409
  source 1..3910: mol_type = other DNA

SEQ ID NO: 1632 - DNA, 9133 bp, Synthetic construct
  source 1..9133: mol_type = other DNA
ttttctactgaaccgctctagatttcagtgcaatttatctcttcaaatgtagcacctgaagtcagccccatacgatataagttgtaattctcatgttagtcatgccccgcgcccaccggaaggagctgactgggttgaaggctctcaagggcatcggtcgagatcccggtgcctaatgagtgagctaacttacattaattgcgttgcgctcactgcccgctttccagtcgggaaacctgtcgtgccagctgcattaatgaatcggccaacgcgcggggagaggcggtttgcgtattgggcgccagggtggtttttcttttcaccagtgagacgggcaacagctgattgcccttcaccgcctggccctgagagagttgcagcaagcggtccacgctggtttgccccagcaggcgaaaatcctgtttgatggtggttaacggcgggatataacatgagctgtcttcggtatcgtcgtatcccactaccgagatgtccgcaccaacgcgcagcccggactcggtaatggcgcgcattgcgcccagcgccatctgatcgttggcaaccagcatcgcagtgggaacgatgccctcattcagcatttgcatggtttgttgaaaaccggacatggcactccagtcgccttcccgttccgctatcggctgaatttgattgcgagtgagatatttatgccagccagccagacgcagacgcgccgagacagaacttaatgggcccgctaacagcgcgatttgctggtgacccaatgcgaccagatgctccacgcccagtcgcgtaccgtcttcatgggagaaaataatactgttgatgggtgtctggtcagagacatcaagaaataacgccggaacattagtgcaggcagcttccacagcaatggcatcctggtcatccagcggatagttaatgatcagcccactgacgcgttgcgcgagaagattgtgcaccgccgctttacaggcttcgacgccgcttcgttctaccatcgacaccaccacgctggcacccagttgatcggcgcgagatttaatcgccgcgacaatttgcgacggcgcgtgcagggccagactggaggtggcaacgccaatcagcaacgactgtttgcccgccagttgttgtgccacgcggttgggaatgtaattcagctccgccatcgccgcttccactttttcccgcgttttcgcagaaacgtggctggcctggttcaccacgcgggaaacggtctgataagagacaccggcatactctgcgacatcgtataacgttactggtttcacattcaccaccctgaattgactctcttccgggcgctatcatgccataccgcgaaaggttttgcgccattcgatggtgtccgggatctcgacgctctcccttatgcgactcctgctaatacgactcactatagggtactaatagcgccgcagttcatgctctttaagagtctctgtactgtggaaaatctgggttagtttgacggttggaaaaccgttttgctttctgaccctggtagctgcccgcttctcatgctctgacttttcacgttatgtggaaaaagtaacgtaatttcgttagttaagacttaccgtaaaaagtcagttctgatgctgctgtcgcaagacaggataggtgcgctcccagcaaaaggagtatgtcttgaaaaagactagccgttctagtaacggtgcggattaccgcagtggtggctactgaatcacccccttcgtcgggggaaccctccaaaaggtgggttgaaagcgagaccctcgacgagggtctcggtaccctagcataaccccttggggcctctaaacgggtcttgaggggttttttggtcgaacagaaagtaatcgtattgtacacggccgcataatcgaaattaatacgactcactataggggaattgtgagcggataacaattccccatcttagtatattagttaagtataagaaggagatatacatatgagcacaatcacgattcaatgccgcctagttgcagaagaagcgaccctgcgctacttttgggaacttatggctgagaagaatacgccactcattaatgaattgttggagcagttaggacaacatccagattttgatacttgggtacaagcaggcaagatgcctgaaaagacagttgagaacttgtgcaagtccctagaagatcgagaaccttttgcaaatcagcccggtcgttttcgtacttcggcagttgctctggtaaagtacatttacaaatcctggtttgcgttacaaaaacgtcgggcggacagactagaaggtaaagagcgctggttaaagatgctcaaaagtgatgtggaactggaacgagaaagcaactgtagtttggatattattcgagctaaagctggggaaattcttgctaaagttactgaggggtgcgctccgagcaatcaaacatcctctaagagaaaaaagaagaaaactaaaaaaagccaagcgacaaaagatctccctacgcttttcgagattatattaaaggcttacgaacaagctgaagaaagcctgacacgagctgcccttgcttatctccttaaaaatgactgtgaagtcagtgaagttgatgaagattcagagaaatttaaaaagcgtcggcgtaaaaaggaaatagaaattgaacgtttaagaaatcaactgaaaagtcggatacctaaaggtcgcgatttaaccggagataagtggttgaaaacgctagaagaagccacccgaaatgttcctgaaaatgaggatgaggcaaaggcttggcaagcccaactcttgagagaagctagttctgttccttttcctgtagcttatgaaactagtgaagatatgacttggtttaccaacgagcaaggtcgaatctttgtttactttaatggttcagccaaacataaatttcaagtttattgcgatcgccgtcaacttcattggtttcaacgttttgtagaggactttcaaatcaagaaaaatggtgataaaaaaggtagcgaaaaggagtaccctgctgggttattgacgctttgttccactcgtctgagatggaaagaaagcgcggaaaaaggagatccttggaatgttcatcgcctaattctttcttgcactatcgatacacgcttatggacacttgaaggaacggaacaggtgcgagctgaaaagatcgctcaggttgaaaaaactattagcaagcgggagcaagaagttaatctgagtaagactcaacttgagcgtttacaagccaagcacagtgagagggagagattgaacaacatttttcccaaccgccctagcaagcccagttaccggggtaaatctcatattgcgatcggtgtaagtttcagtttggaaaacccagccactgttgccgtcgtagatgttgcaaccaagaaagtccttacttaccgcagtttcaaacaattactcggagataactacaaccttgcaaaccggctgcggcaacaaaagcaacgtctttctcacgaacgtcacaaagctcagaaacaaggcgcaccaaattcatttggagactcagagttagggcagtatgtagacagattgcttgcaaaatcgattgtcgcgatcgcaaaaacttatcaagctagtagtattgtcttgcctaaacttcgctatatgagggaaatcatacataatgaagttcaagctaaagccgaaaaaaagattccaggatataaagaaggtcaaaaacaatatgccaaacagtatcggataagcgttcatcaatggagttataatagattatcacagattcttgaaagccaagctacaaaagctggaatttctattgaacgtggatcgcaagtaatccaaggtagctcccaagaacaagcacgagatttagctttatttgcctataacgaacgccaacttagtctgggttagtaacctttaataaggagatataccatgggcttagacgaagaatttgagttcactgaggaattgacgcaagctccagatgttattgtgcttgacaagagtcattttgtggtagacccatcccaaattattctgcaaacatcggataagcataaactgagatttaatcttatcaagtggttcgctgaatcccccaacattactattaaatctcagagaaaacaggcagtcgtagatacccttggtgtttctactcggcaggtggagcgtctcctcaagcaatatcataatggtgagttatcagagacagcgggagtacaacgctcagataaggggaaacttcgcatcagccaatactgggaagattatattaaaacaacttatgaaaaaagtctgaaagataaacatccaatgttgccagcagctgtcgtgcgggaagtgaagcgacacgcgatcgttgacctcggactgaaaccaggagattatccccatccagccaccatctatagaaatttagctcctttaatcgagcaacacacgcggaagaaaaaagttagaaatccgggttcgggatcttggctgaccgttgtcacgcgagatggtcagctactgaaggctgactttagtaaccaaattatccaatgcgaccataccgagctggatattcatatagttgatagtcatggcagtttattgtctgaccgtccttggctaactactgttgtcgatacttattcaagttgcattcttggttttcatttatggatcaaacaaccaggttctacggaggtagctcttgccttgagacacgccattctacccaaaaattatccagaggactacaaacttggcaaagtttgggaaatatatggacctccttttcagtatttttttactgatggtggaaaagattttaattcaaagcatctaaaagccattggtaagaaattaggatttcagtgcgaactacgcaatcgcccgccccaaggtggaattgtagaacgtctttttaaaaccattaatactcaagttcttaaagagcttcccggttacacgggggcaaacgttcaagaacgcccgaaaaatgcagagaaagaagcctgtttaacaatacaggatttggataaaattctagccagcttcttttgtgatatttataaccacgaaccctatcccaaggagcctcgcaacacgagatttgaacgctggtttaaaggtatggggggaaaattacccgaacctttggacgagcgagaattggatatttgtttgatgaaagaagcacaacgagttgttcaagctcatggtagcatacagtttgaaaacctaatttatcgaggagaagctctgaaggcatatagaggtgaatacgtcaccctaagatacgatcccgaccatgtcctgactttatatgtctatagttgcgaagctgatgataatgcagaagagttcttgggctatgctcacgctataaacatggatactcatgacttgagtatagaagaattgaaaactctcaataaagaacgaagtaaagctcgtagcgatcattacaactatgatgctttattagcattgggtaaacgcaaagaacttgtagaagaaagaaaacaagacaagaaagcaaaaaggcaatcagagcaaaaacgtctccgcactgcttccaagaaaaactcaaatgttattgaactacgcaaaagtagagcttcgagttcttcaagtaaagatgaccgacaggaaattttaccagagagagtttctagggacgaactaaagccggagaaaacagaactgaaatatgaggaaaatctgttagcacagaccgatactcaaaaacaggagagacataagttagttgtctctgaccgtaaaaaaaatttaaagaacatttggtgataaaggaggtaaataatggccatatctcaactggcaacccaaccatttgtcgaagtcttacctccagagttagatagcaaagctcaaattgctaaaactattgatattgaggagcttttcagaattaattttatcacaaccgatcggtcatcagaatgtttcagatggttagatgagctgcgtatcctgaaacaatgcggtcggatcattggaccaagaaatgtaggcaaaagccgagcagtgcttcactatcgtaatgaggataaaaaacgagtttcttatgtaaaggcttggtcggcatcgagttctaaacgtctattttcacaaatcttaaaggatattaaccatgctgcatcaacaggtaaacgacaggatttacgtccaagattagctggtagtcttgaactatttggattagaattggtcattgttgataatgctgaaaatcttcaaaaagaggcgctcttagatttaaagcaactttttgaagaatgccatgttcctattgtcttagttggaggtaaggagttagatgatattttagaagattttgatttgttgactaactttccaacgttatatgagtttgaacgattggaacatgatgattttataaaaacattaaagacaatcgaattggatattttatctcttccagaagcgtctaagttaagtgagggtaacatatttgcaattttagctgagagtacaggtgggaaaataggaattttagtcaagatactaactaaagcagttttacattctcttaaaaagggatttggtaaagttgatgaaagcattttagaaaaaatcgcaagtcgttatggaacaaaatacgttcccattgaaaacaaaaatagaaacgattaatagaggaggatataaatgattgaagatgatgaaattcgtctaaggttgggctatgttgaaccacacccaggtgaaagcatcagtcattatttgggacggcttcgtcgatttaaggctaacagccttccttcaggatatgctctaggaaaaattgcgggtcttgggtctgttctgactcgatgggaaaagttgtacttcaacccatttcccactcaacaagaactagaggcattagcacaagtgattcaagtggaggttgagaaattaagagagatgctacccactaaaggtgtcacaatgatgcctcgacccattcgattatgtgcggcttgctatgcagagtcaccttatcaccggatcgagtggcagtttaaggacaaaatgaagtgcgatcgccatcagttgcgcttattaacaaaatgcacaaactgtcagacaccattccccattcctgctgattgggaaaaaggagaatgctcgcattgttttttgtcttttgctaagatggtgaagtgtcaaaagcgtcgttagtaacctaggctgctgccaccgctgagcaataactagcataaccccttggggcctctaaacgggtcttgaggggttttttgctgaaacctcaggcatttgagaagcacacggtcacactgcttccggtagtcaataaaccggtaaaccagcaatagacataagcggctatttaacgaccctgccctgaaccgacgaccgggtcatcgtggccggatcttgcggcccctcggcttgaacgaattgttagacattatttgccgactaccttggtgatctcgcctttcacgtagtggacaaattcttccaactgatctgcgcgcgaggccaagcgatcttcttcttgtccaagataagcctgtctagcttcaagtatgacgggctgatactgggccggcaggcgctccattgcccagtcggcagcgacatccttcggcgcgattttgccggttactgcgctgtaccaaatgcgggacaacgtaagcactacatttcgctcatcgccagcccagtcgggcggcgagttccatagcgttaaggtttcatttagcgcctcaaatagatcctgttcaggaaccggatcaaagagttcctccgccgctggacctaccaaggcaacgctatgttctcttgcttttgtcagcaagatagccagatcaatgtcgatcgtggctggctcgaagatacctgcaagaatgtcattgcgctgccattctccaaattgcagttcgcgcttagctggataacgccacggaatgatgtcgtcgtgcacaacaatggtgacttctacagcgcggagaatctcgctctctccaggggaagccgaagtttccaaaaggtcgttgatcaaagctcgccgcgttgtttcatcaagccttacggtcaccgtaaccagcaaatcaatatcactgtgtggcttcaggccgccatccactgcggagccgtacaaatgtacggccagcaacgtcggttcgagatggcgctcgatgacgccaactacctctgatagttgagtcgatacttcggcgatcaccgcttccctcatactcttcctttttcaatattattgaagcatttatcagggttattgtctcatgagcggatacatatttgaatgtatttagaaaaataaacaaatagctagctcactcggtcgctacgctccgggcgtgagactgcggcgggcgctgcggacacatacaaagttacccacagattccgtggataagcaggggactaacatgtgaggcaaaacagcagggccgcgccggtggcgtttttccataggctccgccctcctgccagagttcacataaacagacgcttttccggtgcatctgtgggagccgtgaggctcaaccatgaatctgacagtacgggcgaaacccgacaggacttaaagatccccaccgtttccggcgggtcgctccctcttgcgctctcctgttccgaccctgccgtttaccggatacctgttccgcctttctcccttacgggaagtgtggcgctttctcatagctcacacactggtatctcggctcggtgtaggtcgttcgctccaagctgggctgtaagcaagaactccccgttcagcccgactgctgcgccttatccggtaactgttcacttgagtccaacccggaaaagcacggtaaaacgccactggcagcagccattggtaactgggagttcgcagaggatttgtttagctaaacacgcggttgctcttgaagtgtgcgccaaagtccggctacactggaaggacagatttggttgctgtgctctgcgaaagccagttaccacggttaagcagttccccaactgacttaaccttcgatcaaaccacctccccaggtggttttttcgtttacagggcaaaagattacgcgcagaaaaaaaggatctcaagaagatcctttgatc

SEQ ID NO: 1633 - DNA, 10375 bp, Synthetic construct
  source 1..10375: mol_type = other DNA
ttttctactgaaccgctctagatttcagtgcaatttatctcttcaaatgtagcacctgaagtcagccccatacgatataagttgtaattctcatgttagtcatgccccgcgcccaccggaaggagctgactgggttgaaggctctcaagggcatcggtcgagatcccggtgcctaatgagtgagctaacttacattaattgcgttgcgctcactgcccgctttccagtcgggaaacctgtcgtgccagctgcattaatgaatcggccaacgcgcggggagaggcggtttgcgtattgggcgccagggtggtttttcttttcaccagtgagacgggcaacagctgattgcccttcaccgcctggccctgagagagttgcagcaagcggtccacgctggtttgccccagcaggcgaaaatcctgtttgatggtggttaacggcgggatataacatgagctgtcttcggtatcgtcgtatcccactaccgagatgtccgcaccaacgcgcagcccggactcggtaatggcgcgcattgcgcccagcgccatctgatcgttggcaaccagcatcgcagtgggaacgatgccctcattcagcatttgcatggtttgttgaaaaccggacatggcactccagtcgccttcccgttccgctatcggctgaatttgattgcgagtgagatatttatgccagccagccagacgcagacgcgccgagacagaacttaatgggcccgctaacagcgcgatttgctggtgacccaatgcgaccagatgctccacgcccagtcgcgtaccgtcttcatgggagaaaataatactgttgatgggtgtctggtcagagacatcaagaaataacgccggaacattagtgcaggcagcttccacagcaatggcatcctggtcatccagcggatagttaatgatcagcccactgacgcgttgcgcgagaagattgtgcaccgccgctttacaggcttcgacgccgcttcgttctaccatcgacaccaccacgctggcacccagttgatcggcgcgagatttaatcgccgcgacaatttgcgacggcgcgtgcagggccagactggaggtggcaacgccaatcagcaacgactgtttgcccgccagttgttgtgccacgcggttgggaatgtaattcagctccgccatcgccgcttccactttttcccgcgttttcgcagaaacgtggctggcctggttcaccacgcgggaaacggtctgataagagacaccggcatactctgcgacatcgtataacgttactggtttcacattcaccaccctgaattgactctcttccgggcgctatcatgccataccgcgaaaggttttgcgccattcgatggtgtccgggatctcgacgctctcccttatgcgactcctgctaatacgactcactatagggtactaatagcgccgcagttcatgctctttaagagtctctgtactgtggaaaatctgggttagtttgacggttggaaaaccgttttgctttctgaccctggtagctgcccgcttctcatgctctgacttttcacgttatgtggaaaaagtaacgtaatttcgttagttaagacttaccgtaaaaagtcagttctgatgctgctgtcgcaagacaggataggtgcgctcccagcaaaaggagtatgtcttgaaaaagactagccgttctagtaacggtgcggattaccgcagtggtggctactgaatcacccccttcgtcgggggaaccctccaaaaggtgggttgaaagcgagaccctcgacgagggtctcggtaccctagcataaccccttggggcctctaaacgggtcttgaggggttttttggtcgaacagaaagtaatcgtattgtacacggccgcataatcgaaattaatacgactcactataggggaattgtgagcggataacaattccccatcttagtatattagttaagtataagaaggagatatacatatgagcacaatcacgattcaatgccgcctagttgcagaagaagcgaccctgcgctacttttgggaacttatggctgagaagaatacgccactcattaatgaattgttggagcagttaggacaacatccagattttgatacttgggtacaagcaggcaagatgcctgaaaagacagttgagaacttgtgcaagtccctagaagatcgagaaccttttgcaaatcagcccggtcgttttcgtacttcggcagttgctctggtaaagtacatttacaaatcctggtttgcgttacaaaaacgtcgggcggacagactagaaggtaaagagcgctggttaaagatgctcaaaagtgatgtggaactggaacgagaaagcaactgtagtttggatattattcgagctaaagctggggaaattcttgctaaagttactgaggggtgcgctccgagcaatcaaacatcctctaagagaaaaaagaagaaaactaaaaaaagccaagcgacaaaagatctccctacgcttttcgagattatattaaaggcttacgaacaagctgaagaaagcctgacacgagctgcccttgcttatctccttaaaaatgactgtgaagtcagtgaagttgatgaagattcagagaaatttaaaaagcgtcggcgtaaaaaggaaatagaaattgaacgtttaagaaatcaactgaaaagtcggatacctaaaggtcgcgatttaaccggagataagtggttgaaaacgctagaagaagccacccgaaatgttcctgaaaatgaggatgaggcaaaggcttggcaagcccaactcttgagagaagctagttctgttccttttcctgtagcttatgaaactagtgaagatatgacttggtttaccaacgagcaaggtcgaatctttgtttactttaatggttcagccaaacataaatttcaagtttattgcgatcgccgtcaacttcattggtttcaacgttttgtagaggactttcaaatcaagaaaaatggtgataaaaaaggtagcgaaaaggagtaccctgctgggttattgacgctttgttccactcgtctgagatggaaagaaagcgcggaaaaaggagatccttggaatgttcatcgcctaattctttcttgcactatcgatacacgcttatggacacttgaaggaacggaacaggtgcgagctgaaaagatcgctcaggttgaaaaaactattagcaagcgggagcaagaagttaatctgagtaagactcaacttgagcgtttacaagccaagcacagtgagagggagagattgaacaacatttttcccaaccgccctagcaagcccagttaccggggtaaatctcatattgcgatcggtgtaagtttcagtttggaaaacccagccactgttgccgtcgtagatgttgcaaccaagaaagtccttacttaccgcagtttcaaacaattactcggagataactacaaccttgcaaaccggctgcggcaacaaaagcaacgtctttctcacgaacgtcacaaagctcagaaacaaggcgcaccaaattcatttggagactcagagttagggcagtatgtagacagattgcttgcaaaatcgattgtcgcgatcgcaaaaacttatcaagctagtagtattgtcttgcctaaacttcgctatatgagggaaatcatacataatgaagttcaagctaaagccgaaaaaaagattccaggatataaagaaggtcaaaaacaatatgccaaacagtatcggataagcgttcatcaatggagttataatagattatcacagattcttgaaagccaagctacaaaagctggaatttctattgaacgtggatcgcaagtaatccaaggtagctcccaagaacaagcacgagatttagctttatttgcctataacgaacgccaacttagtctgggttagtaacctttaataaggagatataccatgggcttagacgaagaatttgagttcactgaggaattgacgcaagctccagatgttattgtgcttgacaagagtcattttgtggtagacccatcccaaattattctgcaaacatcggataagcataaactgagatttaatcttatcaagtggttcgctgaatcccccaacattactattaaatctcagagaaaacaggcagtcgtagatacccttggtgtttctactcggcaggtggagcgtctcctcaagcaatatcataatggtgagttatcagagacagcgggagtacaacgctcagataaggggaaacttcgcatcagccaatactgggaagattatattaaaacaacttatgaaaaaagtctgaaagataaacatccaatgttgccagcagctgtcgtgcgggaagtgaagcgacacgcgatcgttgacctcggactgaaaccaggagattatccccatccagccaccatctatagaaatttagctcctttaatcgagcaacacacgcggaagaaaaaagttagaaatccgggttcgggatcttggctgaccgttgtcacgcgagatggtcagctactgaaggctgactttagtaaccaaattatccaatgcgaccataccgagctggatattcatatagttgatagtcatggcagtttattgtctgaccgtccttggctaactactgttgtcgatacttattcaagttgcattcttggttttcatttatggatcaaacaaccaggttctacggaggtagctcttgccttgagacacgccattctacccaaaaattatccagaggactacaaacttggcaaagtttgggaaatatatggacctccttttcagtatttttttactgatggtggaaaagattttaattcaaagcatctaaaagccattggtaagaaattaggatttcagtgcgaactacgcaatcgcccgccccaaggtggaattgtagaacgtctttttaaaaccattaatactcaagttcttaaagagcttcccggttacacgggggcaaacgttcaagaacgcccgaaaaatgcagagaaagaagcctgtttaacaatacaggatttggataaaattctagccagcttcttttgtgatatttataaccacgaaccctatcccaaggagcctcgcaacacgagatttgaacgctggtttaaaggtatggggggaaaattacccgaacctttggacgagcgagaattggatatttgtttgatgaaagaagcacaacgagttgttcaagctcatggtagcatacagtttgaaaacctaatttatcgaggagaagctctgaaggcatatagaggtgaatacgtcaccctaagatacgatcccgaccatgtcctgactttatatgtctatagttgcgaagctgatgataatgcagaagagttcttgggctatgctcacgctataaacatggatactcatgacttgagtatagaagaattgaaaactctcaataaagaacgaagtaaagctcgtagcgatcattacaactatgatgctttattagcattgggtaaacgcaaagaacttgtagaagaaagaaaacaagacaagaaagcaaaaaggcaatcagagcaaaaacgtctccgcactgcttccaagaaaaactcaaatgttattgaactacgcaaaagtagagcttcgagttcttcaagtaaagatgaccgacaggaaattttaccagagagagtttctagggacgaactaaagccggagaaaacagaactgaaatatgaggaaaatctgttagcacagaccgatactcaaaaacaggagagacataagttagttgtctctgaccgtaaaaaaaatttaaagaacatttggtgataaaggaggtaaataatggccatatctcaactggcaacccaaccatttgtcgaagtcttacctccagagttagatagcaaagctcaaattgctaaaactattgatattgaggagcttttcagaattaattttatcacaaccgatcggtcatcagaatgtttcagatggttagatgagctgcgtatcctgaaacaatgcggtcggatcattggaccaagaaatgtaggcaaaagccgagcagtgcttcactatcgtaatgaggataaaaaacgagtttcttatgtaaaggcttggtcggcatcgagttctaaacgtctattttcacaaatcttaaaggatattaaccatgctgcatcaacaggtaaacgacaggatttacgtccaagattagctggtagtcttgaactatttggattagaattggtcattgttgataatgctgaaaatcttcaaaaagaggcgctcttagatttaaagcaactttttgaagaatgccatgttcctattgtcttagttggaggtaaggagttagatgatattttagaagattttgatttgttgactaactttccaacgttatatgagtttgaacgattggaacatgatgattttataaaaacattaaagacaatcgaattggatattttatctcttccagaagcgtctaagttaagtgagggtaacatatttgcaattttagctgagagtacaggtgggaaaataggaattttagtcaagatactaactaaagcagttttacattctcttaaaaagggatttggtaaagttgatgaaagcattttagaaaaaatcgcaagtcgttatggaacaaaatacgttcccattgaaaacaaaaatagaaacgattaatagaggaggatataaatgattgaagatgatgaaattcgtctaaggttgggctatgttgaaccacacccaggtgaaagcatcagtcattatttgggacggcttcgtcgatttaaggctaacagccttccttcaggatatgctctaggaaaaattgcgggtcttgggtctgttctgactcgatgggaaaagttgtacttcaacccatttcccactcaacaagaactagaggcattagcacaagtgattcaagtggaggttgagaaattaagagagatgctacccactaaaggtgtcacaatgatgcctcgacccattcgattatgtgcggcttgctatgcagagtcaccttatcaccggatcgagtggcagtttaaggacaaaatgaagtgcgatcgccatcagttgcgcttattaacaaaatgcacaaactgtcagacaccattccccattcctgctgattgggaaaaaggagaatgctcgcattgttttttgtcttttgctaagatggtgaagtgtcaaaagcgtcgttagtaacctaggctgctgccaccgctgagcaataactagcataaccccttggggcctctaaacgggtcttgaggggttttttgctgaaacctcaggcatttgagaagcacacggtcacactgcttccggtagtcaataaagcctgcagcaaagactacctacttaaatgaaccgcaaatgtacattcgcaaattaaatgtcgtaattcgcaaatttgtgtcgtttttcgcaaattaatgtcgtttagaatagtttgtctcatcaattcaattataggaacttttcgcaaattaatgtcgtcctgtttctccatttagtgtcgattaacaaattaatgtcgctgttaacgaattaatgtcgtcgaattagttccaactaacgttaacaaattaatgtcgtctaacataatgtcttgctaggatccatggagaaaaaaatcactggatataccaccgttgatatatcccaatggcatcgtaaagaacattttgaggcatttcagtcagttgctcaatgtacctataaccagaccgttcagctggatattacggcctttttaaagaccgtaaagaaaaataagcacaagttttatccggcctttattcacattcttgcccgcctgatgaatgctcatccggagttccgtatggcaatgaaagacggtgagctggtgatatgggatagtgttcacccttgttacaccgttttccatgagcaaactgaaacgttttcatcgctctggagtgaataccacgacgatttccggcagtttctacacatatattcgcaagatgtggcgtgttacggtgaaaacctggcctatttccctaaagggtttattgagaatatgtttttcgtctcagccaatccctgggtgagtttcaccagttttgatttaaacgtggccaatatggacaacttcttcgcccccgttttcactatgggcaaatattatacgcaaggcgacaaggtgctgatgccgctggcgattcaggttcatcatgccgtttgtgatggcttccatgtcggcagaatgcttaatgaattacaacagtactgcgatgagtggcagggcggggcgtaatttttttaaggcagttattggtgcccttctagaaaaaccactgattaacactttaggtactaaagtaccactaatgtggcaaaaatgcgacatctaatttgcgaaacaggcaaatcttaataaacgacatttaatttgcgaaaataggatttgcgacatctaatttgcgaaacaggcaaattactcagttttatggataaatagcttgtaagtcctacgcaataaagatctcagctattagaagtaattgcgacactaatttgcgaattgcgacatataatttgcgaatgtacaccaagctttaaaccagcaatagacataagcggctatttaacgaccctgccctgaaccgacgaccgggtcatcgtggccggatcttgcggcccctcggcttgaacgaattgttagacattatttgccgactaccttggtgatctcgcctttcacgtagtggacaaattcttccaactgatctgcgcgcgaggccaagcgatcttcttcttgtccaagataagcctgtctagcttcaagtatgacgggctgatactgggccggcaggcgctccattgcccagtcggcagcgacatccttcggcgcgattttgccggttactgcgctgtaccaaatgcgggacaacgtaagcactacatttcgctcatcgccagcccagtcgggcggcgagttccatagcgttaaggtttcatttagcgcctcaaatagatcctgttcaggaaccggatcaaagagttcctccgccgctggacctaccaaggcaacgctatgttctcttgcttttgtcagcaagatagccagatcaatgtcgatcgtggctggctcgaagatacctgcaagaatgtcattgcgctgccattctccaaattgcagttcgcgcttagctggataacgccacggaatgatgtcgtcgtgcacaacaatggtgacttctacagcgcggagaatctcgctctctccaggggaagccgaagtttccaaaaggtcgttgatcaaagctcgccgcgttgtttcatcaagccttacggtcaccgtaaccagcaaatcaatatcactgtgtggcttcaggccgccatccactgcggagccgtacaaatgtacggccagcaacgtcggttcgagatggcgctcgatgacgccaactacctctgatagttgagtcgatacttcggcgatcaccgcttccctcatactcttcctttttcaatattattgaagcatttatcagggttattgtctcatgagcggatacatatttgaatgtatttagaaaaataaacaaatagctagctcactcggtcgctacgctccgggcgtgagactgcggcgggcgctgcggacacatacaaagttacccacagattccgtggataagcaggggactaacatgtgaggcaaaacagcagggccgcgccggtggcgtttttccataggctccgccctcctgccagagttcacataaacagacgcttttccggtgcatctgtgggagccgtgaggctcaaccatgaatctgacagtacgggcgaaacccgacaggacttaaagatccccaccgtttccggcgggtcgctccctcttgcgctctcctgttccgaccctgccgtttaccggatacctgttccgcctttctcccttacgggaagtgtggcgctttctcatagctcacacactggtatctcggctcggtgtaggtcgttcgctccaagctgggctgtaagcaagaactccccgttcagcccgactgctgcgccttatccggtaactgttcacttgagtccaacccggaaaagcacggtaaaacgccactggcagcagccattggtaactgggagttcgcagaggatttgtttagctaaacacgcggttgctcttgaagtgtgcgccaaagtccggctacactggaaggacagatttggttgctgtgctctgcgaaagccagttaccacggttaagcagttccccaactgacttaaccttcgatcaaaccacctccccaggtggttttttcgtttacagggcaaaagattacgcgcagaaaaaaaggatctcaagaagatcctttgatc

SEQ ID NO: 1634 - DNA, 23 bp, Synthetic construct
  source 1..23: mol_type = other DNA
cgagaccctcgacgagggtctcg

SEQ ID NO: 1635 - DNA, 23 bp, Synthetic construct
  source 1..23: mol_type = other DNA
cagcgcggctgaaatcatcatta

SEQ ID NO: 1636 - DNA, 23 bp, Synthetic construct
  source 1..23: mol_type = other DNA
cggataatgcgaacagcgcacgg

SEQ ID NO: 1637 - DNA, 23 bp, Synthetic construct
  source 1..23: mol_type = other DNA
tttagcgaaaccgccaagactgt

SEQ ID NO: 1638 - DNA, 23 bp, Synthetic construct
  source 1..23: mol_type = other DNA
aggcggtcgggatagttttcttg

SEQ ID NO: 1639 - DNA, 23 bp, Synthetic construct
  source 1..23: mol_type = other DNA
cagcggttccttactggcattga

SEQ ID NO: 1640 - DNA, 23 bp, Synthetic construct
  source 1..23: mol_type = other DNA
ttcgacgttcagacgtagtgtga

SEQ ID NO: 1641 - DNA, 12828 bp, Synthetic construct
  source 1..12828: mol_type = other DNA
gcgctgcggacacatacaaagttacccacagattccgtggataagcaggggactaacatgtgaggcaaaacagcagggccgcgccggtggcgtttttccataggctccgccctcctgccagagttcacataaacagacgcttttccggtgcatctgtgggagccgtgaggctcaaccatgaatctgacagtacgggcgaaacccgacaggacttaaagatccccaccgtttccggcgggtcgctccctcttgcgctctcctgttccgaccctgccgtttaccggatacctgttccgcctttctcccttacgggaagtgtggcgctttctcatagctcacacactggtatctcggctcggtgtaggtcgttcgctccaagctgggctgtaagcaagaactccccgttcagcccgactgctgcgccttatccggtaactgttcacttgagtccaacccggaaaagcacggtaaaacgccactggcagcagccattggtaactgggagttcgcagaggatttgtttagctaaacacgcggttgctcttgaagtgtgcgccaaagtccggctacactggaaggacagatttggttgctgtgctctgcgaaagccagttaccacggttaagcagttccccaactgacttaaccttcgatcaaaccacctccccaggtggttttttcgtttacagggcaaaagattacgcgcagaaaaaaaggatctcaagaagatcctttgatcttttctactgaaccgctctagatttcagtgcaatttatctcttcaaatgtagcacctgaagtcagccccatacgatataagttgtaattctcatgttagtcatgccccgcgcccaccggaaggagctgactgggttgaaggctctcaagggcatcggtcgagatcccggtgcctaatgagtgagctaacttacattaattgcgttgcgctcactgcccgctttccagtcgggaaacctgtcgtgccagctgcattaatgaatcggccaacgcgcggggagaggcggtttgcgtattgggcgccagggtggtttttcttttcaccagtgagacgggcaacagctgattgcccttcaccgcctggccctgagagagttgcagcaagcggtccacgctggtttgccccagcaggcgaaaatcctgtttgatggtggttaacggcgggatataacatgagctgtcttcggtatcgtcgtatcccactaccgagatgtccgcaccaacgcgcagcccggactcggtaatggcgcgcattgcgcccagcgccatctgatcgttggcaaccagcatcgcagtgggaacgatgccctcattcagcatttgcatggtttgttgaaaaccggacatggcactccagtcgccttcccgttccgctatcggctgaatttgattgcgagtgagatatttatgccagccagccagacgcagacgcgccgagacagaacttaatgggcccgctaacagcgcgatttgctggtgacccaatgcgaccagatgctccacgcccagtcgcgtaccgtcttcatgggagaaaataatactgttgatgggtgtctggtcagagacatcaagaaataacgccggaacattagtgcaggcagcttccacagcaatggcatcctggtcatccagcggatagttaatgatcagcccactgacgcgttgcgcgagaagattgtgcaccgccgctttacaggcttcgacgccgcttcgttctaccatcgacaccaccacgctggcacccagttgatcggcgcgagatttaatcgccgcgacaatttgcgacggcgcgtgcagggccagactggaggtggcaacgccaatcagcaacgactgtttgcccgccagttgttgtgccacgcggttgggaatgtaattcagctccgccatcgccgcttccactttttcccgcgttttcgcagaaacgtggctggcctggttcaccacgcgggaaacggtctgataagagacaccggcatactctgcgacatcgtataacgttactggtttcacattcaccaccctgaattgactctcttccgggcgctatcatgccataccgcgaaaggttttgcgccattcgatggtgtccgggatctcgacgctctcccttatgcgactcctgcattaggaatggataaccgtattaccgcctttgagtgagctgataccgctcgccgcagccgaacgaccgagcgcagcgagtcagtgagcgaggacacaagctttgacagctagctcagtcctaggtataatactagcgtcgacgtggagatataccatgggtgaactgccgagtaggtagctgataacgagacctctgtcttgtcagctagggtggtctcgtgaactgccgagtaggtagctgataacggatccgaattcgagcgaaggagatatacatatgtttttgcaaagacctaaaccttacagcgatgaaagtttagaaagtttctttatccgagtggctaacaaaaatggctacggtgatgtccatcgcttcctagaagccactaaacgattccttcaagacattgaccataatggctatcaaacctttccgactgatataactcggataaacccatactcagctaaaaacagttccagcgcacgaactgcgtcattcctgaaacttgcacaattgacatttaatgaaccgccagagctacttgggttggcaattaacagaacaaacatgaaatactcgccgtcaactagcgcggttgttagaggtgcagaagtctttcctcgcagtttactacggacgcactccatcccctgctgtcctttgtgtctgcgagaaaatggctacgcctcctacctttggcactttcaggggtacgaatactgccacagccataacgtacctttaattaccacttgtagctgtggtaaggagtttgactaccgagtatctgggttaaagggcatttgctgcaaatgcaaggagcctatcaccttaaccagcagggagaacggtcatgaggcagcgtgtactgtttcaaactggcttgctggccatgaatctaaacctctgccaaatcttcctaaaagctaccgatggggtttagttcattggtggatgggtattaaagatagcgagttcgatcacttttcgttcgttcaatttttctcaaactggccaaggtcattccactcgataatcgaagatgaagtagagttcaaccttgagcatgctgttgtcagcacgtctgaattacgactaaaagatcttcttggtcgattgtttttcggttcaattcggttacctgagcggaatcttcaacacaatatcatccttggtgagcttctctgctatttagaaaatcgtttatggcaagacaagggattaatcgccaacctcaaaatgaacgcgttagaggcgactgtaatgttaaattgtagcctcgatcagattgcatcaatggttgaacaacgcatcttgaagccaaatcgaaaaagcaagcccaacagccctcttgatgttaccgattatctatttcatttcggcgatattttctgtctttggttagctgagttccaaagcgatgagtttaaccgttcgttttatgtgtcgaggtggtaaatgcaaactctgaaagaactaatcgcatccaatcctgacgacttaacaactgaacttaagagagcatttcgtccactcacaccgcatattgcaattgatggtaatgaacttgacgcactgacgatattagtcaatttaaccgataagactgatgatcagaaagacctgctcgatcgagccaaatgcaagcaaaaacttcgagatgaaaaatggtgggctagctgcataaattgcgttaattacagacaaagccataacccaaaattcccggatatacgttctgaaggcgtgattcgaacccaagccctgggtgaattaccgagtttcctactctcgtcctcaaaaatcccaccataccattggtcatatagccatgattcaaaatacgtcaacaaaagcgcattcctcaccaatgagttttgttgggatggtgagatctcatgtttgggtgagcttcttaaagatgcagatcacccactttggaatactttgaaaaagttaggttgttctcaaaaaacttgcaaagcaatggcaaaacaactagctgatattactctcacgactatcaatgtcacactcgcaccaaattacctgactcaaatatctctccccgatagtgatacatcctacatttcactctctcctgttgcatcgctatcgatgcaaagccactttcatcagaggctccaagatgaaaatcggcatagcgcgataacgcggtttagccgaactaccaacatgggggtcactgcgatgacatgtggcggcgcatttagaatgttaaagtctggcgctaagttttccagcccccctcatcaccgattaaacagtaaacgaagttggttgacgtcagagcatgttcagtcattaaaacagtaccagcgcctcaacaaaagcctcatacctgaaaactctcggattgcactccgtagaaaatacaaaatcgagcttcaaaatatggtcagatcttggtttgcaatgcaagaccatacccttgattcgaacatacttatccaacatttgaatcatgacctatcttacttaggagccacaaaacgttttgcatacgatccagcgatgaccaagctctttactgagcttttgaaacgagagttatcaaattcaatcaataatggtgagcaacacactaatggatcgtttttagtcctaccgaatatcagggtttgtggcgcaacagctttaagctccccggtaacggtggggattccatcacttacagctttctttggcttcgttcacgcatttgaacggaatataaatcgcaccacctcatcgtttcgtgttgaatcctttgcgatatgcgtccatcaactacatgtcgagaagcgaggtttgacagcagagtttgtggaaaaaggcgacgggactatatccgctcccgcgacccgggatgactggcagtgtgatgtcgtatttagccttattttgaacaccaactttgctcaacatattgaccaagatacgttagttacatcactaccaaagcgattggctcggggttcagcaaaaattgcgattgatgactttaaacatatcaactcattctcgacattagaaacagcgatcgaatctctgccaatagaagctggtaggtggttatcactttacgcacagtcaaacaataatctaagtgatctattagcagccatgacagaggaccatcagctcatggcaagctgcgtcggttaccacttgttagaagagcccaaagataaaccaaactccctcagaggttacaaacacgctatcgccgagtgcatcattggactcattaactcaatcacctttagctcagagactgatcccaacacaatcttttggtcgctaaagaactatcaaaactacctagtggtacagccaaggagtatcaacgatgaaactaccgacaaatctagcctatgagcgctctatcgacccatcagatgtctgtttttttgtcgtctggcccgatgatagaaaaacacctttaacctacaattctcgtactctgctcgggcaaatggaagcggcatcattagcctatgatgtctcaggtcaaccaataaaaagtgccaccgctgaggcgttagctcaagggaaccctcatcaagttgatttctgccacgttccatacggtgcgagtcatattgaatgcagtttctccgtctcgttttcttctgaactacgtcaaccatataagtgtaactcaagcaaagttaaacaaacgctagtgcaattagtcgagctctacgaaacgaaaatcggctggactgagctagcaacccgatatttgatgaacatttgcaacggtaaatggctgtggaaaaatacccgtaaagcctattgctggaacattgtacttacaccttggccttggaacggggaaaaggttggatttgaagatattcgtactaactacacctcacggcaagactttaaaaataataaaaattggtctgctatagttgaaatgatcaaaaccgcattttctagtactgatgggctggcgatatttgaagtcagggccaccttgcacttgccaacgaatgctatggtgcggccaagccaagttttcacagaaaaagaaagtggcagtaaaagtaaatctaaaactcaaaacagtcgagtttttcagagtacaactattgatggtgaacgatcgccaatactaggggcctttaaaacgggagcagctattgcaaccattgacgactggtatcctgaagccactgagccactaagggtcggacggtttggggttcatcgcgaagatgtcacttgctaccgtcatccgtctaccggaaaagattttttctcgatattacaacaagcagagcactatattgaagtgttgagcgccaacaaaactcccgctcaagaaactatcaacgacatgcactttttaatggctaacctgattaagggtgggatgttccagcataaaggagactgactgtgaaatggtattataagacaatcacctttctgccagagttgtgcaacaacgagtcactggctgcaaagtgtctccgcgttctgcatggatttaactatcagtatgagacacgaaatatcggcgtttcatttccgctttggtgtgatgcaacggttggaaaaaagatttcatttgtcagcaagaacaagatagaactcgacttactacttaaacaacactatttcgtccaaatggaacaacttcaatactttcatatatccaacactgttctcgtcccagaagattgtacatacgtttcctttagacgctgtcaatctatagataagctcacagcagcagggctggcaaggaaaatcagacgcctggagaaacgtgctctatctagaggcgagcaatttgacccatcatcttttgctcaaaaagagcatactgcaatagcgcactaccactcacttggggagtccagcaaacagacgaaccgcaactttcgactcaatatcaggatgctctcggagcaaccccgtgaggggaactcgatttttagtagctatggcttatcaaattcagaaaactcgtttcagcctgtacccttaatctgacctttaataaggagatataccatggcgacaagtttacctacgccctcagcaattacgacttcggcgttagagtatgcattccatactcccgctcgcaatctaacgaaatctcgcggaaaaaacattcatcgttatgtcagtgtaaagatgagtaagaggattacggtagaatctactctagagtgtgatgcctgctatcactttgattttgagccaagtattgttcgcttttgcgctcaaccgattcgatttttatattatctcaatggtcagtctcactcctatgttcctgactttctagttcaatttgataccaacgagtttgttctatatgaagtaaagtcagcttatgctaagaacaaacctgattttgatgttgaatgggaggcgaaagtaaaagcagcaactgaactagggctagaattggagcttgttgaagagagtgatattagggatacggttgtattaaataatcttaagcgcatgcatcgttatgcttcgaaagatgagctgaataacgtacataactctctcttaaaaataataaagtacaatggcgcccaatctgcaagatgcttgggagaacagttgggtttaaaaggccgaactgttttaccaattttgtgcgatttgctgtcaaggtgtttactcgatacacgtttggataagcctctatctcttgaatctcgatttgagttggccagttatggctaagaaagggttctcaagtttccatagaaaagcagtctcttcccaagatacgcttgaatcgatagagcttgtctctagcgctaattgtctagaaagtgttacgtatcaagatatatcagcatttcccgaaacaattgcggtagagattaatttccgattaagcattcttcgctttttagcgcgaaagtgcgaaaccattgtggccaaatcaattgaaccacatcgtgtagagctacagcaaaactatagtagaaaaatacccagtgcaataacgatatatcgatggtggcttgcttttcgaaaatcagactacaaccccattagcttagcacctaatatcaaggatagaggtaatagagagacaaaagtgtcaacagttgttgattctattatggaacaggcagttgaaagagttatatctggacgaaaagtcaatgttagctctgcatataaacgtgttcgacgaaaagttcgtcaatacaatctaactcatggaacgaaatacacgtatcctaagtacgaatctgtaagaaagcgagtaaaaaagaaaaccccatttgagttattagccgcagggaaaggggagagagtagctaagagagagtttcgccgaatgggaaaaaagatcctcacgtctagcgtgctagagagggttgaaatagatcacactgtcgttgacctttttgcagtacacgaagagtatcgaatcccattgggccgaccttggcttactcaattggttgattgttacagtaaagctgtaatcggtttttatttaggtttcgagcctcctagctatgtgtcggtttcccttgcacttaagaatgcaatacaacgcaaagatgacttaatctcctcgtatgaatcgatcgagaatgaatggctatgttatggcatcccagacctactcgtaactgataatggtaaagagtttttgtcgaaagcatttgatcaagcatgtgaatcactattgatcaatgtgcatcaaaataaagttgagacgcccgacaacaaacctcatgttgaacgtaactacgggactattaatacttctctgttagacgatttacctgggaaatccttcagccagtaccttcaaagagaagggtacgactctgtgggagaagctacccttacactcaatgagattagagaaatttacttaatttggttggtggatatttatcataaaaaacccaatcagagaggcactaattgtcctaatgttgcgtggaaaaagggttgtcaagaatgggaaccagaggagttctctggttctaaagacgaattagactttaaatttgctattgttgattacaaacaacttactaaagtagggataactgtctacaaagaactgagttatagcaatgaccgtttagctgaatatagagggaagaaaggaaaccataaagttcagttcaagtataaccctgagtgtatggcagttatttgggtgttggatgaggatatgaatgagtactttacagttaatgcgattgactacgaatatgcaagtagagtatcactttggcaacataaatataacatgaaatatcaagcagaactaaattcagcagaatatgatgaggacaaggaaattgatgcagaaataaaaattgaagaaatcgcagatcgttcaattgttaagactaacaaaatcagagctcggaggcgtggcgctaggcatcaagagaatagcgcaagggctaagtcaatcagtaatgcgaacccggcctcgatacaaaaacatgaagatgaaatcgttagtgcagataatgacgattgggatattgattatgtctgagaaatcgtcaaatgagtgaaacgcgtgaggctcgtatatcaagagctaaaagggcatttgtatccacaccgagcgttaggaaaatcttgagttacatggatagatgtagagatctatcagacctagagtctgagcctacatgcatgatggtctatggtgcttcgggtgtaggtaaaacgaccgtcatcaagaaatacttaaatcaaaacagaagagagtccgaagccgggggcgatataataccggttttgcatattgagttgccagacaatgcgaagccagtagatgcagcaagggaattgctggttgaaatgggtgacccgctagcactttatgaaactgacttagctagattgacgaaaagactgactgaattaatccctgcggtcggcgtgaagctgattattatcgatgagttccaacatttggtggaagaaaggtcaaatcgggttcttacccaagtaggtaattggctaaaaatgatacttaacaaaacgaaatgtccaattgttatatttggtatgccatactcaaaagttgtactgcaagcaaactcgcaacttcacgggcgattttccattcaggttgaactgcgcccctttagctaccagggaggtagaggtgtatttaaaacttttttggaataccttgataaagccctaccttttgaaaaacaggctggcttagccaacgaaagtttgcagaaaaaattgtatgcattctctcagggaaacatgcgttcgttgagaaaccttatttatcaagcatctatcgaagcaattgataatcagcatgagacgataaccgaagaagatttcgtttttgcatcgaagttgacatcgggcgataaacccaactcatggaaaaatccttttgaggagggtgttgaggtaacagaagatatgttacgaccgccaccaaaagatattggttgggaggactatttgagacattcaaccccgagagtgagtaaaccaggtagaaataaaaactttttcgaataacctaggctgctgcgctgctgccaccgctgagcaataactagcataaccccttggggcctctaaacgggtcttgaggggttttttgctgaaacctcaggcatttgttgttgatacaaccataaaatgataattacacccataaattgataattatcacacccataaattgatattgcctcttcatggtctaaacttcagtaagtttacgacattttcctcgaggtcatttccggggatccatggagaaaaaaatcactggatataccaccgttgatatatcccaatggcatcgtaaagaacattttgaggcatttcagtcagttgctcaatgtacctataaccagaccgttcagctggatattacggcctttttaaagaccgtaaagaaaaataagcacaagttttatccggcctttattcacattcttgcccgcctgatgaatgctcatccggagttccgtatggcaatgaaagacggtgagctggtgatatgggatagtgttcacccttgttacaccgttttccatgagcaaactgaaacgttttcatcgctctggagtgaataccacgacgatttccggcagtttctacacatatattcgcaagatgtggcgtgttacggtgaaaacctggcctatttccctaaagggtttattgagaatatgtttttcgtctcagccaatccctgggtgagtttcaccagttttgatttaaacgtggccaatatggacaacttcttcgcccccgttttcactatgggcaaatattatacgcaaggcgacaaggtgctgatgccgctggcgattcaggttcatcatgccgtttgtgatggcttccatgtcggcagaatgcttaatgaattacaacagtactgcgatgagtggcagggcggggcgtaatttttttaaggcagttattggtgcccttctagagtccttactgcagtagttttgctgaaatactcgattcacaaaaatatcaacttatggttgttttgtgagatatcaatatatggttgttttgtggttaagttgctgattataaataattattaaatatcactttatggttgcatcaacaggtaccgagctcgaattcactggccgtcgttttacaacgtcgtgactgggaaaaccctggcgttacccaacttaatcgccttgctatcgtggccggatcttgcggcccctcggcttgaacgaattgttagacattatttgccgactaccttggtgatctcgcctttcacgtagtggacaaattcttccaactgatctgcgcgcgaggccaagcgatcttcttcttgtccaagataagcctgtctagcttcaagtatgacgggctgatactgggccggcaggcgctccattgcccagtcggcagcgacatccttcggcgcgattttgccggttactgcgctgtaccaaatgcgggacaacgtaagcactacatttcgctcatcgccagcccagtcgggcggcgagttccatagcgttaaggtttcatttagcgcctcaaatagatcctgttcaggaaccggatcaaagagttcctccgccgctggacctaccaaggcaacgctatgttctcttgcttttgtcagcaagatagccagatcaatgtcgatcgtggctggctcgaagatacctgcaagaatgtcattgcgctgccattctccaaattgcagttcgcgcttagctggataacgccacggaatgatgtcgtcgtgcacaacaatggtgacttctacagcgcggagaatctcgctctctccaggggaagccgaagtttccaaaaggtcgttgatcaaagctcgccgcgttgtttcatcaagccttacggtcaccgtaaccagcaaatcaatatcactgtgtggcttcaggccgccatccactgcggagccgtacaaatgtacggccagcaacgtcggttcgagatggcgctcgatgacgccaactacctctgatagttgagtcgatacttcggcgatcaccgcttccctcatactcttcctttttcaatattattgaagcatttatcagggttattgtctcatgagcggatacatatttgaatgtatttagaaaaataaacaaatagctagctcactcggtcgctacgctccgggcgtgagactgcggcgg

SEQ ID NO: 1642 - DNA, 32 bp, Synthetic construct
  source 1..32: mol_type = other DNA
gagacctctgtcttgtcagctagggtggtctc

SEQ ID NO: 1643 - DNA, 4593 bp, Synthetic construct
  source 1..4593: mol_type = other DNA
ccgccgcagtctcacgcccggagcgtagcgaccgagtgagctagctatttgtttatttttctaaatacattcaaatatgtatccgctcatgagacaataaccctgataaatgcttcaataatattgaaaaaggaagagtatgagggaagcggtgatcgccgaagtatcgactcaactatcagaggtagttggcgtcatcgagcgccatctcgaaccgacgttgctggccgtacatttgtacggctccgcagtggatggcggcctgaagccacacagtgatattgatttgctggttacggtgaccgtaaggcttgatgaaacaacgcggcgagctttgatcaacgaccttttggaaacttcggcttcccctggagagagcgagattctccgcgctgtagaagtcaccattgttgtgcacgacgacatcattccgtggcgttatccagctaagcgcgaactgcaatttggagaatggcagcgcaatgacattcttgcaggtatcttcgagccagccacgatcgacattgatctggctatcttgctgacaaaagcaagagaacatagcgttgccttggtaggtccagcggcggaggaactctttgatccggttcctgaacaggatctatttgaggcgctaaatgaaaccttaacgctatggaactcgccgcccgactgggctggcgatgagcgaaatgtagtgcttacgttgtcccgcatttggtacagcgcagtaaccggcaaaatcgcgccgaaggatgtcgctgccgactgggcaatggagcgcctgccggcccagtatcagcccgtcatacttgaagctagacaggcttatcttggacaagaagaagatcgcttggcctcgcgcgcagatcagttggaagaatttgtccactacgtgaaaggcgagatcaccaaggtagtcggcaaataatgtctaacaattcgttcaagccgaggggccgcaagatccggccacgatgacccggtcgtcggttcagggcagggtcgttaaatagccgcttatgtctattgctggtttaccggtttattgactaccggaagcagtgtgaccgtgtgcttctcaaatgcctgaggtttcagcaaaaaacccctcaagacccgtttagaggccccaaggggttatgctagttattgctcagcggtggcagcagcctaggcatctccacaaaaggcgtagtgtacagtgacaaattatctgtcgtcggtgacagattaatgtcattgtgactatttaattgtcgtcgtgacccatcagcgttgcttaattaattgatgacaaattaaatgtcatcaatataatatgctctgcaattattatacaaagcaattaaaacaagcggataaaaggacttgctttcaacccacccctaagtttaatagttactgagactctagaagggcaccaataactgccttaaaaaaattacgccccgccctgccactcatcgcagtactgttgtaattcattaagcattctgccgacatggaagccatcacaaacggcatgatgaacctgaatcgccagcggcatcagcaccttgtcgccttgcgtataatatttgcccatagtgaaaacgggggcgaagaagttgtccatattggccacgtttaaatcaaaactggtgaaactcacccagggattggctgagacgaaaaacatattctcaataaaccctttagggaaataggccaggttttcaccgtaacacgccacatcttgcgaatatatgtgtagaaactgccggaaatcgtcgtggtattcactccagagcgatgaaaacgtttcagtttgctcatggaaaacggtgtaacaagggtgaacactatcccatatcaccagctcaccgtctttcattgccatacggaactccggatgagcattcatcaggcgggcaagaatgtgaataaaggccggataaaacttgtgcttatttttctttacggtctttaaaaaggccgtaatatccagctgaacggtctggttataggtacattgagcaactgactgaaatgcctcaaaatgttctttacgatgccattgggatatatcaacggtggtatatccagtgatttttttctccattatttacctcctgcgacagtcaatttgtcattatgaaaatacacaaaagctttttcctatcttgcaaagcgacagctaatttgtcacaatcacggacaacgacatctattttgtcactgcaaagaggttatgctaaaactgccaaagcgctataatctatactgtataaggattttactgatgacaataatttgtcacaacgacatataattagtcactgtacacgtagagacgtagcaatgctccatggtatatctccttattaaagttaaacaaaattatttctacaggggaattgttatccgctcacaattcccctatagtgagtcgtattaatttcctaatgcaggagtcgcataagggagagcgtcgagatcccggacaccatcgaatggcgcaaaacctttcgcggtatggcatgatagcgcccggaagagagtcaattcagggtggtgaatgtgaaaccagtaacgttatacgatgtcgcagagtatgccggtgtctcttatcagaccgtttcccgcgtggtgaaccaggccagccacgtttctgcgaaaacgcgggaaaaagtggaagcggcgatggcggagctgaattacattcccaaccgcgtggcacaacaactggcgggcaaacagtcgttgctgattggcgttgccacctccagtctggccctgcacgcgccgtcgcaaattgtcgcggcgattaaatctcgcgccgatcaactgggtgccagcgtggtggtgtcgatggtagaacgaagcggcgtcgaagcctgtaaagcggcggtgcacaatcttctcgcgcaacgcgtcagtgggctgatcattaactatccgctggatgaccaggatgccattgctgtggaagctgcctgcactaatgttccggcgttatttcttgatgtctctgaccagacacccatcaacagtattattttctcccatgaagacggtacgcgactgggcgtggagcatctggtcgcattgggtcaccagcaaatcgcgctgttagcgggcccattaagttctgtctcggcgcgtctgcgtctggctggctggcataaatatctcactcgcaatcaaattcagccgatagcggaacgggaaggcgactggagtgccatgtccggttttcaacaaaccatgcaaatgctgaatgagggcatcgttcccactgcgatgctggttgccaacgatcagatggcgctgggcgcaatgcgcgccattaccgagtccgggctgcgcgttggtgcggacatctcggtagtgggatacgacgataccgaagacagctcatgttatatcccgccgttaaccaccatcaaacaggattttcgcctgctggggcaaaccagcgtggaccgcttgctgcaactctctcagggccaggcggtgaagggcaatcagctgttgcccgtctcactggtgaaaagaaaaaccaccctggcgcccaatacgcaaaccgcctctccccgcgcgttggccgattcattaatgcagctggcacgacaggtttcccgactggaaagcgggcagtgagcgcaacgcaattaatgtaagttagctcactcattaggcaccgggatctcgaccgatgcccttgagagccttcaacccagtcagctccttccggtgggcgcggggcatgactaacatgagaattacaacttatatcgtatggggctgacttcaggtgctacatttgaagagataaattgcactgaaatctagagcggttcagtagaaaagatcaaaggatcttcttgagatcctttttttctgcgcgtaatcttttgccctgtaaacgaaaaaaccacctggggaggtggtttgatcgaaggttaagtcagttggggaactgcttaaccgtggtaactggctttcgcagagcacagcaaccaaatctgtccttccagtgtagccggactttggcgcacacttcaagagcaaccgcgtgtttagctaaacaaatcctctgcgaactcccagttaccaatggctgctgccagtggcgttttaccgtgcttttccgggttggactcaagtgaacagttaccggataaggcgcagcagtcgggctgaacggggagttcttgcttacagcccagcttggagcgaacgacctacaccgagccgagataccagtgtgtgagctatgagaaagcgccacacttcccgtaagggagaaaggcggaacaggtatccggtaaacggcagggtcggaacaggagagcgcaagagggagcgacccgccggaaacggtggggatctttaagtcctgtcgggtttcgcccgtactgtcagattcatggttgagcctcacggctcccacagatgcaccggaaaagcgtctgtttatgtgaactctggcaggagggcggagcctatggaaaaacgccaccggcgcggccctgctgttttgcctcacatgttagtcccctgcttatccacggaatctgtgggtaactttgtatgtgtccgcagcgc

SEQ ID NO: 1644 - DNA, 8115 bp, Synthetic construct
  source 1..8115: mol_type = other DNA
gacgaaagggcctcgtgatacgcctatttttataggttaatgtcatgataataatggtttcttagacgtcaggtggcacttttcggggaaatgtgcgcggaacccctatttgtttatttttctaaatacattcaaatatgtatccgctcatgagacaataaccctgataaatgcttcaataatattgaaaaaggaagagtatgagtattcaacatttccgtgtcgcccttattcccttttttgcggcattttgccttcctgtttttgctcacccagaaacgctggtgaaagtaaaagatgctgaagatcagttgggtgcacgagtgggttacatcgaactggatctcaacagcggtaagatccttgagagttttcgccccgaagaacgttttccaatgatgagcacttttaaagttctgctatgtggcgcggtattatcccgtattgacgccgggcaagagcaactcggtcgccgcatacactattctcagaatgacttggttgagtactcaccagtcacagaaaagcatcttacggatggcatgacagtaagagaattatgcagtgctgccataaccatgagtgataacactgcggccaacttacttctgacaacgatcggaggaccgaaggagctaaccgcttttttgcacaacatgggggatcatgtaactcgccttgatcgttgggaaccggagctgaatgaagccataccaaacgacgagcgtgacaccacgatgcctgtagcaatggcaacaacgttgcgcaaactattaactggcgaactacttactctagcttcccggcaacaattaatagactggatggaggcggataaagttgcaggaccacttctgcgctcggcccttccggctggctggtttattgctgataaatctggagccggtgagcgtgggtctcgcggtatcattgcagcactggggccagatggtaagccctcccgtatcgtagttatctacacgacggggagtcaggcaactatggatgaacgaaatagacagatcgctgagataggtgcctcactgattaagcattggtaactgtcagaccaagtttactcatatatactttagattgatttaaaacttcatttttaatttaaaaggatctaggtgaagatcctttttgataatctcatgaccaaaatcccttaacgtgagttttcgttccactgagcgtcagaccccgtagaaaagatcaaaggatcttcttgagatcctttttttctgcgcgtaatctgctgcttgcaaacaaaaaaaccaccgctaccagcggtggtttgtttgccggatcaagagctaccaactctttttccgaaggtaactggcttcagcagagcgcagataccaaatactgttcttctagtgtagccgtagttaggccaccacttcaagaactctgtagcaccgcctacatacctcgctctgctaatcctgttaccagtggctgctgccagtggcgataagtcgtgtcttaccgggttggactcaagacgatagttaccggataaggcgcagcggtcgggctgaacggggggttcgtgcacacagcccagcttggagcgaacgacctacaccgaactgagatacctacagcgtgagctatgagaaagcgccacgcttcccgaagggagaaaggcggacaggtatccggtaagcggcagggtcggaacaggagagcgcacgagggagcttccagggggaaacgcctggtatctttatagtcctgtcgggtttcgccacctctgacttgagcgtcgatttttgtgatgctcgtcaggggggcggagcctatggaaaaacgccagcaacgcggcctttttacggttcctggccttttgctggccttttgctcacatgttctttcctgcgttatcccctgattctgtggataaccgtattaccgcctttgagtgagctgataccgctcgccgcagccgaacgaccgagcgcagcgagtcagtgagcgaggaagcggaagagcgcccaatacgcaaaccgcctctccccgcgcgttggccgattcattaatgcagctggcacgacaggtttcccgactggaaagcgggcagtgagcgcaacgcaattaatgtgagttagctcactcattaggcaccccaggctttacactttatgcttccggctcgtatgttgtgtggaattgtgagcggataacaatttcacacaggaaacagctatgaccatgattacgccaagctttataagaaggagatatacatatgaacagtcagcaaaatcctgatttagctgttcatcccttggcaattcctatggaaggcttactaggagaaagtgctacaactcttgagaagaatgtaattgccacacaactctcagaggaagcccaagtaaagctagaggtaatccaaagtttactggaaccctgcgatcgcacaacttatgggcaaaagttgcgggaagcagcagagaaactaaatgtatcgttgcgaacggtacaaaggttggtgaaaaactgggaacaagatggcttagtcggcctcactcaaacaagtagggctgataaaggaaaacaccgcattggtgagttttgggaaaacttcattaccaaaacctacaaggagggtaacaagggaagtaaacgtatgacccctaaacaagttgctctcagagtcgaggctaaagcccgtgaattaaaagactctaagccgcccaattacaaaaccgtgttacgggtattagcacccattttggaaaagcaacaaaaagccaagagtatccgcagtcctggctggagaggaactacgctttcggttaaaacccgtgaaggaaaagatttatcggttgattacagtaaccatgtttggcaatgtgaccatacccgcgtggatgtgttgctggtagatcaacatggtgaaattttaagtcgtccctggctaacaacagtaattgatacttactctcgttgcattatgggtatcaacttgggctttgatgcacccagttctggggtagtagcattagcgttacgccatgcaattctaccaaagcgttacggttccgagtacaaactgcattgtgagtggggaacctatggaaaaccagaacatttttatactgatggcggtaaagactttcgctctaaccacttgagtcagattggggcgcagttgggatttgtctgtcatttacgcgatcgcccttctgaaggtggagtagtagaacgtcccttcaaaacattaaatgaccaactattttcaacgcttcctgggtacaccggatctaatgtgcaggaacgcccagaagatgcagagaaggacgcaagacttactttgcgagaactagaacagttacttgtgcgttacatcgtagatcgttacaaccaaagtattgatgcgcggatgggcgaccaaacgcgctttgagcgttgggaagcaggattgcctacagtgccagtaccaataccagaacgagatttggatatttgtttaatgaagcagtcacggcgcactgtgcaaagaggtggttgtttgcagtttcagaatttaatgtatcggggggagtatttggcaggttatgccggagaaactgtcaacttgaggtttgaccccagagacattacaacaattttggtttatcgccaggaaaacaatcaggaagtatttctgactcgcgctcacgctcaaggtttggagacagagcaactggcattagatgaggctgaggcagcaagtcgcagactccgtaccgcagggaaaactatcagtaaccaatcattattgcaagaagttgttgaccgcgatgctcttgtcgctaccaagaaaagccgtaaggagcgtcaaaaattggaacagactgttttgcgatctgctgctgttgatgaaagtaatagagaatccttgccttctcaaatagttgaaccagatgaagtggaatctacagaaacggttcactctcaatacgaggacattgaggtgtgggactatgaacaacttcgtgaagaatatgggttttaaacaatgacagaagctcaggcgatcgccaagcagttgggtggggtaaaaccggatgatgagtggttacaagctgaaattgctcgtctcaagggtaagagcattgtgcctttacagcaggtaaaaactctccatgattggttagatggcaagcgcaaggcaagaaaatcttgccgagtagttggggaatcgagaactggcaagacagttgcttgtgatgcctacagatacaggcacaaacctcagcaggaagctggacgaccgccaactgtgcctgtcgtttatattcgacctcaccaaaaatgtggccccaaggatttgtttaaaaagattactgagtacctcaagtatcgggtaacaaaagggactgtatctgattttcgagataggacgatagaagtactcaagggttgtggcgtagagatgctaattattgatgaagctgaccgtctcaagcctgaaacttttgctgatgtgcgagatattgccgaagatttaggaattgctgtggtactggtaggaacagaccgtttggatgcggtaattaagcgggatgagcaggttctcgaacgctttcgggcgcatcttcgctttggtaaattgtcgggagaggattttaagaacaccgtagaaatgtgggaacaaatggttttgaaactgccagtatcttctaatctaaagagcaaggagatgctacggattctcacgtcagcaactgaaggctacattggtcgccttgatgagattcttagggaagctgcaattcgttccttatcaagaggattgaagaagattgacaaggctgttttacaggaagtagctaaggagtacaaatgatagaagcaccagatgttaaaccttggctattcttgattaaaccctatgaaggggaaagcctgagccactttcttggcaggttcagacgtgccaaccatttatccgcaagtggattgggtactttggcaggaattggtgctatagtggcacgttgggaaagatttcattttaatcctcgccctagtcagcaagaattggaagcgatcgcatctgtagtagaagtggatgctcaaaggttagcccagatgttaccgcctgctggagtgggaatgcagcatgagccaattcgcttgtgtggggcttgttatgccgagtcgccttgtcaccgaattgaatggcagtacaagtcggtgtggaagtgcgatcgccatcaactcaagattttagcaaagtgtccaaactgtcaagcaccttttaaaatgcctgcgctgtgggaggatgggtgctgtcacagatgtaggatgccgtttgcagaaatggcaaagctacagaaggtttgatgataaaaccagaaaaaggtcttaaataaggagatataccatgagtcaaataactattcaagctcgacttatttcctttgaatcaaaccgccaacaactctggaagttgatggcagatttaaacacgccgttaattaacgaactgctttgccagttaggtcaacaccccgacttcgagaagtggcaacaaaagggtaaactcccgtctaccgttgtgagccagttatgtcaacctctcaaaactgaccctcgctttgcaggtcagcccagccgtttatatatgtcggcaattcatattgtggactacatctacaagtcctggctggctatacagaaacggcttcaacagcagctagatggaaagacgcgctggctagaaatgctcaatagcgatgctgaattagtagaacttagtggtgacactttagaggctattcgtgtcaaagctgctgaaattttggcaatagctatgccagcatctgagtcagatagcgcttcacctaaagggaaaaaaggtaaaaaggagaaaaaaccctcatcttctagccctaagcgtagtttatccaagacattatttgacgcttaccaagaaacggaagatattaagagccgtagcgccatcagctacctgttaaaaaatggctgcaaacttactgacaaagaagaagattcagaaaaatttgctaaacgtcgtcgtcaagttgaaatccaaattcaaaggcttaccgaaaagttaataagtcgcatgcctaaaggtcgagatttgaccaatgctaaatggttagagacactcttgactgctacaaccactgttgctgaagataacgcccaagccaaacgctggcaggatattctgttgactcgatcaagttctctcccattcccccttgtttttgaaaccaacgaggatatggtttggtcaaagaatcaaaagggtaggctgtgtgttcacttcaatggcttgagcgatttaatttttgaggtgtactgcggcaatcgtcaacttcactggtttcaacgcttcctagaagatcaacagactaaacgcaaaagcaaaaatcagcattctagcggcttgttcacactcagaaatggtcatctagtttggcttgaaggtgagggtaaaggggaaccttggaatcttcaccacttgaccctttactgctgtgttgacaatcgcttgtggacagaggagggaacagaaatcgttcgccaagagaaagcagatgaaattactaaattcatcacaaacatgaagaagaaaagcgatctaagcgatacacagcaggctttgattcaacgtaaacaatcaacacttactcgaataaacaattcctttgagcgtcctagccaacccctttatcaaggtcaatcacacattttggttggcgtaagcctgggactagaaaaacctgccacagtagcagtagtagatgcgatcgccaacaaagtcttggcttaccggagtattaaacaattacttggcgacaattacgaactgctaaatcgccagagacgacaacagcagtacctatctcacgaacgccacaaagcacaaaaaaacttctctcccaatcaatttggagcatctgagttagggcaacatatagacagattattagctaaagccattgtagcgttagcgagaacctacaaagctggcagtattgtcttgcccaagttaggggatatgcgggaggttgtccaaagtgaaattcaagctatagcagaacaaaaatttcccggttatattgaaggtcagcaaaaatatgccaaacagtaccgggttaatgttcatcggtggagctacggcagattaattcaaagcattcaaagtaaagcagctcaaacaggaattgtgattgaggagggaaaacaacctattcgaggtagtccccacgacaaagcaaaggaattagcactttctgcttacaatctccgcctaactaggcgaagctaacaaatatctgaaccttgataatagaacattaatagcgccgcaattcatgcttgacagctagctcagtcctaggtataatactagtatattaatagcgccgcaattcatgctgcttgcagcctctgaattttgttaaatgagggttagtttgactgtataaatacagtcttgctttctgaccctggtagctgctcaccctgatgctgctgtcaatagacaggataggtgcgctcccagcaataagggcgcggatgtactgctgtagtggctactgaatcacccccgatcaagggggaaccctccaaaaggtgggttgaaagcggtcttctcgacgagaagacacgtgaatttttttgttcagaacgctcggtcttgcacaccgggcgttttttctttgtgagtccagaattcactggccgtcgttttacaacgtcgtgactgggaaaaccctggcgttacccaacttaatcgccttgcagcacatccccctttcgccagctggcgtaatagcgaagaggcccgcaccgatcgcccttcccaacagttgcgcagcctgaatggcgaatggcgcctgatgcggtattttctccttacgcatctgtgcggtatttcacaccgcatatggtgcactctcagtacaatctgctctgatgccgcatagttaagccagccccgacacccgccaacacccgctgacgcgccctgacgggcttgtctgctcccggcatccgcttacagacaagctgtgaccgtctccgggagctgcatgtgtcagaggttttcaccgtcatcaccgaaacgcgcga

SEQ ID NO: 1645 - DNA, 23 bp, Synthetic construct
  source 1..23: mol_type = other DNA
cggtcttctcgacgagaagacac

SEQ ID NO: 1646 - DNA, 23 bp, Synthetic construct
  source 1..23: mol_type = other DNA
atgccgatcgcgtcacactacgt

SEQ ID NO: 1647 - DNA, 23 bp, Synthetic construct
  source 1..23: mol_type = other DNA
gccactcgctttaatgatgattt

SEQ ID NO: 1648 - DNA, 37 bp, Synthetic construct
  source 1..37: mol_type = other DNA
gtttcaacaaccatcccggctaggggtgggttgaaag

SEQ ID NO: 1649 - DNA, 372 bp, Synthetic construct
  source 1..372: mol_type = other DNA
gtactaatagcgccgcagttcatgctctttaagagtctctgtactgtggaaaatctgggttagtttgacggttggaaaaccgttttgctttctgaccctggtagctgcccgcttctcatgctctgacttttcacgttatgtggaaaaagtaacgtaatttcgttagttaagacttaccgtaaaaagtcagttctgatgctgctgtcgcaagacaggataggtgcgctcccagcaaaaggagtatgtcttgaaaaagactagccgttctagtaacggtgcggattaccgcagtggtggctactgaatcacccccttcgtcgggggaaccctccaaaaggtgggttgaaagnnnnnnnnnnnnnnnnnnnnnnn

SEQ ID NO: 1650 - DNA, 463 bp, Synthetic construct
  source 1..463: mol_type = other DNA
tgtacattcgcaaattaaatgtcgtaattcgcaaatttgtgtcgtttttcgcaaattaatgtcgtttagaatagtttgtctcatcaattcaattataggaacttttcgcaaattaatgtcgtcctgtttctccatttagtgtcgattaacaaattaatgtcgctgttaacgaattaatgtcgtcgaattagttccaactaacgttaacaaattaatgtcgtctaacataatgtcttgctannnnnnnnnnaaaatgcgacatctaatttgcgaaacaggcaaatcttaataaacgacatttaatttgcgaaaataggatttgcgacatctaatttgcgaaacaggcaaattactcagttttatggataaatagcttgtaagtcctacgcaataaagatctcagctattagaagtaattgcgacactaatttgcgaattgcgacatataatttgcgaatgtaca

SEQ ID NO: 1651 - DNA, 18 bp, Synthetic construct
  source 1..18: mol_type = other DNA
taaggaatattgttgata

SEQ ID NO: 1652 - DNA, 18 bp, Synthetic construct
  source 1..18: mol_type = other DNA
catcaacaaatatgacag

SEQ ID NO: 1653 - DNA, 18 bp, Synthetic construct
  source 1..18: mol_type = other DNA
gatacacacatgttgatg

SEQ ID NO: 1654 - DNA, 18 bp, Synthetic construct
  source 1..18: mol_type = other DNA
tatcaacatctctctttt

SEQ ID NO: 1655 - RNA, 60 nt, Synthetic construct
  source 1..60: mol_type = other RNA
ctgataacnnnnnnnnnnnnnnnnnnnnnnnnnnnnnnnngtgaactgccgagtaggtag

SEQ ID NO: 1656 - DNA, 50 bp, Synthetic construct
  source 1..50: mol_type = other DNA
ccagtacagcgcggctgaaatcatcattaaagcgagtggcaacatggaaa

SEQ ID NO: 1657 - DNA, 50 bp, Synthetic construct
  source 1..50: mol_type = other DNA
tttccatgttgccactcgctttaatgatgatttcagccgcgctgtactgg

SEQ ID NO: 1658 - DNA, 34 bp, Synthetic construct
  source 1..34: mol_type = other DNA
ccagtacagcgcggctgaaatcatcattaaagcg

SEQ ID NO: 1659 - DNA, 34 bp, Synthetic construct
  source 1..34: mol_type = other DNA
cgctttaatgatgatttcagccgcgctgtactgg

SEQ ID NO: 1660 - DNA, 45 bp, Synthetic construct
  source 1..45: mol_type = other DNA
cataacaggaagaaaaatgccccgctgtgggcggacaaaatagtt

SEQ ID NO: 1661 - DNA, 45 bp, Synthetic construct
  source 1..45: mol_type = other DNA
tccgcccacacccgcttacgcagggcatccatttattactcaacc

SEQ ID NO: 1662 - DNA, 146 bp, Synthetic construct
  source 1..146: mol_type = other DNA
tgttgatgcaaccataaagtgatatttaataattatttataatcagcaacttaaccacaaaacaaccatatattgatatcctcacaaaacaaccataagttgatatttttgtgaatcgagtatttcagcaaaactactgcagtaag

SEQ ID NO: 1663 - DNA, 127 bp, Synthetic construct
  source 1..127: mol_type = other DNA
tgttgatacaaccataaaatgataattacacccataaattgataattatcacacccataaattgatattgcctcttcatggtctaaacttcagtaagtttacgacattttcatgaagaggtcatttc

SEQ ID NO: 1664 - DNA, 40 bp, Synthetic construct
  source 1..40: mol_type = other DNA
attttatggttgttccaacannnnnnnnnnnnnnnnnnnn

SEQ ID NO: 1665 - DNA, 40 bp, Synthetic construct
  source 1..40: mol_type = other DNA
nnnnnnnnnnnnnnnnnnnntgttggaacaaccataaaat

SEQ ID NO: 1666 - DNA, 40 bp, Synthetic construct
  source 1..40: mol_type = other DNA
attttatggttgtatcaacannnnnnnnnnnnnnnnnnnn

SEQ ID NO: 1667 - DNA, 40 bp, Synthetic construct
  source 1..40: mol_type = other DNA
nnnnnnnnnnnnnnnnnnnntgttgatacaaccataaaat

SEQ ID NO: 1668 - DNA, 40 bp, Synthetic construct
  source 1..40: mol_type = other DNA
nnnnnnnnnnnnnnnnnnnntgttgatgcaaccataaagt

SEQ ID NO: 1669 - DNA, 40 bp, Synthetic construct
  source 1..40: mol_type = other DNA
actttatggttgcatcaacannnnnnnnnnnnnnnnnnnn

SEQ ID NO: 1670 - DNA, 40 bp, Synthetic construct
  source 1..40: mol_type = other DNA
nnnnnnnnnnnnnnnnnnnntgttggagcaaccataaagt

SEQ ID NO: 1671 - DNA, 40 bp, Synthetic construct
  source 1..40: mol_type = other DNA
actttatggttgctccaacannnnnnnnnnnnnnnnnnnn

SEQ ID NO: 1672 - protein, 15 aa, Synthetic construct
GGSGGSGGSGGSGGS

SEQ ID NO: 1673 - DNA, 74 bp, Synthetic construct; identical to SEQ ID NO: 916
  source 1..74: mol_type = other DNA

SEQ ID NO: 1674 - DNA, 74 bp, Synthetic construct; identical to SEQ ID NO: 917
  source 1..74: mol_type = other DNA

SEQ ID NO: 1675 - DNA, 130 bp, Synthetic construct; identical to SEQ ID NO: 955
  source 1..130: mol_type = other DNA

SEQ ID NO: 1676 - DNA, 130 bp, Synthetic construct; identical to SEQ ID NO: 1298
  source 1..130: mol_type = other DNA

SEQ ID NO: 1677 - DNA, 130 bp, Synthetic construct; identical to SEQ ID NO: 1347
  source 1..130: mol_type = other DNA

SEQ ID NO: 1678 - DNA, 130 bp, Synthetic construct; identical to SEQ ID NO: 1419
  source 1..130: mol_type = other DNA

SEQ ID NO: 1679 - DNA, 130 bp, Synthetic construct; identical to SEQ ID NO: 1444
  source 1..130: mol_type = other DNA

SEQ ID NO: 1680 - DNA, 129 bp, Synthetic construct
  source 1..129: mol_type = other DNA
ctgttgatacaaccaaaaatgataattacacccataaattgataattatcacacccataaattgatattgcgatttaggagttgatttaatcaactttagtggaccaatcacgtgatcatggatggtag

SEQ ID NO: 1681-1713 - skipped (33 entries)

SEQ ID NO: 1714 - protein, 273 aa, Escherichia coli
MAKANSSFSEVQIARRIKEGRGQGHGKDYIPWLTVQEVPSSGRSHRIYSHKTGRVHHLLSDLELAVFLSLEWESSVLDIREQFPLLPSDTRQIAIDSGIKHPVIRGVDQVMSTDFLVDCKDGPFEQFAIQVKPAAALQDERTLEKLELERRYWQQKQIPWFIFTDKEINPVVKENIEWLYSVKTEEVSAELLAQLSPLAHILQEKGDENIINVCKQVDIAYDLELGKTLSEIRALTANGFIKFNIYKSFRANKCADLCISQVVNMEELRYVAN

SEQ ID NO: 1715 - protein, 282 aa, Enterobacter cloacae
MTRGRRFTSFESYEKALRDGIGLGAGENYQPWIRPQDFTNSTGIRSAIRGLKTFRQHNTLSGIESEFYYLAEFNDSVIDIREQFPLLPVTLTQNIANILNVPHPALRRKVCDTDKPAVPAVMTTDFVLTFRNQDGTIKYKSYSVKPDEIISKRDAEKQEIERVFWEGINVCFQIYTGSEVTRIKSGNISWFTAPFRMNGLPDYHLDVSLLREFPPGQYVLLHMVKKIASSLSISTDDAFIVLKFMLATKSIEVDLTSDIVSNGCIVVLRNSACDMGLAYENN

SEQ ID NO: 1716 - protein, 275 aa, Aeromonas salmonicida
MAKSQQSLSELQIVRRIKDGRGQGFGKQYRPWLYVQDVPSEGRSHRIYSHKTGRVHHLLSDLELAAFLVFEWSPDIADIREQFPLRREDTRAIAAEHRLRHPSVRGVDQVMSSDFLVDTDNGLHRQFAVQVKPMEALSDVKIIEKLELERRYWQLKQVPWFLITEHEIDPVIRQNVEWLYPTKTEGLVEPGLLAQLPLLYRTFSKAPETKVIDICKRIDTAYDLELGHTLRDVRTLIANGFLKFNIHKVFRTITAAELIFCQFNDMEALLHVANQ

SEQ ID NO: 1717 - protein, 273 aa, Proteus mirabilis; identical to SEQ ID NO: 1714

SEQ ID NO: 1718 - protein, 702 aa, Escherichia coli
MWQINEVVLFDNDPYRILAIEDGQVVWMQISADKGVPQARAELLLMQYLDEGRLVRTDDPYVHLDLEEPSVDSVSFQKREEDYRKILPIINSKDRFDPKVRSELVEHVVQEHKVTKATVYKLLRRYWQRGQTPNALIPDYKNSGAPGERRSATGTAKIGRAREYGKGEGTKVTPEIERLFRLTIEKHLLNQKGTKTTVAYRRFVDLFAQYFPRIPQEDYPTLRQFRYFYDREYPKAQRLKSRVKAGVYKKDVRPLSSTATSQALGPGSRYEIDATIADIYLVDHHDRQKIIGRPTLYIVIDVFSRMITGFYIGFENPSYVVAMQAFVNACSDKTAICAQHDIEISSSDWPCVGLPDVLLADRGELMSHQVEALVSSFNVRVESAPPRRGDAKGIVESTFRTLQAEFKSFAPGIVEGSRIKSHGETDYRLDASLSVFEFTQIILRTILFRNNHLVMDKYDRDADFPTDLPSIPVQLWQWGMQHRTGSLRAVEQEQLRVALLPRRKVSISSFGVNLWGLYYSGSEILREGWLQRSTDIARPQHLEAAYDPVLVDTIYLFPQVGSRVFWRCNLTERSRQFKGLSFWEVWDIQAQEKHNKANAKQDELTKRRELEAFIQQTIQKANKLTPSTTEPKSTRIKQIKTNKKEAVTSERKKRAEHLKPSSSGDEAKVIPFNAVEADDQEDYSLPTYVPELFQDPPEKDES

SEQ ID NO: 1719 - protein, 673 aa, Enterobacter cloacae
MILYELNDNKITRPKLFYIEPFKLGVQERNIVHFNYPIPVWMMATDNDIPDKNRIRRDKNFALISPLLSDPDFLFLYALNERSPLLRNYAKDNNASYSTIKKLLSNCWKYGRGKQSLTPAYARSGGNGVKKTVKSVSVGRKKKGRALIDGRAETYIMRERDSANIKKILKRHYLKPKGKSQAECWRIYLEEYFPQLASITQDCAISYPSLAQFRYCITKLFSLTEIARRRTTERDFLLNKRALAGSSADSDTLPGSVFEIDATVADVHLVSELTGDVVGRPTVYLVADRATRMITGMHVSYLYASWRAASQALANCFSPKGQYCRLFGVNDISDDRWPCSHVPTKLLCDNAEMLGLKTQSAVVPFTELMFAPSYRADLKGVVESRFRILNQKAIHKLLGTTRGGFVVRGETRPQLRSCYTLKAFTEIIIRAVDEYNHALNTELLYINPLLLEHNLIATPVNSWNISINNFRFGGYQITEHEIISRLLYPDSASITGKGIQYGNRFYECSEDEMVGARSFGQTRVDVRINDNSMDKIYIRSGKDTVFSQRELLSRRKIFQGLPHMEAEVVSDIVDMHKSSNVITPESMALRKLIEANEQEGEILLAALRKKGRGRYKNIRENRRKEVLYAQQGDSRKTSENYKLPPANNIVILPGPEARKAWLTKQNDPYKKDK

SEQ ID NO: 1720 - protein, 697 aa, Aeromonas salmonicida
MWQINEVLRFDGQHYRILAVNSGEIVWICLDLDTAQPERRTELELISYFDEERLFRHVDPFASIDLEEPLVGSVAFNKRERGLLIIQPIIADELCFEPRIRARRVEQVRQSGMASIATIYKLLRRYWQRGQKPNSLLPDYKNSGAPGKTRAASGQAKIGRSRKFGDGEGMKVTPDIERLFRLTIEKHILSVDGLKTTVAYRRFSDLFKQYYPQVEEANRPTIRQFRYFYDREYKKPQRLEARTHPGVYKKDVRPLTSTATASVLGPGSRYEIDATIADIYLVDDEDRSKIIGRPTIYIVIDVFSRMTSGFYIGFDNPSYVVAMQAVVNACIDKTNICAQLGVDVSPDEWPCIGLPDVILADRGEMMSHQVDALISGFNLRIESAPPRRGDAKGIVESCFRTLQAEFKPYVPGVVVGNRVKKHGERDYRLDAVMPISDFSQIILRTILFRNNYHVLDKYDRDADLPADLPSIPRDLWNWGMQHRVGGLRQVDPLQLQVALLPRRKVSVSPFGVNMWGLYYSGTDLLREGWLHRSTEINRPESLEAAYDPASADTIYLFPQAGSRIYWECSLTDRSRQFRGLTFWQVWDIQAEEKHNKANAKLIEDAKRRELDAFIKSKTVDAIKQSPSVTEPDQQRIQQIRSNKKSARDAERQNRTKSVTVDPGKPLADVVPLKPADDDYSFPHFVPELFDDGQGDAE

SEQ ID NO: 1721 - protein, 702 aa, Proteus mirabilis; identical to SEQ ID NO: 1718

SEQ ID NO: 1722 - protein, 555 aa, Escherichia coli
MSATRIQAVYRDTGVEAYRDNPFIEALPPLQESVNSAASLKSSLQLTSSDLQKSRVIRAHTICRIPDDYFQPLGTHLLLSERISVMIRGGYVGRNPKTGDLQKHLQNGYERVQTGELETFRFEEARSTAQSLLLIGCSGSGKTTSLHRILATYPQVIYHRELNVEQVVYLKIDCSHNGSLKEICLNFFRALDRALGSNYERRYGLKRHGIETMLALMSQIANAHALGLLVIDEIQHLSRSRSGGSQEMLNFFVTMVNIIGVPVMLIGTPKAREIFEADLRSARRGAGFGAIFWDPIQQTQRGKPNQEWIAFTDNLWQLQLLQRKDALLSDEVRDVWYELSQGVMDIVVKLFVLAQLRALALGNERITAGLLRQVYQDELKPVHPMLEALRSGIPERIARYSDLVVPEIDKRLIQLQLDIAAIQEQTPEEKALQELDTEDQRHLYLMLKEDYDSSLLIPTIKKAFSQNPTMTRQKLLPLVLQWLMEGETVVSELEKPSKSKKVSAIKVVKPSDWDSLPDTDLRYIYSQRQPEKTMHERLKGKGVIVDMASLFKQAG

SEQ ID NO: 1723 - protein, 487 aa, Enterobacter cloacae
MAVNAKYHQADLPEYRGNPLIEALPPLMSREDVMLALSNFPEINANERELSTEVREQYVDRIDAFRCPQGTFFDCYKAIVRLLRTGYTTRNPLDIHTVRFLHYSVEGSLGEALGDGFHRPRAGTFSITGISGVGKSTMLEQVLGHFPQIIDHNVYQGHDLTPLRLVVWLKINCPPNSKARDLTEILLTAIDDALGLERTAPPSRTGTLLRLIAQKIKSAFIGVLVIDEMQRLTRTNGDEQLINFLHDIVDTLGVPLVFCGNPEFEDKMRQRLRFARRAETAGFIRLNPLAYQTTDWQSFIQYLWRYQWTNVYTPLNDELNIKMHKLSKGNLAIAQRLFVTAQLKVIGTGNEVITPALLGLSESVLTSRADEFIQADALIYDVELPELSESEETVLPQKNNGKSFLKSREIRQKPARRVHKSFTVTADLNRPQHEEFAEELNNYTAQTEAILAKRCEPVLFRALWQNKCRYSALEHYDRLCNDPSTET

SEQ ID NO: 1724 - protein, 552 aa, Aeromonas salmonicida
MSASKIKAIYRDTGVSAYTGNPFIEALPPLQESVDSANALRSNMLFHPEDLQKARIVRAHNICRIADEFFQPLGAHMLLSERVSLMIRGGYVGRNPKTGDLQRHLQNGYERVQTGDLSTFRFEEAKSTAQSMLLIGCSGSGKTTSLGRILQTYPQVIYHAEFNFEQVVYLKVDCSHNGSLKEICLNFFRSLDKALGTNYEKTYGLKRRNGIETLLALMAQTANAHALGLLVIDEIQHLSRSRSGGSEEMLNFFVTMVNTIGVPVMLIGTPKARDIFEADLRSARRGAGLGAIFWEPMSLGHPDKPSQEWIAFTNNLWKLQLLQKRDVLLTDEIRAVWYDLSQGVMDIVVKLFVLAQLRALALNKERITVGLLRQVYEDELKPVHPMLAALRSGIPEKIAQYSDLMVPDMDKRLIQLQQNIAAMKEQTAEETALQQLATEDERRIYLLLKDVYDSPLLVATIRKAFTENPQLTISQLLPVVTQWLSQPAVKDATMPNVSQEKSTVIKADAWEQLPFDDLRYIKSQHKQAVDVHAELKSKGMLLDLKSVLARAS

SEQ ID NO: 1725 - protein, 555 aa, Proteus mirabilis; identical to SEQ ID NO: 1722

SEQ ID NO: 1726 - protein, 508 aa, Escherichia coli
MRNFPVPYSNELIYSTIARAGVYQGIVSPKQLLDEVYGNRKVVATLGLPSHLGVIARHLHQTGRYAVQQLIYEHTLFPLYAPFVGKERRDEAIRLMEYQAQGAVHLMLGVAASRVKSDNRFRYCPDCVALQLNRYGEAFWQRDWYLPALPYCPKHGALVFFDRAVDDHRHQFWALGHTELLSDYPKDSLSQLTALAAYIAPLLDAPRAQELSPSLEQWTLFYQRLAQDLGLTKSKHIRHDLVAERVRQTFSDEALEKLDLKLAENKDTCWLKSIFRKHRKAFSYLQHSIVWQALLPKLTVIEALQQASALTEHSITTRPVSQSVQPNSEDLSVKHKDWQQLVHKYQGIKAARQSLEGGVLYAWLYRHDRDWLVHWNQQHQQERLAPAPRVDWNQRDRIAVRQLLRIIKRLDSSLDHPRATSSWLLKQTPNGTSLAKNLQKLPLVALCLKRYSESVEDYQIRRISQAFIKLKQEDVELRRWRLLRSATLSKERITEEAQRFLEMVYGEE

SEQ ID NO: 1727 - protein, 331 aa, Enterobacter cloacae
MLLRAFPGEILFSRLCRSLSVSGLPVQKFSRSLGPEARSSFHPFLTQHLTEIAQTSHENAELLWAEQTLFPLWVWSMPGYAKALRQLTGPPARLLWFYQLTGNHSSQSMQLHFCPVCAREDAMEYGVPYWHCEHQIPGVSICNRHCCRLMPKLVPPSPHIAVEFYPDNFNTMILSKNIENDFAVFASQILTRLAHGEEISDNYLSGFTSTRTDVENMKHSGNEKLFLSLNDLIRHLWEENSDPVISDKSHFLYYIISHFENIFPAQKLLLLFYLQRMHSIRQNASREHTPLNKMNKDHTKNGIHKPVMELNNLMVRLWPSTKFIADLRTQT

SEQ ID NO: 1728 - protein, 506 aa, Aeromonas salmonicida
MRNFPVPYPDELVYSMVARAGIYHGITSPKQLLDEVFENRKVIATLDLPCHLQSISSLFQNTGRYSVEELVYQHTLFPLYAPFVTESHKSRALQMMAGRSQGAVHLMLGVAASRIQSSDRFRYCPECIKNQHQHYGEYFWQRNWFFPGLAVCPEHGPLSILTNGSGSHRHHFFAMTPQSPVDCELSSVNEELLRLAIYANKFLNISPGYSPDFEQWTSFYRDLASDFGFCRGRHINHGEIHERVHACFHPSTLTQLNLYTDSATETGWLKGIFRKHRKAFSYLEHAIIWQSFIAELEPEDVIDRVRKIKPCTKVVFEITASSTLSKNNEHLQVQRQTWQKLVLQYGVLNARNSRPGKALYAWLYRNDKCWLMAFNFEHKEQRTNPELKADWHRRDLVAIRQLRKLLQEIAPSYAGPRLSANFLLCKLQQSSTIEKNLDKLPLVRMFLQRYTETITEYQIRRLTNTCAEMQRQGEPLKKWLVMRKAGLSQERLRPDAQTVLNELQLF

SEQ ID NO: 1729 - protein, 508 aa, Proteus mirabilis; identical to SEQ ID NO: 1726

SEQ ID NO: 1730 - protein, 188 aa, Rhodanobacter sp.
MTTHYIDITVKPDPESSAAQLLGALYDKLHLALVQYGLNDIGVSFPGYSMNPRNLGTALRLHGTDHALRQLTQADWLKGVRDHVRVTDITEVPDGASHRTVRRKQFKTSAERLRRRRMRRKGETAEQAARAIPSSIERQPNLPYVHVRSQSTGQPFCLFVTLGAPAADATPGKFNGYGLSETTTIPWF

SEQ ID NO: 1731 - protein, 188 aa, Burkholderia plantarii
MTTHFIDIRLLPDPEFSQVHVFGALVSKLHRVLVQMRRDDIGISFPEYSLRPRSVGRVLRLHGGDVGLRELMAQPWLQGMRDHVVVAEAAPVPAGATHRVVRRRQFKTNAERLRRRRMQRKGETAEQAAAHIPDSVERRPDLPYVQLRSTSTGQGFCLFVEQGNVGREAVAGAFNSYGLSQGATVPWF

SEQ ID NO: 1732 - protein, 189 aa, Idiomarina sp.
MDHYIDIRLRPDPDFPEAMLMGALYNKLHRALFDLQATDLGVSFPGHKHGVRARTLGSHLRLHGTHERLKQLMGMDWLTGMRDHTQVSAVLEVPAGAQHINVARKQFNTGSESRAKRYAKRHSISEEEARSIYSKVAARRIELPFVQINSRSTQQRFSLFIEHGKPAASSSEGSFSHYGLSPSATVPWF

SEQ ID NO: 1733 - protein, 187 aa, Pseudomonas aeruginosa
MDHYLDIRLRPDPEFPPAQLMSVLFGKLHQALVAQGGDRIGVSFPDLDESRSRLGERLRIHASADDLRALLARPWLEGLRDHLQFGEPAVVPHPTPYRQVSRVQAKSNPERLRRRLMRRHDLSEEEARKRIPDTVARTLDLPFVTLRSQSTGQHFRLFIRHGPLQATAEEGGFTCYGLSKGGSVPWF

SEQ ID NO: 1734 - protein, 341 aa, Rhodanobacter sp.
MTNELKTASVLAFERKLDPSDALLFAGNWAARTESQDWAPITLREKSVRGTISNRLKAGAQDPAKLDASIQNPNLQTVDVAALPADADTLKVQFTVRVLGGAGNPSACNDADYRHKLLATVGDYVQQHGFVELARRYAANLANGRFLWRNRIGAEQVEVQIAHIQDGEAASRWTFNALAHSMLDLAASADDTQSLSELATLIASGLAGESHVLLQIMAFVRVGAGQEVFPSQELILDKGSSKKSKTLYDVQSVAAIHSQKVGNALRTIDTWYPDAIENGPIAVEPYGSVTTQGKAYRQPKAKMDFYNLLDGWIIKDKVPDVDQQHFVIATLIRGGVFGEAS

SEQ ID NO: 1735 - protein, 341 aa, Burkholderia plantarii
MAFMSEKLTTATVLAFERKLDPSDAIFHAGHWDDHDKASAWTPVEIREKSVRGTISNRLKTKEQDPAKLDAAIEKPNLQTVDVATLPSDADTLRVQFTLRVLSGAGTPSACNSAAYRAKLSSVVSAYVEQHGFAELANRYAANLANGRFLWRNRIGAESVRVEIARLRKGAAERTWTFDALSLNLRSIETPDAPLAELGELIADGLAGRTDVLLQVTAYVRLGRGQEVFPSQELILDKGSSRKSKTLYQVRDIAAIHSQKIGNAIRTIDSWYEGADELGPIAVEPYGSVTTQGKAYRQPKQKQDFYTLLDDWLLKDRIPPVEQQHFVLAVLIRGGVFGDAS

SEQ ID NO: 1736 - protein, 344 aa, Idiomarina sp.
MAKNDTLKTASVLAFERKLDPSDALFRAGQWEDRSQAAQWKLIPVREKSVRGTISNRLKAKDQDPAKVDAKIEDPNLQTVDVATLPHDADTLAVRFTLRVLAGAGTPSACNNAEYQKKLAQTVSGYVSEHGFDELAHRYACNLANGRFLWRNRIGAEEVEVVVSQMKEGQPEKTWTFDALEQSTRDFTGNAETRELGAVIAQALAGKQYLLLDVVAFARIGAGQEVFPSQELILDRSRGDKSKTLYSIGDEKQAAIHSQKLGNALRTIDTWYPAPEDGDTLGPIAVEPYGSVTTQGTAYRQPKQKVDFYNLLDNWLLKDQVPPVEQQHFVMATLIRGGVFGEAG

SEQ ID NO: 1737 - protein, 342 aa, Pseudomonas aeruginosa
MSKPILSTASVLAFERKLDPSDALMSAGAWAQRDASQEWPAVTVREKSVRGTISNRLKTKDRDPAKLDASIQSPNLQTVDVANLPSDADTLKVRFTLRVLGGAGTPSACNDAAYRDKLLQTVATYVNEQGFAELARRYAHNLANARFLWRNRVGAEAVEVRINHIRQGEVARAWRFDALAIGLRDFKADAELDALAELIASGLSGSGHVLLEVVAFARIGDGQEVFPSQELILDKGDKKGQKSKTLYSVRDAAAIHSQKIGNALRTIDTWYPDEDGLGPIAVEPYGSVTSQGKAYRQPKQKLDFYTLLDNWVLRDEAPAVEQQHYVIANLIRGGVFGEAEEK

SEQ ID NO: 1738 - protein, 457 aa, Rhodanobacter sp.
MSELTDRGKTFRAAIAGFIEARREAKLKSKADDADTASKYDYATWLADAARRVGQIQAVTHVLKATHPDARGSSLHVAPSQLPQHVEIGSHLLGSDYAEDVVGNAAALDVFKLLKLDVDGRRLLDWAQAGDADLQAALSDAAEQAQGWMQAFTSLVREETQPTSHPMAKQLYWLAGENPQDDAQYHLLQPMFSSTLAHAVHADIQAARFGEINKEARQARRDNKPGEHPYRDYRGLVARKLGGTKPQNISQLNSERGGVNYLFASLPPPAWAPRQGPDLRKLDSVFDQIRGALFWFGEVREHLQVLADFLKTNPDQNKETRDRVAASVQAIGQELAMFGTAVQGRYPAGWTRDADCRLPRCEQLWLDPDRTELPLREDADYPQWHEDDVTFQQAYDRGDWADEVATRFGLWLNGQLRKRSDELAVLGESEMRHFARQAILDVAWPIPLQRRAKAGAA

SEQ ID NO: 1739 - protein, 457 aa, Burkholderia plantarii
MSDSPAAPGNSSFRAAVDAFLRARLQAKLDKLPEDDPKRAGLIAEHQRTAWIPDAARRVRQIQAVTHSLKPIHPDARGTNLHVAPSDLPTLTDLGSHALGGRFALDVVGNAAALDVVKLLKVEHDGRTLLEALQADDAGALHSLADDAGEAAALRDAFLNLTEARDGAASSHVLAKQVYWLTGDDPSDDAQYHLLAPLYPTSLVQAVYDDVHDARFGEANKLARQARREGAPFDGVYREYRDLAVQKLGGTKPQNISQLNSERGGNNYLLSSLQPVWDSRLNHLPAHTDSIFDRPFTGRPEVRRTLNALRTFLSGDPSANLDTRTRRDALRDRLIDELVSYAGELLRHPAGWTREAPFADLNDDEKLWLDPLRAELPEEREFAVRWLAMEWPERIGARFGKWLNAQLRHELPDVGYHEAREWQRALLGDDSSWQEQLRRMRDALDHVHLSHVSTEGA

SEQ ID NO: 1740 - protein, 448 aa, Idiomarina sp.
MTEPPHQSLSLKELIHDFIQQRFATKTEKLAKDDPAYLKFQEQFAPQTWLADAARRVSQLQVVTHSLKPIHPDAKGTNLYVEPRTLDQGDLVGSHCLPDDFQGDVVGNAAALDVYKFLKLEWQGRSLLELALENDDTFIDALSKNPEEAQAWVSAFASIVEPKGAPSSHTRGKQMYWLVGDDPTDDASYHLLAPLYATALTHPFHARLSEARFGEHAKAGRKARRENVAFEGVYSDYLNLAVQKLGGTKPQNISQLNSERGGQNYLLASLPPHWQSHDIYPPMRDAFRAFKRRPTVWKTVHELKRFLETDPAKNMHTRDLRDDFITMLVDELMLFTFDMHSLAPGWTADDKCELGPEEQYWLDPGRALQDSEFDQARRRSPWHEAISDRAAAWLNRQLNYKSALSVGDLEHDHWQRQIEAVLKNFRRQLDDLQDALRDDDESFQGESA

SEQ ID NO: 1741 - protein, 433 aa, Pseudomonas aeruginosa
MSERPNGDSPTLRQLIESFIQERLQGKLDKLKPDEDVKRQSLLAGHRREAWLADAARRVGQLQLVTHTLKPIHPDARGSNLHSLPQAPGQPGLAGSHELGDKLVSDVVGNAAALDVFKFLSLQYQGKNLLNWLTEDSAEAVQALSDNAEQAREWRQAFIGITAVKGAPASHSLAKQLYFPLPGSGYHLLAPLFPTSLVHHVHGLLREARFGEAARAAREARSRQESWPHGFSEYPNLAIQKFGGTKPQNISQLNSERYGENWLLPSLPPHWQRQDQRAPIRHSSVFEHDFGRSPEVSRLTRTLQRLLAKTRHNNFTIRKYRAQLVGQICDEALQYAARLRELEPGWSATPGCQLHDAEQLWLDPLRAQTDETFLQRRLRGDWPAEVGNRFANWLNRAVSSDSQILGSPEAAQWSQELSKELTMFKEILEDERD

SEQ ID NO: 1742 - protein, 324 aa, Rhodanobacter sp.
MNACPNFTHLLVLPHLKVHNANAISSPLTHGFPSITAFLGLMWALERKTRAAGLDLEFGAVGVVCHSHQEQTTESGFVKAFRLTRNAVGKDGKTAAIVEEGRIHLDLSLVLAVHAGPWDQDAQRRDLKTIADLLQGMRIAGGTLLPAPQTQTSRHRPWLADLTGNSDDQANAFRKLRARLLPGSALVARDDLIDQRLRVLQAGTPEPTRLDAWLSLCRINWYYDMQAEGGTGAWQNDRTKGSGWVVPIPVGYGALGDLHEAGSVPNARDASTPFRFVESLYSMGEWIGPHRLHSPQDLLWYADSHPDDGLYRCRNDYHTVNTNL

SEQ ID NO: 1743 - protein, 349 aa, Burkholderia plantarii
MSDIEALLVLPHLQIQNANAISSPLTHGFPSITAMTGLMWALQRKLAGAGIPLKLRRVGVICHDFDEQVQDGYVKTFRLTRNPVDKDGATAAIVEQGRMHLDLTLLFDVVDAGTAGDAPSSGLRDDTGRNEWATRIGEIVAGMRVAGGSVLPGRAIPGRRTRPWIATLPDDYEEQLRLFARWRRQWLPGYALVGRDDLLAERHRLLREQGDDASLLDAWLHAARFNHQPLPDESAGSGADAAKRLRWGDPLRPRGSGWIVPIPVGYTALTKPHAPGAVANTRDAATPFVWVESIYSLGQWISPHRVTHWHELLWQPETDGKAGLYRCRSGYQGPAGANEPGDDDLPDFD

SEQ ID NO: 1744 - protein, 327 aa, Idiomarina sp.
MINHLLVLPRLRIQNANTISSPMTWGFPSMSAFVGVQQVLERNLPDDIKLVFNEIGVVCHHIDPQVTEGGFIKAFHLTRNPVDKSGGTAAIVEEGRAHLEISLLIGVESDGDDLGSPERCRVIAQTLFDQVQGMRIAGGSVIPALNAQQRYRPELVSFDVNESERAKQWQRLKRRLLPGFALVLRDDLLTKHTATLKAQNSSATALDAWLDLSRLNHECHVEQVKDEKDGKEKEVVQWSIRRPYPGWLVPIPVGYGAISDLYAPGDVANARNAEVPFRFVESLYSMGEWVSPHRFQKPDDLMWFVENDLDRGIYRLQNDYANTLTED

SEQ ID NO: 1745 - protein, 327 aa, Pseudomonas aeruginosa
MSVTDPEALLLLPRLSIQNANAISSPLTWGFPSPGAFTGFVHALQRRVGISLDIELDGVGIVCHRFEAQISQPAGKRTKVFNLTRNPLNRDGSTAAIVEEGRTHLEVSLLLGVHGDGLDDHPAQEIARQVQEQAGAMRLAGGSILPWCNERFPAPNAELLMLGGSDEQRRKNQRRLTRRLLPGFALVSREALLQQHLETLRTTLPEATTLDALLDLCRINFEPPATSSEEEASPPDAAWQVRDKPGWLVPIPAGYNALSPLYLPGEVRNARDRETPLRFVENLFGLGEWLSPHRVATLSDLLWYHHAEPDKGLYRWSTPRFVEHAIA

SEQ ID NO: 1746 - DNA, 13401 bp, Synthetic construct
  source 1..13401: mol_type = other DNA
ccgccgtgggtttcctcgcaataagcccggcccacgcctcatgcgctttgcgttccgtttgcacccagtgaccgggcttgttcttggcttgaatgccgatttctctggactgcgtggccatgcttatctccatgcggtaggggtgccgcacggttgcggcaccatgcgcaatcagctgcaacttttcggcagcgcgacaacaattatgcgttgcgtaaaagtggcagtcaattacagattttctttaacctacgcaatgagctattgcggggggtgccgcaatgagctgttgcgtaccccccttttttaagttgttgatttttaagtctttcgcatttcgccctatatctagttctttggtgcccaaagaagggcacccctgcggggttcccccacgccttcggcgcggctccccctccggcaaaaagtggcccctccggggcttgttgatcgactgcgcggccttcggccttgcccaaggtggcgctgcccccttggaacccccgcactcgccgccgtgaggctcggggggcaggcgggcgggcttcgcccttcgactgcccccactcgcataggcttgggtcgttccaggcgcgtcaaggccaagccgctgcgcggtcgctgcgcgagccttgacccgccttccacttggtgtccaaccggcaagcgaagcgcgcaggccgcaggccggaggcttttccccagagaaaattaaaaaaattgatggggcaaggccgcaggccgcgcagttggagccggtgggtatgtggtcgaaggctgggtagccggtgggcaatccctgtggtcaagctcgtgggcaggcgcagcctgtccatcagcttgtccagcagggttgtccacgggccgagcgaagcgagccagccggtggccgctcgcggccatcgtccacatatccacgggctggcaagggagcgcagcgaccgcgcagggcgaagcccggagagcaagcccgtagggcgccgcagccgccgtaggcggtcacgactttgcgaagcaaagtctagtgagtatactcaagcattgagtggcccgccggaggcaccgccttgcgctgcccccgtcgagccggttggacaccaaaagggaggggcaggcatggcggcatacgcgatcatgcgatgcaagaagctggcgaaaatgggcaacgtggcggccagtctcaagcacgcctaccgcgagcgcgagacgcccaacgctgacgccagcaggacgccagagaacgagcactgggcggccagcagcaccgatgaagcgatgggccgactgcgcgagttgctgccagagaagcggcgcaaggacgctgtgttggcggtcgagtacgtcatgacggccagcccggaatggtggaagtcggccagccaagaacagcaggcggcgttcttcgagaaggcgcacaagtggctggcggacaagtacggggcggatcgcatcgtgacggccagcatccaccgtgacgaaaccagcccgcacatgaccgcgttcgtggtgccgctgacgcaggacggcaggctgtcggccaaggagttcatcggcaacaaagcgcagatgacccgcgaccagaccacgtttgcggccgctgtggccgatctagggctgcaacggggcatcgagggcagcaaggcacgtcacacgcgcattcaggcgttctacgaggccctggagcggccaccagtgggccacgtcaccatcagcccgcaagcggtcgagccacgcgcctatgcaccgcagggattggccgaaaagctgggaatctcaaagcgcgttgagacgccggaagccgtggccgaccggctgacaaaagcggttcggcaggggtatgagcctgccctacaggccgccgcaggagcgcgtgagatgcgcaagaaggccgatcaagcccaagagacggcccgtgaccttcgggagcgcctgaagcccgttctggacgccctggggccgttgaatcgggatatgcaggccaaggccgccgcgatcatcaaggccgtgggcgaaaagctgctgacggaacagcgggaagtccagcgccagaaacaggcccagcgccagcaggaacgcgggcgcgcacatttccccgaaaagtgccacctgggatgaatgtcagctactgggctatctggacaagggaaaacgcaagcgcaaagagaaagcaggtagcttgcagtgggcttacatggcgatagctagactgggcggttttatggacagcaagcgaaccggaattgccagctggggcgccctctggtaaggttgggaagccctgcaaagtaaactggatggctttcttgccgccaaggatctgatggcgcaggggatcaagatctgatcaagagacaggatgaggatcgtttcgcatgattgaacaagatggattgcacgcaggttctccggccgcttgggtggagaggctattcggctatgactgggcacaacagacaatcggctgctctgatgccgccgtgttccggctgtcagcgcaggggcgcccggttctttttgtcaagaccgacctgtccggtgccctgaatgaactgcaagacgaggcagcgcggctatcgtggctggccacgacgggcgttccttgcgcagctgtgctcgacgttgtcactgaagcgggaagggactggctgctattgggcgaagtgccggggcaggatctcctgtcatctcaccttgctcctgccgagaaagtatccatcatggctgatgcaatgcggcggctgcatacgcttgatccggctacctgcccattcgaccaccaagcgaaacatcgcatcgagcgagcacgtactcggatggaagccggtcttgtcgatcaggatgatctggacgaagagcatcaggggctcgcgccagccgaactgttcgccaggctcaaggcgcgcatgcccgacggcgaggatctcgtcgtgacccatggcgatgcctgcttgccgaatatcatggtggaaaatggccgcttttctggattcatcgactgtggccggctgggtgtggcggaccgctatcaggacatagcgttggctacccgtgatattgctgaagagcttggcggcgaatgggctgaccgcttcctcgtgctttacggtatcgccgctcccgattcgcagcgcatcgccttctatcgccttcttgacgagttcttctgagcgggactctggggttcgaaatgaccgaccaagcgacgcccaacctgccatcacgagatttcgattccaccgccgccttctatgaaaggttgggcttcggaatcgttttccgggacgccggctggatgatcctccagcgcggggatctcatgctggagttcttcgcccacccccatgggcaaatattatacgcaaggcgacaaggtgctgatgccgctggcgattcaggttcatcatgccgtttgtgatggcttccatgtcggcagaatgcttaatgaattacaacagtttttatgcatgcgcccaatacgcaaaccgcctctccccgcgcgttggccgattcattaatgcagctggcacgacaggtttcccgactggtggataaccgtattaccgcctttgagtgagctgataccgctcgccgcagccgaactaccgagcgcagcgagtcagtgagcgaagctttgttgatacaaccataaaatgataattacacccataaattgataattatcacacccataaattgatattgcctcttcatggtctaaacttcagtaagtttacgacattttcctcgaaccgtattaccgcctttgagtgagctgataccgctcgccgcagccgaacgaccgagcgcagcgagtcagtgagcgaggacacaagctttgacagctagctcagtcctaggtataatactagcgtcgacgtggagatataccatgggtgaactgccgagtaggtagctgataacgagacctctgtcttgtcagctagggtggtctcgtgaactgccgagtaggtagctgataacggatccgaattcgagcgaaggagatatacatatgtttttgcaaagacctaaaccttacagcgatgaaagtttagaaagtttctttatccgagtggctaacaaaaatggctacggtgatgtccatcgcttcctagaagccactaaacgattccttcaagacattgaccataatggctatcaaacctttccgactgatataactcggataaacccatactcagctaaaaacagttccagcgcacgaactgcgtcattcctgaaacttgcacaattgacatttaatgaaccgccagagctacttgggttggcaattaacagaacaaacatgaaatactcgccgtcaactagcgcggttgttagaggtgcagaagtctttcctcgcagtttactacggacgcactccatcccctgctgtcctttgtgtctgcgagaaaatggctacgcctcctacctttggcactttcaggggtacgaatactgccacagccataacgtacctttaattaccacttgtagctgtggtaaggagtttgactaccgagtatctgggttaaagggcatttgctgcaaatgcaaggagcctatcaccttaaccagcagggagaacggtcatgaggcagcgtgtactgtttcaaactggcttgctggccatgaatctaaacctctgccaaatcttcctaaaagctaccgatggggtttagttcattggtggatgggtattaaagatagcgagttcgatcacttttcgttcgttcaatttttctcaaactggccaaggtcattccactcgataatcgaagatgaagtagagttcaaccttgagcatgctgttgtcagcacgtctgaattacgactaaaagatcttcttggtcgattgtttttcggttcaattcggttacctgagcggaatcttcaacacaatatcatccttggtgagcttctctgctatttagaaaatcgtttatggcaagacaagggattaatcgccaacctcaaaatgaacgcgttagaggcgactgtaatgttaaattgtagcctcgatcagattgcatcaatggttgaacaacgcatcttgaagccaaatcgaaaaagcaagcccaacagccctcttgatgttaccgattatctatttcatttcggcgatattttctgtctttggttagctgagttccaaagcgatgagtttaaccgttcgttttatgtgtcgaggtggtaaatgcaaactctgaaagaactaatcgcatccaatcctgacgacttaacaactgaacttaagagagcatttcgtccactcacaccgcatattgcaattgatggtaatgaacttgacgcactgacgatattagtcaatttaaccgataagactgatgatcagaaagacctgctcgatcgagccaaatgcaagcaaaaacttcgagatgaaaaatggtgggctagctgcataaattgcgttaattacagacaaagccataacccaaaattcccggatatacgttctgaaggcgtgattcgaacccaagccctgggtgaattaccgagtttcctactctcgtcctcaaaaatcccaccataccattggtcatatagccatgattcaaaatacgtcaacaaaagcgcattcctcaccaatgagttttgttgggatggtgagatctcatgtttgggtgagcttcttaaagatgcagatcacccactttggaatactttgaaaaagttaggttgttctcaaaaaacttgcaaagcaatggcaaaacaactagctgatattactctcacgactatcaatgtcacactcgcaccaaattacctgactcaaatatctctccccgatagtgatacatcctacatttcactctctcctgttgcatcgctatcgatgcaaagccactttcatcagaggctccaagatgaaaatcggcatagcgcgataacgcggtttagccgaactaccaacatgggggtcactgcgatgacatgtggcggcgcatttagaatgttaaagtctggcgctaagttttccagcccccctcatcaccgattaaacagtaaacgaagttggttgacgtcagagcatgttcagtcattaaaacagtaccagcgcctcaacaaaagcctcatacctgaaaactctcggattgcactccgtagaaaatacaaaatcgagcttcaaaatatggtcagatcttggtttgcaatgcaagaccatacccttgattcgaacatacttatccaacatttgaatcatgacctatcttacttaggagccacaaaacgttttgcatacgatccagcgatgaccaagctctttactgagcttttgaaacgagagttatcaaattcaatcaataatggtgagcaacacactaatggatcgtttttagtcctaccgaatatcagggtttgtggcgcaacagctttaagctccccggtaacggtggggattccatcacttacagctttctttggcttcgttcacgcatttgaacggaatataaatcgcaccacctcatcgtttcgtgttgaatcctttgcgatatgcgtccatcaactacatgtcgagaagcgaggtttgacagcagagtttgtggaaaaaggcgacgggactatatccgctcccgcgacccgggatgactggcagtgtgatgtcgtatttagccttattttgaacaccaactttgctcaacatattgaccaagatacgttagttacatcactaccaaagcgattggctcggggttcagcaaaaattgcgattgatgactttaaacatatcaactcattctcgacattagaaacagcgatcgaatctctgccaatagaagctggtaggtggttatcactttacgcacagtcaaacaataatctaagtgatctattagcagccatgacagaggaccatcagctcatggcaagctgcgtcggttaccacttgttagaagagcccaaagataaaccaaactccctcagaggttacaaacacgctatcgccgagtgcatcattggactcattaactcaatcacctttagctcagagactgatcccaacacaatcttttggtcgctaaagaactatcaaaactacctagtggtacagccaaggagtatcaacgatgaaactaccgacaaatctagcctatgagcgctctatcgacccatcagatgtctgtttttttgtcgtctggcccgatgatagaaaaacacctttaacctacaattctcgtactctgctcgggcaaatggaagcggcatcattagcctatgatgtctcaggtcaaccaataaaaagtgccaccgctgaggcgttagctcaagggaaccctcatcaagttgatttctgccacgttccatacggtgcgagtcatattgaatgcagtttctccgtctcgttttcttctgaactacgtcaaccatataagtgtaactcaagcaaagttaaacaaacgctagtgcaattagtcgagctctacgaaacgaaaatcggctggactgagctagcaacccgatatttgatgaacatttgcaacggtaaatggctgtggaaaaatacccgtaaagcctattgctggaacattgtacttacaccttggccttggaacggggaaaaggttggatttgaagatattcgtactaactacacctcacggcaagactttaaaaataataaaaattggtctgctatagttgaaatgatcaaaaccgcattttctagtactgatgggctggcgatatttgaagtcagggccaccttgcacttgccaacgaatgctatggtgcggccaagccaagttttcacagaaaaagaaagtggcagtaaaagtaaatctaaaactcaaaacagtcgagtttttcagagtacaactattgatggtgaacgatcgccaatactaggggcctttaaaacgggagcagctattgcaaccattgacgactggtatcctgaagccactgagccactaagggtcggacggtttggggttcatcgcgaagatgtcacttgctaccgtcatccgtctaccggaaaagattttttctcgatattacaacaagcagagcactatattgaagtgttgagcgccaacaaaactcccgctcaagaaactatcaacgacatgcactttttaatggctaacctgattaagggtgggatgttccagcataaaggagactgactgtgaaatggtattataagacaatcacctttctgccagagttgtgcaacaacgagtcactggctgcaaagtgtctccgcgttctgcatggatttaactatcagtatgagacacgaaatatcggcgtttcatttccgctttggtgtgatgcaacggttggaaaaaagatttcatttgtcagcaagaacaagatagaactcgacttactacttaaacaacactatttcgtccaaatggaacaacttcaatactttcatatatccaacactgttctcgtcccagaagattgtacatacgtttcctttagacgctgtcaatctatagataagctcacagcagcagggctggcaaggaaaatcagacgcctggagaaacgtgctctatctagaggcgagcaatttgacccatcatcttttgctcaaaaagagcatactgcaatagcgcactaccactcacttggggagtccagcaaacagacgaaccgcaactttcgactcaatatcaggatgctctcggagcaaccccgtgaggggaactcgatttttagtagctatggcttatcaaattcagaaaactcgtttcagcctgtacccttaatctgacctttaataaggagatataccatggcgacaagtttacctacgccctcagcaattacgacttcggcgttagagtatgcattccatactcccgctcgcaatctaacgaaatctcgcggaaaaaacattcatcgttatgtcagtgtaaagatgagtaagaggattacggtagaatctactctagagtgtgatgcctgctatcactttgattttgagccaagtattgttcgcttttgcgctcaaccgattcgatttttatattatctcaatggtcagtctcactcctatgttcctgactttctagttcaatttgataccaacgagtttgttctatatgaagtaaagtcagcttatgctaagaacaaacctgattttgatgttgaatgggaggcgaaagtaaaagcagcaactgaactagggctagaattggagcttgttgaagagagtgatattagggatacggttgtattaaataatcttaagcgcatgcatcgttatgcttcgaaagatgagctgaataacgtacataactctctcttaaaaataataaagtacaatggcgcccaatctgcaagatgcttgggagaacagttgggtttaaaaggccgaactgttttaccaattttgtgcgatttgctgtcaaggtgtttactcgatacacgtttggataagcctctatctcttgaatctcgatttgagttggccagttatggctaagaaagggttctcaagtttccatagaaaagcagtctcttcccaagatacgcttgaatcgatagagcttgtctctagcgctaattgtctagaaagtgttacgtatcaagatatatcagcatttcccgaaacaattgcggtagagattaatttccgattaagcattcttcgctttttagcgcgaaagtgcgaaaccattgtggccaaatcaattgaaccacatcgtgtagagctacagcaaaactatagtagaaaaatacccagtgcaataacgatatatcgatggtggcttgcttttcgaaaatcagactacaaccccattagcttagcacctaatatcaaggatagaggtaatagagagacaaaagtgtcaacagttgttgattctattatggaacaggcagttgaaagagttatatctggacgaaaagtcaatgttagctctgcatataaacgtgttcgacgaaaagttcgtcaatacaatctaactcatggaacgaaatacacgtatcctaagtacgaatctgtaagaaagcgagtaaaaaagaaaaccccatttgagttattagccgcagggaaaggggagagagtagctaagagagagtttcgccgaatgggaaaaaagatcctcacgtctagcgtgctagagagggttgaaatagatcacactgtcgttgacctttttgcagtacacgaagagtatcgaatcccattgggccgaccttggcttactcaattggttgattgttacagtaaagctgtaatcggtttttatttaggtttcgagcctcctagctatgtgtcggtttcccttgcacttaagaatgcaatacaacgcaaagatgacttaatctcctcgtatgaatcgatcgagaatgaatggctatgttatggcatcccagacctactcgtaactgataatggtaaagagtttttgtcgaaagcatttgatcaagcatgtgaatcactattgatcaatgtgcatcaaaataaagttgagacgcccgacaacaaacctcatgttgaacgtaactacgggactattaatacttctctgttagacgatttacctgggaaatccttcagccagtaccttcaaagagaagggtacgactctgtgggagaagctacccttacactcaatgagattagagaaatttacttaatttggttggtggatatttatcataaaaaacccaatcagagaggcactaattgtcctaatgttgcgtggaaaaagggttgtcaagaatgggaaccagaggagttctctggttctaaagacgaattagactttaaatttgctattgttgattacaaacaacttactaaagtagggataactgtctacaaagaactgagttatagcaatgaccgtttagctgaatatagagggaagaaaggaaaccataaagttcagttcaagtataaccctgagtgtatggcagttatttgggtgttggatgaggatatgaatgagtactttacagttaatgcgattgactacgaatatgcaagtagagtatcactttggcaacataaatataacatgaaatatcaagcagaactaaattcagcagaatatgatgaggacaaggaaattgatgcagaaataaaaattgaagaaatcgcagatcgttcaattgttaagactaacaaaatcagagctcggaggcgtggcgctaggcatcaagagaatagcgcaagggctaagtcaatcagtaatgcgaacccggcctcgatacaaaaacatgaagatgaaatcgttagtgcagataatgacgattgggatattgattatgtctgagaaatcgtcaaatgagtgaaacgcgtgaggctcgtatatcaagagctaaaagggcatttgtatccacaccgagcgttaggaaaatcttgagttacatggatagatgtagagatctatcagacctagagtctgagcctacatgcatgatggtctatggtgcttcgggtgtaggtaaaacgaccgtcatcaagaaatacttaaatcaaaacagaagagagtccgaagccgggggcgatataataccggttttgcatattgagttgccagacaatgcgaagccagtagatgcagcaagggaattgctggttgaaatgggtgacccgctagcactttatgaaactgacttagctagattgacgaaaagactgactgaattaatccctgcggtcggcgtgaagctgattattatcgatgagttccaacatttggtggaagaaaggtcaaatcgggttcttacccaagtaggtaattggctaaaaatgatacttaacaaaacgaaatgtccaattgttatatttggtatgccatactcaaaagttgtactgcaagcaaactcgcaacttcacgggcgattttccattcaggttgaactgcgcccctttagctaccagggaggtagaggtgtatttaaaacttttttggaataccttgataaagccctaccttttgaaaaacaggctggcttagccaacgaaagtttgcagaaaaaattgtatgcattctctcagggaaacatgcgttcgttgagaaaccttatttatcaagcatctatcgaagcaattgataatcagcatgagacgataaccgaagaagatttcgtttttgcatcgaagttgacatcgggcgataaacccaactcatggaaaaatccttttgaggagggtgttgaggtaacagaagatatgttacgaccgccaccaaaagatattggttgggaggactatttgagacattcaaccccgagagtgagtaaaccaggtagaaataaaaactttttcgaataacctaggctgctgcgctgctgccaccgctgagcaataactagcataaccccttggggcctctaaacgggtcttgaggggttttttgctgaaacctcaggcatttgagtccttactgcagtagttttgctgaaatactcgattcacaaaaatatcaacttatggttgttttgtgagatatcaatatatggttgttttgtggttaagttgctgattataaataattattaaatatcactttatggttgcatcaacaggtaccgagctcgaattcactggccgtcgttttacaacgtcgtgactgggaaaaccctggcgttacccaacttaatcgccttgcggccagtttgctcaggctctccccgtggaggtaataattgacgatatgatcatttattctgcctcccagagcctgataaaaacggtgaatccgttagcgaggtgccgccggcttccattcaggtcgaggtggcccggctccatgcaccgcgacgcaacgcggggaggcagacaaggtatagggcggcgaggcggctacagccgatagtctggaacagcgcacttacgggttgctgcgcaacccaagtgctaccggcgcggcagcgtgacccgtgtcggcggctccaacggctcgccatcgtccagaaaacacggctcatcgggcatcggcaggcgctgctgcccgcgccgttcccattcctccgtttcggtcaaggctggcaggtctggttccatgcccggaatgccgggctggctgggcggctcctcgccggggccggtcggtagttgctgctcgcccggatacagggtcgggatgcggcgcaggtcgccatgccccaacagcgattcgtcctggtcgtcgtgatcaaccaccacggcggcactgaacaccgacaggcgcaactggtcgcggggctggccccacgccacgcggtcattgaccacgtaggccgacacggtgccggggccgttgagcttcacgacggagatccagcgctcggccaccaagtccttgactgcgtattggaccgtccgcaaagaacgtccgatgagcttggaaagtgtcttctggctgaccaccacggcgttctggtggcccatctgcgccacgaggtgatgcagcagcattg

SEQ ID NO: 1747 - DNA, 13381 bp, Synthetic construct
  source 1..13381: mol_type = other DNA
ccgccgtgggtttcctcgcaataagcccggcccacgcctcatgcgctttgcgttccgtttgcacccagtgaccgggcttgttcttggcttgaatgccgatttctctggactgcgtggccatgcttatctccatgcggtaggggtgccgcacggttgcggcaccatgcgcaatcagctgcaacttttcggcagcgcgacaacaattatgcgttgcgtaaaagtggcagtcaattacagattttctttaacctacgcaatgagctattgcggggggtgccgcaatgagctgttgcgtaccccccttttttaagttgttgatttttaagtctttcgcatttcgccctatatctagttctttggtgcccaaagaagggcacccctgcggggttcccccacgccttcggcgcggctccccctccggcaaaaagtggcccctccggggcttgttgatcgactgcgcggccttcggccttgcccaaggtggcgctgcccccttggaacccccgcactcgccgccgtgaggctcggggggcaggcgggcgggcttcgcccttcgactgcccccactcgcataggcttgggtcgttccaggcgcgtcaaggccaagccgctgcgcggtcgctgcgcgagccttgacccgccttccacttggtgtccaaccggcaagcgaagcgcgcaggccgcaggccggaggcttttccccagagaaaattaaaaaaattgatggggcaaggccgcaggccgcgcagttggagccggtgggtatgtggtcgaaggctgggtagccggtgggcaatccctgtggtcaagctcgtgggcaggcgcagcctgtccatcagcttgtccagcagggttgtccacgggccgagcgaagcgagccagccggtggccgctcgcggccatcgtccacatatccacgggctggcaagggagcgcagcgaccgcgcagggcgaagcccggagagcaagcccgtagggcgccgcagccgccgtaggcggtcacgactttgcgaagcaaagtctagtgagtatactcaagcattgagtggcccgccggaggcaccgccttgcgctgcccccgtcgagccggttggacaccaaaagggaggggcaggcatggcggcatacgcgatcatgcgatgcaagaagctggcgaaaatgggcaacgtggcggccagtctcaagcacgcctaccgcgagcgcgagacgcccaacgctgacgccagcaggacgccagagaacgagcactgggcggccagcagcaccgatgaagcgatgggccgactgcgcgagttgctgccagagaagcggcgcaaggacgctgtgttggcggtcgagtacgtcatgacggccagcccggaatggtggaagtcggccagccaagaacagcaggcggcgttcttcgagaaggcgcacaagtggctggcggacaagtacggggcggatcgcatcgtgacggccagcatccaccgtgacgaaaccagcccgcacatgaccgcgttcgtggtgccgctgacgcaggacggcaggctgtcggccaaggagttcatcggcaacaaagcgcagatgacccgcgaccagaccacgtttgcggccgctgtggccgatctagggctgcaacggggcatcgagggcagcaaggcacgtcacacgcgcattcaggcgttctacgaggccctggagcggccaccagtgggccacgtcaccatcagcccgcaagcggtcgagccacgcgcctatgcaccgcagggattggccgaaaagctgggaatctcaaagcgcgttgagacgccggaagccgtggccgaccggctgacaaaagcggttcggcaggggtatgagcctgccctacaggccgccgcaggagcgcgtgagatgcgcaagaaggccgatcaagcccaagagacggcccgtgaccttcgggagcgcctgaagcccgttctggacgccctggggccgttgaatcgggatatgcaggccaaggccgccgcgatcatcaaggccgtgggcgaaaagctgctgacggaacagcgggaagtccagcgccagaaacaggcccagcgccagcaggaacgcgggcgcgcacatttccccgaaaagtgccacctgggatgaatgtcagctactgggctatctggacaagggaaaacgcaagcgcaaagagaaagcaggtagcttgcagtgggcttacatggcgatagctagactgggcggttttatggacagcaagcgaaccggaattgccagctggggcgccctctggtaaggttgggaagccctgcaaagtaaactggatggctttcttgccgccaaggatctgatggcgcaggggatcaagatctgatcaagagacaggatgaggatcgtttcgcatgattgaacaagatggattgcacgcaggttctccggccgcttgggtggagaggctattcggctatgactgggcacaacagacaatcggctgctctgatgccgccgtgttccggctgtcagcgcaggggcgcccggttctttttgtcaagaccgacctgtccggtgccctgaatgaactgcaagacgaggcagcgcggctatcgtggctggccacgacgggcgttccttgcgcagctgtgctcgacgttgtcactgaagcgggaagggactggctgctattgggcgaagtgccggggcaggatctcctgtcatctcaccttgctcctgccgagaaagtatccatcatggctgatgcaatgcggcggctgcatacgcttgatccggctacctgcccattcgaccaccaagcgaaacatcgcatcgagcgagcacgtactcggatggaagccggtcttgtcgatcaggatgatctggacgaagagcatcaggggctcgcgccagccgaactgttcgccaggctcaaggcgcgcatgcccgacggcgaggatctcgtcgtgacccatggcgatgcctgcttgccgaatatcatggtggaaaatggccgcttttctggattcatcgactgtggccggctgggtgtggcggaccgctatcaggacatagcgttggctacccgtgatattgctgaagagcttggcggcgaatgggctgaccgcttcctcgtgctttacggtatcgccgctcccgattcgcagcgcatcgccttctatcgccttcttgacgagttcttctgagcgggactctggggttcgaaatgaccgaccaagcgacgcccaacctgccatcacgagatttcgattccaccgccgccttctatgaaaggttgggcttcggaatcgttttccgggacgccggctggatgatcctccagcgcggggatctcatgctggagttcttcgcccacccccatgggcaaatattatacgcaaggcgacaaggtgctgatgccgctggcgattcaggttcatcatgccgtttgtgatggcttccatgtcggcagaatgcttaatgaattacaacagtttttatgcatgcgcccaatacgcaaaccgcctctccccgcgcgttggccgattcattaatgcagctggcacgacaggtttcccgactggtggataaccgtattaccgcctttgagtgagctgataccgctcgccgcagccgaactaccgagcgcagcgagtcagtgagcgaagctttgttgatacaaccataaaatgataattacacccataaattgataattatcacacccataaattgatattgcctcttcatggtctaaacttcagtaagtttacgacattttcctcgaggtcatttccggggcgactcctgcattaggaaattaatacgactcactataggggaattgtgagcggataacaattcccctgtagaaataattttgtttaactttaataaggagatataccatgggtgaactgccgagtaggtagctgataacagtacagcgcggctgaaatcatcattaaagcggtgaactgccgagtaggtagctgataacggatccgaattcgagcgaaggagatatacatatgtttttgcaaagacctaaaccttacagcgatgaaagtttagaaagtttctttatccgagtggctaacaaaaatggctacggtgatgtccatcgcttcctagaagccactaaacgattccttcaagacattgaccataatggctatcaaacctttccgactgatataactcggataaacccatactcagctaaaaacagttccagcgcacgaactgcgtcattcctgaaacttgcacaattgacatttaatgaaccgccagagctacttgggttggcaattaacagaacaaacatgaaatactcgccgtcaactagcgcggttgttagaggtgcagaagtctttcctcgcagtttactacggacgcactccatcccctgctgtcctttgtgtctgcgagaaaatggctacgcctcctacctttggcactttcaggggtacgaatactgccacagccataacgtacctttaattaccacttgtagctgtggtaaggagtttgactaccgagtatctgggttaaagggcatttgctgcaaatgcaaggagcctatcaccttaaccagcagggagaacggtcatgaggcagcgtgtactgtttcaaactggcttgctggccatgaatctaaacctctgccaaatcttcctaaaagctaccgatggggtttagttcattggtggatgggtattaaagatagcgagttcgatcacttttcgttcgttcaatttttctcaaactggccaaggtcattccactcgataatcgaagatgaagtagagttcaaccttgagcatgctgttgtcagcacgtctgaattacgactaaaagatcttcttggtcgattgtttttcggttcaattcggttacctgagcggaatcttcaacacaatatcatccttggtgagcttctctgctatttagaaaatcgtttatggcaagacaagggattaatcgccaacctcaaaatgaacgcgttagaggcgactgtaatgttaaattgtagcctcgatcagattgcatcaatggttgaacaacgcatcttgaagccaaatcgaaaaagcaagcccaacagccctcttgatgttaccgattatctatttcatttcggcgatattttctgtctttggttagctgagttccaaagcgatgagtttaaccgttcgttttatgtgtcgaggtggtaaatgcaaactctgaaagaactaatcgcatccaatcctgacgacttaacaactgaacttaagagagcatttcgtccactcacaccgcatattgcaattgatggtaatgaacttgacgcactgacgatattagtcaatttaaccgataagactgatgatcagaaagacctgctcgatcgagccaaatgcaagcaaaaacttcgagatgaaaaatggtgggctagctgcataaattgcgttaattacagacaaagccataacccaaaattcccggatatacgttctgaaggcgtgattcgaacccaagccctgggtgaattaccgagtttcctactctcgtcctcaaaaatcccaccataccattggtcatatagccatgattcaaaatacgtcaacaaaagcgcattcctcaccaatgagttttgttgggatggtgagatctcatgtttgggtgagcttcttaaagatgcagatcacccactttggaatactttgaaaaagttaggttgttctcaaaaaacttgcaaagcaatggcaaaacaactagctgatattactctcacgactatcaatgtcacactcgcaccaaattacctgactcaaatatctctccccgatagtgatacatcctacatttcactctctcctgttgcatcgctatcgatgcaaagccactttcatcagaggctccaagatgaaaatcggcatagcgcgataacgcggtttagccgaactaccaacatgggggtcactgcgatgacatgtggcggcgcatttagaatgttaaagtctggcgctaagttttccagcccccctcatcaccgattaaacagtaaacgaagttggttgacgtcagagcatgttcagtcattaaaacagtaccagcgcctcaacaaaagcctcatacctgaaaactctcggattgcactccgtagaaaatacaaaatcgagcttcaaaatatggtcagatcttggtttgcaatgcaagaccatacccttgattcgaacatacttatccaacatttgaatcatgacctatcttacttaggagccacaaaacgttttgcatacgatccagcgatgaccaagctctttactgagcttttgaaacgagagttatcaaattcaatcaataatggtgagcaacacactaatggatcgtttttagtcctaccgaatatcagggtttgtggcgcaacagctttaagctccccggtaacggtggggattccatcacttacagctttctttggcttcgttcacgcatttgaacggaatataaatcgcaccacctcatcgtttcgtgttgaatcctttgcgatatgcgtccatcaactacatgtcgagaagcgaggtttgacagcagagtttgtggaaaaaggcgacgggactatatccgctcccgcgacccgggatgactggcagtgtgatgtcgtatttagccttattttgaacaccaactttgctcaacatattgaccaagatacgttagttacatcactaccaaagcgattggctcggggttcagcaaaaattgcgattgatgactttaaacatatcaactcattctcgacattagaaacagcgatcgaatctctgccaatagaagctggtaggtggttatcactttacgcacagtcaaacaataatctaagtgatctattagcagccatgacagaggaccatcagctcatggcaagctgcgtcggttaccacttgttagaagagcccaaagataaaccaaactccctcagaggttacaaacacgctatcgccgagtgcatcattggactcattaactcaatcacctttagctcagagactgatcccaacacaatcttttggtcgctaaagaactatcaaaactacctagtggtacagccaaggagtatcaacgatgaaactaccgacaaatctagcctatgagcgctctatcgacccatcagatgtctgtttttttgtcgtctggcccgatgatagaaaaacacctttaacctacaattctcgtactctgctcgggcaaatggaagcggcatcattagcctatgatgtctcaggtcaaccaataaaaagtgccaccgctgaggcgttagctcaagggaaccctcatcaagttgatttctgccacgttccatacggtgcgagtcatattgaatgcagtttctccgtctcgttttcttctgaactacgtcaaccatataagtgtaactcaagcaaagttaaacaaacgctagtgcaattagtcgagctctacgaaacgaaaatcggctggactgagctagcaacccgatatttgatgaacatttgcaacggtaaatggctgtggaaaaatacccgtaaagcctattgctggaacattgtacttacaccttggccttggaacggggaaaaggttggatttgaagatattcgtactaactacacctcacggcaagactttaaaaataataaaaattggtctgctatagttgaaatgatcaaaaccgcattttctagtactgatgggctggcgatatttgaagtcagggccaccttgcacttgccaacgaatgctatggtgcggccaagccaagttttcacagaaaaagaaagtggcagtaaaagtaaatctaaaactcaaaacagtcgagtttttcagagtacaactattgatggtgaacgatcgccaatactaggggcctttaaaacgggagcagctattgcaaccattgacgactggtatcctgaagccactgagccactaagggtcggacggtttggggttcatcgcgaagatgtcacttgctaccgtcatccgtctaccggaaaagattttttctcgatattacaacaagcagagcactatattgaagtgttgagcgccaacaaaactcccgctcaagaaactatcaacgacatgcactttttaatggctaacctgattaagggtgggatgttccagcataaaggagactgactgtgaaatggtattataagacaatcacctttctgccagagttgtgcaacaacgagtcactggctgcaaagtgtctccgcgttctgcatggatttaactatcagtatgagacacgaaatatcggcgtttcatttccgctttggtgtgatgcaacggttggaaaaaagatttcatttgtcagcaagaacaagatagaactcgacttactacttaaacaacactatttcgtccaaatggaacaacttcaatactttcatatatccaacactgttctcgtcccagaagattgtacatacgtttcctttagacgctgtcaatctatagataagctcacagcagcagggctggcaaggaaaatcagacgcctggagaaacgtgctctatctagaggcgagcaatttgacccatcatcttttgctcaaaaagagcatactgcaatagcgcactaccactcacttggggagtccagcaaacagacgaaccgcaactttcgactcaatatcaggatgctctcggagcaaccccgtgaggggaactcgatttttagtagctatggcttatcaaattcagaaaactcgtttcagcctgtacccttaatctgacctttaataaggagatataccatggcgacaagtttacctacgccctcagcaattacgacttcggcgttagagtatgcattccatactcccgctcgcaatctaacgaaatctcgcggaaaaaacattcatcgttatgtcagtgtaaagatgagtaagaggattacggtagaatctactctagagtgtgatgcctgctatcactttgattttgagccaagtattgttcgcttttgcgctcaaccgattcgatttttatattatctcaatggtcagtctcactcctatgttcctgactttctagttcaatttgataccaacgagtttgttctatatgaagtaaagtcagcttatgctaagaacaaacctgattttgatgttgaatgggaggcgaaagtaaaagcagcaactgaactagggctagaattggagcttgttgaagagagtgatattagggatacggttgtattaaataatcttaagcgcatgcatcgttatgcttcgaaagatgagctgaataacgtacataactctctcttaaaaataataaagtacaatggcgcccaatctgcaagatgcttgggagaacagttgggtttaaaaggccgaactgttttaccaattttgtgcgatttgctgtcaaggtgtttactcgatacacgtttggataagcctctatctcttgaatctcgatttgagttggccagttatggctaagaaagggttctcaagtttccatagaaaagcagtctcttcccaagatacgcttgaatcgatagagcttgtctctagcgctaattgtctagaaagtgttacgtatcaagatatatcagcatttcccgaaacaattgcggtagagattaatttccgattaagcattcttcgctttttagcgcgaaagtgcgaaaccattgtggccaaatcaattgaaccacatcgtgtagagctacagcaaaactatagtagaaaaatacccagtgcaataacgatatatcgatggtggcttgcttttcgaaaatcagactacaaccccattagcttagcacctaatatcaaggatagaggtaatagagagacaaaagtgtcaacagttgttgattctattatggaacaggcagttgaaagagttatatctggacgaaaagtcaatgttagctctgcatataaacgtgttcgacgaaaagttcgtcaatacaatctaactcatggaacgaaatacacgtatcctaagtacgaatctgtaagaaagcgagtaaaaaagaaaaccccatttgagttattagccgcagggaaaggggagagagtagctaagagagagtttcgccgaatgggaaaaaagatcctcacgtctagcgtgctagagagggttgaaatagatcacactgtcgttgacctttttgcagtacacgaagagtatcgaatcccattgggccgaccttggcttactcaattggttgattgttacagtaaagctgtaatcggtttttatttaggtttcgagcctcctagctatgtgtcggtttcccttgcacttaagaatgcaatacaacgcaaagatgacttaatctcctcgtatgaatcgatcgagaatgaatggctatgttatggcatcccagacctactcgtaactgataatggtaaagagtttttgtcgaaagcatttgatcaagcatgtgaatcactattgatcaatgtgcatcaaaataaagttgagacgcccgacaacaaacctcatgttgaacgtaactacgggactattaatacttctctgttagacgatttacctgggaaatccttcagccagtaccttcaaagagaagggtacgactctgtgggagaagctacccttacactcaatgagattagagaaatttacttaatttggttggtggatatttatcataaaaaacccaatcagagaggcactaattgtcctaatgttgcgtggaaaaagggttgtcaagaatgggaaccagaggagttctctggttctaaagacgaattagactttaaatttgctattgttgattacaaacaacttactaaagtagggataactgtctacaaagaactgagttatagcaatgaccgtttagctgaatatagagggaagaaaggaaaccataaagttcagttcaagtataaccctgagtgtatggcagttatttgggtgttggatgaggatatgaatgagtactttacagttaatgcgattgactacgaatatgcaagtagagtatcactttggcaacataaatataacatgaaatatcaagcagaactaaattcagcagaatatgatgaggacaaggaaattgatgcagaaataaaaattgaagaaatcgcagatcgttcaattgttaagactaacaaaatcagagctcggaggcgtggcgctaggcatcaagagaatagcgcaagggctaagtcaatcagtaatgcgaacccggcctcgatacaaaaacatgaagatgaaatcgttagtgcagataatgacgattgggatattgattatgtctgagaaatcgtcaaatgagtgaaacgcgtgaggctcgtatatcaagagctaaaagggcatttgtatccacaccgagcgttaggaaaatcttgagttacatggatagatgtagagatctatcagacctagagtctgagcctacatgcatgatggtctatggtgcttcgggtgtaggtaaaacgaccgtcatcaagaaatacttaaatcaaaacagaagagagtccgaagccgggggcgatataataccggttttgcatattgagttgccagacaatgcgaagccagtagatgcagcaagggaattgctggttgaaatgggtgacccgctagcactttatgaaactgacttagctagattgacgaaaagactgactgaattaatccctgcggtcggcgtgaagctgattattatcgatgagttccaacatttggtggaagaaaggtcaaatcgggttcttacccaagtaggtaattggctaaaaatgatacttaacaaaacgaaatgtccaattgttatatttggtatgccatactcaaaagttgtactgcaagcaaactcgcaacttcacgggcgattttccattcaggttgaactgcgcccctttagctaccagggaggtagaggtgtatttaaaacttttttggaataccttgataaagccctaccttttgaaaaacaggctggcttagccaacgaaagtttgcagaaaaaattgtatgcattctctcagggaaacatgcgttcgttgagaaaccttatttatcaagcatctatcgaagcaattgataatcagcatgagacgataaccgaagaagatttcgtttttgcatcgaagttgacatcgggcgataaacccaactcatggaaaaatccttttgaggagggtgttgaggtaacagaagatatgttacgaccgccaccaaaagatattggttgggaggactatttgagacattcaaccccgagagtgagtaaaccaggtagaaataaaaactttttcgaataacctaggctgctgcgctgctgccaccgctgagcaataactagcataaccccttggggcctctaaacgggtcttgaggggttttttgctgaaacctcaggcatttgagtccttactgcagtagttttgctgaaatactcgattcacaaaaatatcaacttatggttgttttgtgagatatcaatatatggttgttttgtggttaagttgctgattataaataattattaaatatcactttatggttgcatcaacaggtaccgagctcgaattcactggccgtcgttttacaacgtcgtgactgggaaaaccctggcgttacccaacttaatcgccttgcggccagtttgctcaggctctccccgtggaggtaataattgacgatatgatcatttattctgcctcccagagcctgataaaaacggtgaatccgttagcgaggtgccgccggcttccattcaggtcgaggtggcccggctccatgcaccgcgacgcaacgcggggaggcagacaaggtatagggcggcgaggcggctacagccgatagtctggaacagcgcacttacgggttgctgcgcaacccaagtgctaccggcgcggcagcgtgacccgtgtcggcggctccaacggctcgccatcgtccagaaaacacggctcatcgggcatcggcaggcgctgctgcccgcgccgttcccattcctccgtttcggtcaaggctggcaggtctggttccatgcccggaatgccgggctggctgggcggctcctcgccggggccggtcggtagttgctgctcgcccggatacagggtcgggatgcggcgcaggtcgccatgccccaacagcgattcgtcctggtcgtcgtgatcaaccaccacggcggcactgaacaccgacaggcgcaactggtcgcggggctggccccacgccacgcggtcattgaccacgtaggccgacacggtgccggggccgttgagcttcacgacggagatccagcgctcggccaccaagtccttgactgcgtattggaccgtccgcaaagaacgtccgatgagcttggaaagtgtcttctggctgaccaccacggcgttctggtggcccatctgcgccacgaggtgatgcagcagcattg

SEQ ID NO: 1748 - DNA, 12828 bp, Synthetic construct
  source 1..12828: mol_type = other DNA
aacgtggctggcctggttcaccacgcgggaaacggtctgataagagacaccggcatactctgcgacatcgtataacgttactggtttcacattcaccaccctgaattgactctcttccgggcgctatcatgccataccgcgaaaggttttgcgccattcgatggtgtccgggatctcgacgctctcccttatgcgactcctgcattaggaatggataaccgtattaccgcctttgagtgagctgataccgctcgccgcagccgaacgaccgagcgcagcgagtcagtgagcgaggacacaagctttgacagctagctcagtcctaggtataatactagcgtcgacgtggagatataccatgggtgaactgccgagtaggtagctgataacagtacagcgcggctgaaatcatcattaaagcggtgaactgccgagtaggtagctgataacggatccgaattcgagcgaaggagatatacatatgtttttgcaaagacctaaaccttacagcgatgaaagtttagaaagtttctttatccgagtggctaacaaaaatggctacggtgatgtccatcgcttcctagaagccactaaacgattccttcaagacattgaccataatggctatcaaacctttccgactgatataactcggataaacccatactcagctaaaaacagttccagcgcacgaactgcgtcattcctgaaacttgcacaattgacatttaatgaaccgccagagctacttgggttggcaattaacagaacaaacatgaaatactcgccgtcaactagcgcggttgttagaggtgcagaagtctttcctcgcagtttactacggacgcactccatcccctgctgtcctttgtgtctgcgagaaaatggctacgcctcctacctttggcactttcaggggtacgaatactgccacagccataacgtacctttaattaccacttgtagctgtggtaaggagtttgactaccgagtatctgggttaaagggcatttgctgcaaatgcaaggagcctatcaccttaaccagcagggagaacggtcatgaggcagcgtgtactgtttcaaactggcttgctggccatgaatctaaacctctgccaaatcttcctaaaagctaccgatggggtttagttcattggtggatgggtattaaagatagcgagttcgatcacttttcgttcgttcaatttttctcaaactggccaaggtcattccactcgataatcgaagatgaagtagagttcaaccttgagcatgctgttgtcagcacgtctgaattacgactaaaagatcttcttggtcgattgtttttcggttcaattcggttacctgagcggaatcttcaacacaatatcatccttggtgagcttctctgctatttagaaaatcgtttatggcaagacaagggattaatcgccaacctcaaaatgaacgcgttagaggcgactgtaatgttaaattgtagcctcgatcagattgcatcaatggttgaacaacgcatcttgaagccaaatcgaaaaagcaagcccaacagccctcttgatgttaccgattatctatttcatttcggcgatattttctgtctttggttagctgagttccaaagcgatgagtttaaccgttcgttttatgtgtcgaggtggtaaatgcaaactctgaaagaactaatcgcatccaatcctgacgacttaacaactgaacttaagagagcatttcgtccactcacaccgcatattgcaattgatggtaatgaacttgacgcactgacgatattagtcaatttaaccgataagactgatgatcagaaagacctgctcgatcgagccaaatgcaagcaaaaacttcgagatgaaaaatggtgggctagctgcataaattgcgttaattacagacaaagccataacccaaaattcccggatatacgttctgaaggcgtgattcgaacccaagccctgggtgaattaccgagtttcctactctcgtcctcaaaaatcccaccataccattggtcatatagccatgattcaaaatacgtcaacaaaagcgcattcctcaccaatgagttttgttgggatggtgagatctcatgtttgggtgagcttcttaaagatgcagatcacccactttggaatactttgaaaaagttaggttgttctcaaaaaacttgcaaagcaatggcaaaacaactagctgatattactctcacgactatcaatgtcacactcgcaccaaattacctgactcaaatatctctccccgatagtgatacatcctacatttcactctctcctgttgcatcgctatcgatgcaaagccactttcatcagaggctccaagatgaaaatcggcatagcgcgataacgcggtttagccgaactaccaacatgggggtcactgcgatgacatgtggcggcgcatttagaatgttaaagtctggcgctaagttttccagcccccctcatcaccgattaaacagtaaacgaagttggttgacgtcagagcatgttcagtcattaaaacagtaccagcgcctcaacaaaagcctcatacctgaaaactctcggattgcactccgtagaaaatacaaaatcgagcttcaaaatatggtcagatcttggtttgcaatgcaagaccatacccttgattcgaacatacttatccaacatttgaatcatgacctatcttacttaggagccacaaaacgttttgcatacgatccagcgatgaccaagctctttactgagcttttgaaacgagagttatcaaattcaatcaataatggtgagcaacacactaatggatcgtttttagtcctaccgaatatcagggtttgtggcgcaacagctttaagctccccggtaacggtggggattccatcacttacagctttctttggcttcgttcacgcatttgaacggaatataaatcgcaccacctcatcgtttcgtgttgaatcctttgcgatatgcgtccatcaactacatgtcgagaagcgaggtttgacagcagagtttgtggaaaaaggcgacgggactatatccgctcccgcgacccgggatgactggcagtgtgatgtcgtatttagccttattttgaacaccaactttgctcaacatattgaccaagatacgttagttacatcactaccaaagcgattggctcggggttcagcaaaaattgcgattgatgactttaaacatatcaactcattctcgacattagaaacagcgatcgaatctctgccaatagaagctggtaggtggttatcactttacgcacagtcaaacaataatctaagtgatctattagcagccatgacagaggaccatcagctcatggcaagctgcgtcggttaccacttgttagaagagcccaaagataaaccaaactccctcagaggttacaaacacgctatcgccgagtgcatcattggactcattaactcaatcacctttagctcagagactgatcccaacacaatcttttggtcgctaaagaactatcaaaactacctagtggtacagccaaggagtatcaacgatgaaactaccgacaaatctagcctatgagcgctctatcgacccatcagatgtctgtttttttgtcgtctggcccgatgatagaaaaacacctttaacctacaattctcgtactctgctcgggcaaatggaagcggcatcattagcctatgatgtctcaggtcaaccaataaaaagtgccaccgctgaggcgttagctcaagggaaccctcatcaagttgatttctgccacgttccatacggtgcgagtcatattgaatgcagtttctccgtctcgttttcttctgaactacgtcaaccatataagtgtaactcaagcaaagttaaacaaacgctagtgcaattagtcgagctctacgaaacgaaaatcggctggactgagctagcaacccgatatttgatgaacatttgcaacggtaaatggctgtggaaaaatacccgtaaagcctattgctggaacattgtacttacaccttggccttggaacggggaaaaggttggatttgaagatattcgtactaactacacctcacggcaagactttaaaaataataaaaattggtctgctatagttgaaatgatcaaaaccgcattttctagtactgatgggctggcgatatttgaagtcagggccaccttgcacttgccaacgaatgctatggtgcggccaagccaagttttcacagaaaaagaaagtggcagtaaaagtaaatctaaaactcaaaacagtcgagtttttcagagtacaactattgatggtgaacgatcgccaatactaggggcctttaaaacgggagcagctattgcaaccattgacgactggtatcctgaagccactgagccactaagggtcggacggtttggggttcatcgcgaagatgtcacttgctaccgtcatccgtctaccggaaaagattttttctcgatattacaacaagcagagcactatattgaagtgttgagcgccaacaaaactcccgctcaagaaactatcaacgacatgcactttttaatggctaacctgattaagggtgggatgttccagcataaaggagactgactgtgaaatggtattataagacaatcacctttctgccagagttgtgcaacaacgagtcactggctgcaaagtgtctccgcgttctgcatggatttaactatcagtatgagacacgaaatatcggcgtttcatttccgctttggtgtgatgcaacggttggaaaaaagatttcatttgtcagcaagaacaagatagaactcgacttactacttaaacaacactatttcgtccaaatggaacaacttcaatactttcatatatccaacactgttctcgtcccagaagattgtacatacgtttcctttagacgctgtcaatctatagataagctcacagcagcagggctggcaaggaaaatcagacgcctggagaaacgtgctctatctagaggcgagcaatttgacccatcatcttttgctcaaaaagagcatactgcaatagcgcactaccactcacttggggagtccagcaaacagacgaaccgcaactttcgactcaatatcaggatgctctcggagcaaccccgtgaggggaactcgatttttagtagctatggcttatcaaattcagaaaactcgtttcagcctgtacccttaatctgacctttaataaggagatataccatggcgacaagtttacctacgccctcagcaattacgacttcggcgttagagtatgcattccatactcccgctcgcaatctaacgaaatctcgcggaaaaaacattcatcgttatgtcagtgtaaagatgagtaagaggattacggtagaatctactctagagtgtgatgcctgctatcactttgattttgagccaagtattgttcgcttttgcgctcaaccgattcgatttttatattatctcaatggtcagtctcactcctatgttcctgactttctagttcaatttgataccaacgagtttgttctatatgaagtaaagtcagcttatgctaagaacaaacctgattttgatgttgaatgggaggcgaaagtaaaagcagcaactgaactagggctagaattggagcttgttgaagagagtgatattagggatacggttgtattaaataatcttaagcgcatgcatcgttatgcttcgaaagatgagctgaataacgtacataactctctcttaaaaataataaagtacaatggcgcccaatctgcaagatgcttgggagaacagttgggtttaaaaggccgaactgttttaccaattttgtgcgatttgctgtcaaggtgtttactcgatacacgtttggataagcctctatctcttgaatctcgatttgagttggccagttatggctaagaaagggttctcaagtttccatagaaaagcagtctcttcccaagatacgcttgaatcgatagagcttgtctctagcgctaattgtctagaaagtgttacgtatcaagatatatcagcatttcccgaaacaattgcggtagagattaatttccgattaagcattcttcgctttttagcgcgaaagtgcgaaaccattgtggccaaatcaattgaaccacatcgtgtagagctacagcaaaactatagtagaaaaatacccagtgcaataacgatatatcgatggtggcttgcttttcgaaaatcagactacaaccccattagcttagcacctaatatcaaggatagaggtaatagagagacaaaagtgtcaacagttgttgattctattatggaacaggcagttgaaagagttatatctggacgaaaagtcaatgttagctctgcatataaacgtgttcgacgaaaagttcgtcaatacaatctaactcatggaacgaaatacacgtatcctaagtacgaatctgtaagaaagcgagtaaaaaagaaaaccccatttgagttattagccgcagggaaaggggagagagtagctaagagagagtttcgccgaatgggaaaaaagatcctcacgtctagcgtgctagagagggttgaaatagatcacactgtcgttgacctttttgcagtacacgaagagtatcgaatcccattgggccgaccttggcttactcaattggttgattgttacagtaaagctgtaatcggtttttatttaggtttcgagcctcctagctatgtgtcggtttcccttgcacttaagaatgcaatacaacgcaaagatgacttaatctcctcgtatgaatcgatcgagaatgaatggctatgttatggcatcccagacctactcgtaactgataatggtaaagagtttttgtcgaaagcatttgatcaagcatgtgaatcactattgatcaatgtgcatcaaaataaagttgagacgcccgacaacaaacctcatgttgaacgtaactacgggactattaatacttctctgttagacgatttacctgggaaatccttcagccagtaccttcaaagagaagggtacgactctgtgggagaagctacccttacactcaatgagattagagaaatttacttaatttggttggtggatatttatcataaaaaacccaatcagagaggcactaattgtcctaatgttgcgtggaaaaagggttgtcaagaatgggaaccagaggagttctctggttctaaagacgaattagactttaaatttgctattgttgattacaaacaacttactaaagtagggataactgtctacaaagaactgagttatagcaatgaccgtttagctgaatatagagggaagaaaggaaaccataaagttcagttcaagtataaccctgagtgtatggcagttatttgggtgttggatgaggatatgaatgagtactttacagttaatgcgattgactacgaatatgcaagtagagtatcactttggcaacataaatataacatgaaatatcaagcagaactaaattcagcagaatatgatgaggacaaggaaattgatgcagaaataaaaattgaagaaatcgcagatcgttcaattgttaagactaacaaaatcagagctcggaggcgtggcgctaggcatcaagagaatagcgcaagggctaagtcaatcagtaatgcgaacccggcctcgatacaaaaacatgaagatgaaatcgttagtgcagataatgacgattgggatattgattatgtctgagaaatcgtcaaatgagtgaaacgcgtgaggctcgtatatcaagagctaaaagggcatttgtatccacaccgagcgttaggaaaatcttgagttacatggatagatgtagagatctatcagacctagagtctgagcctacatgcatgatggtctatggtgcttcgggtgtaggtaaaacgaccgtcatcaagaaatacttaaatcaaaacagaagagagtccgaagccgggggcgatataataccggttttgcatattgagttgccagacaatgcgaagccagtagatgcagcaagggaattgctggttgaaatgggtgacccgctagcactttatgaaactgacttagctagattgacgaaaagactgactgaattaatccctgcggtcggcgtgaagctgattattatcgatgagttccaacatttggtggaagaaaggtcaaatcgggttcttacccaagtaggtaattggctaaaaatgatacttaacaaaacgaaatgtccaattgttatatttggtatgccatactcaaaagttgtactgcaagcaaactcgcaacttcacgggcgattttccattcaggttgaactgcgcccctttagctaccagggaggtagaggtgtatttaaaacttttttggaataccttgataaagccctaccttttgaaaaacaggctggcttagccaacgaaagtttgcagaaaaaattgtatgcattctctcagggaaacatgcgttcgttgagaaaccttatttatcaagcatctatcgaagcaattgataatcagcatgagacgataaccgaagaagatttcgtttttgcatcgaagttgacatcgggcgataaacccaactcatggaaaaatccttttgaggagggtgttgaggtaacagaagatatgttacgaccgccaccaaaagatattggttgggaggactatttgagacattcaaccccgagagtgagtaaaccaggtagaaataaaaactttttcgaataacctaggctgctgcgctgctgccaccgctgagcaataactagcataaccccttggggcctctaaacgggtcttgaggggttttttgctgaaacctcaggcatttgttgttgatacaaccataaaatgataattacacccataaattgataattatcacacccataaattgatattgcctcttcatggtctaaacttcagtaagtttacgacattttcctcgaggtcatttccggggatccatggagaaaaaaatcactggatataccaccgttgatatatcccaatggcatcgtaaagaacattttgaggcatttcagtcagttgctcaatgtacctataaccagaccgttcagctggatattacggcctttttaaagaccgtaaagaaaaataagcacaagttttatccggcctttattcacattcttgcccgcctgatgaatgctcatccggagttccgtatggcaatgaaagacggtgagctggtgatatgggatagtgttcacccttgttacaccgttttccatgagcaaactgaaacgttttcatcgctctggagtgaataccacgacgatttccggcagtttctacacatatattcgcaagatgtggcgtgttacggtgaaaacctggcctatttccctaaagggtttattgagaatatgtttttcgtctcagccaatccctgggtgagtttcaccagttttgatttaaacgtggccaatatggacaacttcttcgcccccgttttcactatgggcaaatattatacgcaaggcgacaaggtgctgatgccgctggcgattcaggttcatcatgccgtttgtgatggcttccatgtcggcagaatgcttaatgaattacaacagtactgcgatgagtggcagggcggggcgtaatttttttaaggcagttattggtgcccttctagagtccttactgcagtagttttgctgaaatactcgattcacaaaaatatcaacttatggttgttttgtgagatatcaatatatggttgttttgtggttaagttgctgattataaataattattaaatatcactttatggttgcatcaacaggtaccgagctcgaattcactggccgtcgttttacaacgtcgtgactgggaaaaccctggcgttacccaacttaatcgccttgctatcgtggccggatcttgcggcccctcggcttgaacgaattgttagacattatttgccgactaccttggtgatctcgcctttcacgtagtggacaaattcttccaactgatctgcgcgcgaggccaagcgatcttcttcttgtccaagataagcctgtctagcttcaagtatgacgggctgatactgggccggcaggcgctccattgcccagtcggcagcgacatccttcggcgcgattttgccggttactgcgctgtaccaaatgcgggacaacgtaagcactacatttcgctcatcgccagcccagtcgggcggcgagttccatagcgttaaggtttcatttagcgcctcaaatagatcctgttcaggaaccggatcaaagagttcctccgccgctggacctaccaaggcaacgctatgttctcttgcttttgtcagcaagatagccagatcaatgtcgatcgtggctggctcgaagatacctgcaagaatgtcattgcgctgccattctccaaattgcagttcgcgcttagctggataacgccacggaatgatgtcgtcgtgcacaacaatggtgacttctacagcgcggagaatctcgctctctccaggggaagccgaagtttccaaaaggtcgttgatcaaagctcgccgcgttgtttcatcaagccttacggtcaccgtaaccagcaaatcaatatcactgtgtggcttcaggccgccatccactgcggagccgtacaaatgtacggccagcaacgtcggttcgagatggcgctcgatgacgccaactacctctgatagttgagtcgatacttcggcgatcaccgcttccctcatactcttcctttttcaatattattgaagcatttatcagggttattgtctcatgagcggatacatatttgaatgtatttagaaaaataaacaaatagctagctcactcggtcgctacgctccgggcgtgagactgcggcgggcgctgcggacacatacaaagttacccacagattccgtggataagcaggggactaacatgtgaggcaaaacagcagggccgcgccggtggcgtttttccataggctccgccctcctgccagagttcacataaacagacgcttttccggtgcatctgtgggagccgtgaggctcaaccatgaatctgacagtacgggcgaaacccgacaggacttaaagatccccaccgtttccggcgggtcgctccctcttgcgctctcctgttccgaccctgccgtttaccggatacctgttccgcctttctcccttacgggaagtgtggcgctttctcatagctcacacactggtatctcggctcggtgtaggtcgttcgctccaagctgggctgtaagcaagaactccccgttcagcccgactgctgcgccttatccggtaactgttcacttgagtccaacccggaaaagcacggtaaaacgccactggcagcagccattggtaactgggagttcgcagaggatttgtttagctaaacacgcggttgctcttgaagtgtgcgccaaagtccggctacactggaaggacagatttggttgctgtgctctgcgaaagccagttaccacggttaagcagttccccaactgacttaaccttcgatcaaaccacctccccaggtggttttttcgtttacagggcaaaagattacgcgcagaaaaaaaggatctcaagaagatcctttgatcttttctactgaaccgctctagatttcagtgcaatttatctcttcaaatgtagcacctgaagtcagccccatacgatataagttgtaattctcatgttagtcatgccccgcgcccaccggaaggagctgactgggttgaaggctctcaagggcatcggtcgagatcccggtgcctaatgagtgagctaacttacattaattgcgttgcgctcactgcccgctttccagtcgggaaacctgtcgtgccagctgcattaatgaatcggccaacgcgcggggagaggcggtttgcgtattgggcgccagggtggtttttcttttcaccagtgagacgggcaacagctgattgcccttcaccgcctggccctgagagagttgcagcaagcggtccacgctggtttgccccagcaggcgaaaatcctgtttgatggtggttaacggcgggatataacatgagctgtcttcggtatcgtcgtatcccactaccgagatgtccgcaccaacgcgcagcccggactcggtaatggcgcgcattgcgcccagcgccatctgatcgttggcaaccagcatcgcagtgggaacgatgccctcattcagcatttgcatggtttgttgaaaaccggacatggcactccagtcgccttcccgttccgctatcggctgaatttgattgcgagtgagatatttatgccagccagccagacgcagacgcgccgagacagaacttaatgggcccgctaacagcgcgatttgctggtgacccaatgcgaccagatgctccacgcccagtcgcgtaccgtcttcatgggagaaaataatactgttgatgggtgtctggtcagagacatcaagaaataacgccggaacattagtgcaggcagcttccacagcaatggcatcctggtcatccagcggatagttaatgatcagcccactgacgcgttgcgcgagaagattgtgcaccgccgctttacaggcttcgacgccgcttcgttctaccatcgacaccaccacgctggcacccagttgatcggcgcgagatttaatcgccgcgacaatttgcgacggcgcgtgcagggccagactggaggtggcaacgccaatcagcaacgactgtttgcccgccagttgttgtgccacgcggttgggaatgtaattcagctccgccatcgccgcttccactttttcccgcgttttcgcaga

SEQ ID NO: 1749 - DNA, 12828 bp, Synthetic construct
  source 1..12828: mol_type = other DNA
aacgtggctggcctggttcaccacgcgggaaacggtctgataagagacaccggcatactctgcgacatcgtataacgttactggtttcacattcaccaccctgaattgactctcttccgggcgctatcatgccataccgcgaaaggttttgcgccattcgatggtgtccgggatctcgacgctctcccttatgcgactcctgcattaggaatggataaccgtattaccgcctttgagtgagctgataccgctcgccgcagccgaacgaccgagcgcagcgagtcagtgagcgaggacacaagcttttatggctagctcagtcctaggtacaatgctagcgtcgacgtggagatataccatgggtgaactgccgagtaggtagctgataacagtacagcgcggctgaaatcatcattaaagcggtgaactgccgagtaggtagctgataacggatccgaattcgagcgaaggagatatacatatgtttttgcaaagacctaaaccttacagcgatgaaagtttagaaagtttctttatccgagtggctaacaaaaatggctacggtgatgtccatcgcttcctagaagccactaaacgattccttcaagacattgaccataatggctatcaaacctttccgactgatataactcggataaacccatactcagctaaaaacagttccagcgcacgaactgcgtcattcctgaaacttgcacaattgacatttaatgaaccgccagagctacttgggttggcaattaacagaacaaacatgaaatactcgccgtcaactagcgcggttgttagaggtgcagaagtctttcctcgcagtttactacggacgcactccatcccctgctgtcctttgtgtctgcgagaaaatggctacgcctcctacctttggcactttcaggggtacgaatactgccacagccataacgtacctttaattaccacttgtagctgtggtaaggagtttgactaccgagtatctgggttaaagggcatttgctgcaaatgcaaggagcctatcaccttaaccagcagggagaacggtcatgaggcagcgtgtactgtttcaaactggcttgctggccatgaatctaaacctctgccaaatcttcctaaaagctaccgatggggtttagttcattggtggatgggtattaaagatagcgagttcgatcacttttcgttcgttcaatttttctcaaactggccaaggtcattccactcgataatcgaagatgaagtagagttcaaccttgagcatgctgttgtcagcacgtctgaattacgactaaaagatcttcttggtcgattgtttttcggttcaattcggttacctgagcggaatcttcaacacaatatcatccttggtgagcttctctgctatttagaaaatcgtttatggcaagacaagggattaatcgccaacctcaaaatgaacgcgttagaggcgactgtaatgttaaattgtagcctcgatcagattgcatcaatggttgaacaacgcatcttgaagccaaatcgaaaaagcaagcccaacagccctcttgatgttaccgattatctatttcatttcggcgatattttctgtctttggttagctgagttccaaagcgatgagtttaaccgttcgttttatgtgtcgaggtggtaaatgcaaactctgaaagaactaatcgcatccaatcctgacgacttaacaactgaacttaagagagcatttcgtccactcacaccgcatattgcaattgatggtaatgaacttgacgcactgacgatattagtcaatttaaccgataagactgatgatcagaaagacctgctcgatcgagccaaatgcaagcaaaaacttcgagatgaaaaatggtgggctagctgcataaattgcgttaattacagacaaagccataacccaaaattcccggatatacgttctgaaggcgtgattcgaacccaagccctgggtgaattaccgagtttcctactctcgtcctcaaaaatcccaccataccattggtcatatagccatgattcaaaatacgtcaacaaaagcgcattcctcaccaatgagttttgttgggatggtgagatctcatgtttgggtgagcttcttaaagatgcagatcacccactttggaatactttgaaaaagttaggttgttctcaaaaaacttgcaaagcaatggcaaaacaactagctgatattactctcacgactatcaatgtcacactcgcaccaaattacctgactcaaatatctctccccgatagtgatacatcctacatttcactctctcctgttgcatcgctatcgatgcaaagccactttcatcagaggctccaagatgaaaatcggcatagcgcgataacgcggtttagccgaactaccaacatgggggtcactgcgatgacatgtggcggcgcatttagaatgttaaagtctggcgctaagttttccagcccccctcatcaccgattaaacagtaaacgaagttggttgacgtcagagcatgttcagtcattaaaacagtaccagcgcctcaacaaaagcctcatacctgaaaactctcggattgcactccgtagaaaatacaaaatcgagcttcaaaatatggtcagatcttggtttgcaatgcaagaccatacccttgattcgaacatacttatccaacatttgaatcatgacctatcttacttaggagccacaaaacgttttgcatacgatccagcgatgaccaagctctttactgagcttttgaaacgagagttatcaaattcaatcaataatggtgagcaacacactaatggatcgtttttagtcctaccgaatatcagggtttgtggcgcaacagctttaagctccccggtaacggtggggattccatcacttacagctttctttggcttcgttcacgcatttgaacggaatataaatcgcaccacctcatcgtttcgtgttgaatcctttgcgatatgcgtccatcaactacatgtcgagaagcgaggtttgacagcagagtttgtggaaaaaggcgacgggactatatccgctcccgcgacccgggatgactggcagtgtgatgtcgtatttagccttattttgaacaccaactttgctcaacatattgaccaagatacgttagttacatcactaccaaagcgattggctcggggttcagcaaaaattgcgattgatgactttaaacatatcaactcattctcgacattagaaacagcgatcgaatctctgccaatagaagctggtaggtggttatcactttacgcacagtcaaacaataatctaagtgatctattagcagccatgacagaggaccatcagctcatggcaagctgcgtcggttaccacttgttagaagagcccaaagataaaccaaactccctcagaggttacaaacacgctatcgccgagtgcatcattggactcattaactcaatcacctttagctcagagactgatcccaacacaatcttttggtcgctaaagaactatcaaaactacctagtggtacagccaaggagtatcaacgatgaaactaccgacaaatctagcctatgagcgctctatcgacccatcagatgtctgtttttttgtcgtctggcccgatgatagaaaaacacctttaacctacaattctcgtactctgctcgggcaaatggaagcggcatcattagcctatgatgtctcaggtcaaccaataaaaagtgccaccgctgaggcgttagctcaagggaaccctcatcaagttgatttctgccacgttccatacggtgcgagtcatattgaatgcagtttctccgtctcgttttcttctgaactacgtcaaccatataagtgtaactcaagcaaagttaaacaaacgctagtgcaattagtcgagctctacgaaacgaaaatcggctggactgagctagcaacccgatatttgatgaacatttgcaacggtaaatggctgtggaaaaatacccgtaaagcctattgctggaacattgtacttacaccttggccttggaacggggaaaaggttggatttgaagatattcgtactaactacacctcacggcaagactttaaaaataataaaaattggtctgctatagttgaaatgatcaaaaccgcattttctagtactgatgggctggcgatatttgaagtcagggccaccttgcacttgccaacgaatgctatggtgcggccaagccaagttttcacagaaaaagaaagtggcagtaaaagtaaatctaaaactcaaaacagtcgagtttttcagagtacaactattgatggtgaacgatcgccaatactaggggcctttaaaacgggagcagctattgcaaccattgacgactggtatcctgaagccactgagccactaagggtcggacggtttggggttcatcgcgaagatgtcacttgctaccgtcatccgtctaccggaaaagattttttctcgatattacaacaagcagagcactatattgaagtgttgagcgccaacaaaactcccgctcaagaaactatcaacgacatgcactttttaatggctaacctgattaagggtgggatgttccagcataaaggagactgactgtgaaatggtattataagacaatcacctttctgccagagttgtgcaacaacgagtcactggctgcaaagtgtctccgcgttctgcatggatttaactatcagtatgagacacgaaatatcggcgtttcatttccgctttggtgtgatgcaacggttggaaaaaagatttcatttgtcagcaagaacaagatagaactcgacttactacttaaacaacactatttcgtccaaatggaacaacttcaatactttcatatatccaacactgttctcgtcccagaagattgtacatacgtttcctttagacgctgtcaatctatagataagctcacagcagcagggctggcaaggaaaatcagacgcctggagaaacgtgctctatctagaggcgagcaatttgacccatcatcttttgctcaaaaagagcatactgcaatagcgcactaccactcacttggggagtccagcaaacagacgaaccgcaactttcgactcaatatcaggatgctctcggagcaaccccgtgaggggaactcgatttttagtagctatggcttatcaaattcagaaaactcgtttcagcctgtacccttaatctgacctttaataaggagatataccatggcgacaagtttacctacgccctcagcaattacgacttcggcgttagagtatgcattccatactcccgctcgcaatctaacgaaatctcgcggaaaaaacattcatcgttatgtcagtgtaaagatgagtaagaggattacggtagaatctactctagagtgtgatgcctgctatcactttgattttgagccaagtattgttcgcttttgcgctcaaccgattcgatttttatattatctcaatggtcagtctcactcctatgttcctgactttctagttcaatttgataccaacgagtttgttctatatgaagtaaagtcagcttatgctaagaacaaacctgattttgatgttgaatgggaggcgaaagtaaaagcagcaactgaactagggctagaattggagcttgttgaagagagtgatattagggatacggttgtattaaataatcttaagcgcatgcatcgttatgcttcgaaagatgagctgaataacgtacataactctctcttaaaaataataaagtacaatggcgcccaatctgcaagatgcttgggagaacagttgggtttaaaaggccgaactgttttaccaattttgtgcgatttgctgtcaaggtgtttactcgatacacgtttggataagcctctatctcttgaatctcgatttgagttggccagttatggctaagaaagggttctcaagtttccatagaaaagcagtctcttcccaagatacgcttgaatcgatagagcttgtctctagcgctaattgtctagaaagtgttacgtatcaagatatatcagcatttcccgaaacaattgcggtagagattaatttccgattaagcattcttcgctttttagcgcgaaagtgcgaaaccattgtggccaaatcaattgaaccacatcgtgtagagctacagcaaaactatagtagaaaaatacccagtgcaataacgatatatcgatggtggcttgcttttcgaaaatcagactacaaccccattagcttagcacctaatatcaaggatagaggtaatagagagacaaaagtgtcaacagttgttgattctattatggaacaggcagttgaaagagttatatctggacgaaaagtcaatgttagctctgcatataaacgtgttcgacgaaaagttcgtcaatacaatctaactcatggaacgaaatacacgtatcctaagtacgaatctgtaagaaagcgagtaaaaaagaaaaccccatttgagttattagccgcagggaaaggggagagagtagctaagagagagtttcgccgaatgggaaaaaagatcctcacgtctagcgtgctagagagggttgaaatagatcacactgtcgttgacctttttgcagtacacgaagagtatcgaatcccattgggccgaccttggcttactcaattggttgattgttacagtaaagctgtaatcggtttttatttaggtttcgagcctcctagctatgtgtcggtttcccttgcacttaagaatgcaatacaacgcaaagatgacttaatctcctcgtatgaatcgatcgagaatgaatggctatgttatggcatcccagacctactcgtaactgataatggtaaagagtttttgtcgaaagcatttgatcaagcatgtgaatcactattgatcaatgtgcatcaaaataaagttgagacgcccgacaacaaacctcatgttgaacgtaactacgggactattaatacttctctgttagacgatttacctgggaaatccttcagccagtaccttcaaagagaagggtacgactctgtgggagaagctacccttacactcaatgagattagagaaatttacttaatttggttggtggatatttatcataaaaaacccaatcagagaggcactaattgtcctaatgttgcgtggaaaaagggttgtcaagaatgggaaccagaggagttctctggttctaaagacgaattagactttaaatttgctattgttgattacaaacaacttactaaagtagggataactgtctacaaagaactgagttatagcaatgaccgtttagctgaatatagagggaagaaaggaaaccataaagttcagttcaagtataaccctgagtgtatggcagttatttgggtgttggatgaggatatgaatgagtactttacagttaatgcgattgactacgaatatgcaagtagagtatcactttggcaacataaatataacatgaaatatcaagcagaactaaattcagcagaatatgatgaggacaaggaaattgatgcagaaataaaaattgaagaaatcgcagatcgttcaattgttaagactaacaaaatcagagctcggaggcgtggcgctaggcatcaagagaatagcgcaagggctaagtcaatcagtaatgcgaacccggcctcgatacaaaaacatgaagatgaaatcgttagtgcagataatgacgattgggatattgattatgtctgagaaatcgtcaaatgagtgaaacgcgtgaggctcgtatatcaagagctaaaagggcatttgtatccacaccgagcgttaggaaaatcttgagttacatggatagatgtagagatctatcagacctagagtctgagcctacatgcatgatggtctatggtgcttcgggtgtaggtaaaacgaccgtcatcaagaaatacttaaatcaaaacagaagagagtccgaagccgggggcgatataataccggttttgcatattgagttgccagacaatgcgaagccagtagatgcagcaagggaattgctggttgaaatgggtgacccgctagcactttatgaaactgacttagctagattgacgaaaagactgactgaattaatccctgcggtcggcgtgaagctgattattatcgatgagttccaacatttggtggaagaaaggtcaaatcgggttcttacccaagtaggtaattggctaaaaatgatacttaacaaaacgaaatgtccaattgttatatttggtatgccatactcaaaagttgtactgcaagcaaactcgcaacttcacgggcgattttccattcaggttgaactgcgcccctttagctaccagggaggtagaggtgtatttaaaacttttttggaataccttgataaagccctaccttttgaaaaacaggctggcttagccaacgaaagtttgcagaaaaaattgtatgcattctctcagggaaacatgcgttcgttgagaaaccttatttatcaagcatctatcgaagcaattgataatcagcatgagacgataaccgaagaagatttcgtttttgcatcgaagttgacatcgggcgataaacccaactcatggaaaaatccttttgaggagggtgttgaggtaacagaagatatgttacgaccgccaccaaaagatattggttgggaggactatttgagacattcaaccccgagagtgagtaaaccaggtagaaataaaaactttttcgaataacctaggctgctgcgctgctgccaccgctgagcaataactagcataaccccttggggcctctaaacgggtcttgaggggttttttgctgaaacctcaggcatttgttgttgatacaaccataaaatgataattacacccataaattgataattatcacacccataaattgatattgcctcttcatggtctaaacttcagtaagtttacgacattttcctcgaggtcatttccggggatccatggagaaaaaaatcactggatataccaccgttgatatatcccaatggcatcgtaaagaacattttgaggcatttcagtcagttgctcaatgtacctataaccagaccgttcagctggatattacggcctttttaaagaccgtaaagaaaaataagcacaagttttatccggcctttattcacattcttgcccgcctgatgaatgctcatccggagttccgtatggcaatgaaagacggtgagctggtgatatgggatagtgttcacccttgttacaccgttttccatgagcaaactgaaacgttttcatcgctctggagtgaataccacgacgatttccggcagtttctacacatatattcgcaagatgtggcgtgttacggtgaaaacctggcctatttccctaaagggtttattgagaatatgtttttcgtctcagccaatccctgggtgagtttcaccagttttgatttaaacgtggccaatatggacaacttcttcgcccccgttttcactatgggcaaatattatacgcaaggcgacaaggtgctgatgccgctggcgattcaggttcatcatgccgtttgtgatggcttccatgtcggcagaatgcttaatgaattacaacagtactgcgatgagtggcagggcggggcgtaatttttttaaggcagttattggtgcccttctagagtccttactgcagtagttttgctgaaatactcgattcacaaaaatatcaacttatggttgttttgtgagatatcaatatatggttgttttgtggttaagttgctgattataaataattattaaatatcactttatggttgcatcaacaggtaccgagctcgaattcactggccgtcgttttacaacgtcgtgactgggaaaaccctggcgttacccaacttaatcgccttgctatcgtggccggatcttgcggcccctcggcttgaacgaattgttagacattatttgccgactaccttggtgatctcgcctttcacgtagtggacaaattcttccaactgatctgcgcgcgaggccaagcgatcttcttcttgtccaagataagcctgtctagcttcaagtatgacgggctgatactgggccggcaggcgctccattgcccagtcggcagcgacatccttcggcgcgattttgccggttactgcgctgtaccaaatgcgggacaacgtaagcactacatttcgctcatcgccagcccagtcgggcggcgagttccatagcgttaaggtttcatttagcgcctcaaatagatcctgttcaggaaccggatcaaagagttcctccgccgctggacctaccaaggcaacgctatgttctcttgcttttgtcagcaagatagccagatcaatgtcgatcgtggctggctcgaagatacctgcaagaatgtcattgcgctgccattctccaaattgcagttcgcgcttagctggataacgccacggaatgatgtcgtcgtgcacaacaatggtgacttctacagcgcggagaatctcgctctctccaggggaagccgaagtttccaaaaggtcgttgatcaaagctcgccgcgttgtttcatcaagccttacggtcaccgtaaccagcaaatcaatatcactgtgtggcttcaggccgccatccactgcggagccgtacaaatgtacggccagcaacgtcggttcgagatggcgctcgatgacgccaactacctctgatagttgagtcgatacttcggcgatcaccgcttccctcatactcttcctttttcaatattattgaagcatttatcagggttattgtctcatgagcggatacatatttgaatgtatttagaaaaataaacaaatagctagctcactcggtcgctacgctccgggcgtgagactgcggcgggcgctgcggacacatacaaagttacccacagattccgtggataagcaggggactaacatgtgaggcaaaacagcagggccgcgccggtggcgtttttccataggctccgccctcctgccagagttcacataaacagacgcttttccggtgcatctgtgggagccgtgaggctcaaccatgaatctgacagtacgggcgaaacccgacaggacttaaagatccccaccgtttccggcgggtcgctccctcttgcgctctcctgttccgaccctgccgtttaccggatacctgttccgcctttctcccttacgggaagtgtggcgctttctcatagctcacacactggtatctcggctcggtgtaggtcgttcgctccaagctgggctgtaagcaagaactccccgttcagcccgactgctgcgccttatccggtaactgttcacttgagtccaacccggaaaagcacggtaaaacgccactggcagcagccattggtaactgggagttcgcagaggatttgtttagctaaacacgcggttgctcttgaagtgtgcgccaaagtccggctacactggaaggacagatttggttgctgtgctctgcgaaagccagttaccacggttaagcagttccccaactgacttaaccttcgatcaaaccacctccccaggtggttttttcgtttacagggcaaaagattacgcgcagaaaaaaaggatctcaagaagatcctttgatcttttctactgaaccgctctagatttcagtgcaatttatctcttcaaatgtagcacctgaagtcagccccatacgatataagttgtaattctcatgttagtcatgccccgcgcccaccggaaggagctgactgggttgaaggctctcaagggcatcggtcgagatcccggtgcctaatgagtgagctaacttacattaattgcgttgcgctcactgcccgctttccagtcgggaaacctgtcgtgccagctgcattaatgaatcggccaacgcgcggggagaggcggtttgcgtattgggcgccagggtggtttttcttttcaccagtgagacgggcaacagctgattgcccttcaccgcctggccctgagagagttgcagcaagcggtccacgctggtttgccccagcaggcgaaaatcctgtttgatggtggttaacggcgggatataacatgagctgtcttcggtatcgtcgtatcccactaccgagatgtccgcaccaacgcgcagcccggactcggtaatggcgcgcattgcgcccagcgccatctgatcgttggcaaccagcatcgcagtgggaacgatgccctcattcagcatttgcatggtttgttgaaaaccggacatggcactccagtcgccttcccgttccgctatcggctgaatttgattgcgagtgagatatttatgccagccagccagacgcagacgcgccgagacagaacttaatgggcccgctaacagcgcgatttgctggtgacccaatgcgaccagatgctccacgcccagtcgcgtaccgtcttcatgggagaaaataatactgttgatgggtgtctggtcagagacatcaagaaataacgccggaacattagtgcaggcagcttccacagcaatggcatcctggtcatccagcggatagttaatgatcagcccactgacgcgttgcgcgagaagattgtgcaccgccgctttacaggcttcgacgccgcttcgttctaccatcgacaccaccacgctggcacccagttgatcggcgcgagatttaatcgccgcgacaatttgcgacggcgcgtgcagggccagactggaggtggcaacgccaatcagcaacgactgtttgcccgccagttgttgtgccacgcggttgggaatgtaattcagctccgccatcgccgcttccactttttcccgcgttttcgcaga

SEQ ID NO: 1750 - DNA, 12949 bp, Synthetic construct
  source 1..12949: mol_type = other DNA
aacgtggctggcctggttcaccacgcgggaaacggtctgataagagacaccggcatactctgcgacatcgtataacgttactggtttcacattcaccaccctgaattgactctcttccgggcgctatcatgccataccgcgaaaggttttgcgccattcgatggtgtccgggatctcgacgctctcccttatgcgactcctgcattaggaatggataaccgtattaccgcctttgagtgagctgataccgctcgccgcagccgaactaccgagcgcagcgagtcagtgagcgaggacacagcggattgcattaggttttagtttcttgtataatgcttaatgttggtcactgacaggctacgatacggaaggttgctcacgcccggcccctttgccatggctagtgtgtggaaatttccgaggagcaagtctatttccaaaaatgggcgaaaaaggaggtaatacagtggagatataccatgggtgaactgccgagtaggtagctgataacagtacagcgcggctgaaatcatcattaaagcggtgaactgccgagtaggtagctgataacggatccgaattcgagcgaaggagatatacatatgtttttgcaaagacctaaaccttacagcgatgaaagtttagaaagtttctttatccgagtggctaacaaaaatggctacggtgatgtccatcgcttcctagaagccactaaacgattccttcaagacattgaccataatggctatcaaacctttccgactgatataactcggataaacccatactcagctaaaaacagttccagcgcacgaactgcgtcattcctgaaacttgcacaattgacatttaatgaaccgccagagctacttgggttggcaattaacagaacaaacatgaaatactcgccgtcaactagcgcggttgttagaggtgcagaagtctttcctcgcagtttactacggacgcactccatcccctgctgtcctttgtgtctgcgagaaaatggctacgcctcctacctttggcactttcaggggtacgaatactgccacagccataacgtacctttaattaccacttgtagctgtggtaaggagtttgactaccgagtatctgggttaaagggcatttgctgcaaatgcaaggagcctatcaccttaaccagcagggagaacggtcatgaggcagcgtgtactgtttcaaactggcttgctggccatgaatctaaacctctgccaaatcttcctaaaagctaccgatggggtttagttcattggtggatgggtattaaagatagcgagttcgatcacttttcgttcgttcaatttttctcaaactggccaaggtcattccactcgataatcgaagatgaagtagagttcaaccttgagcatgctgttgtcagcacgtctgaattacgactaaaagatcttcttggtcgattgtttttcggttcaattcggttacctgagcggaatcttcaacacaatatcatccttggtgagcttctctgctatttagaaaatcgtttatggcaagacaagggattaatcgccaacctcaaaatgaacgcgttagaggcgactgtaatgttaaattgtagcctcgatcagattgcatcaatggttgaacaacgcatcttgaagccaaatcgaaaaagcaagcccaacagccctcttgatgttaccgattatctatttcatttcggcgatattttctgtctttggttagctgagttccaaagcgatgagtttaaccgttcgttttatgtgtcgaggtggtaaatgcaaactctgaaagaactaatcgcatccaatcctgacgacttaacaactgaacttaagagagcatttcgtccactcacaccgcatattgcaattgatggtaatgaacttgacgcactgacgatattagtcaatttaaccgataagactgatgatcagaaagacctgctcgatcgagccaaatgcaagcaaaaacttcgagatgaaaaatggtgggctagctgcataaattgcgttaattacagacaaagccataacccaaaattcccggatatacgttctgaaggcgtgattcgaacccaagccctgggtgaattaccgagtttcctactctcgtcctcaaaaatcccaccataccattggtcatatagccatgattcaaaatacgtcaacaaaagcgcattcctcaccaatgagttttgttgggatggtgagatctcatgtttgggtgagcttcttaaagatgcagatcacccactttggaatactttgaaaaagttaggttgttctcaaaaaacttgcaaagcaatggcaaaacaactagctgatattactctcacgactatcaatgtcacactcgcaccaaattacctgactcaaatatctctccccgatagtgatacatcctacatttcactctctcctgttgcatcgctatcgatgcaaagccactttcatcagaggctccaagatgaaaatcggcatagcgcgataacgcggtttagccgaactaccaacatgggggtcactgcgatgacatgtggcggcgcatttagaatgttaaagtctggcgctaagttttccagcccccctcatcaccgattaaacagtaaacgaagttggttgacgtcagagcatgttcagtcattaaaacagtaccagcgcctcaacaaaagcctcatacctgaaaactctcggattgcactccgtagaaaatacaaaatcgagcttcaaaatatggtcagatcttggtttgcaatgcaagaccatacccttgattcgaacatacttatccaacatttgaatcatgacctatcttacttaggagccacaaaacgttttgcatacgatccagcgatgaccaagctctttactgagcttttgaaacgagagttatcaaattcaatcaataatggtgagcaacacactaatggatcgtttttagtcctaccgaatatcagggtttgtggcgcaacagctttaagctccccggtaacggtggggattccatcacttacagctttctttggcttcgttcacgcatttgaacggaatataaatcgcaccacctcatcgtttcgtgttgaatcctttgcgatatgcgtccatcaactacatgtcgagaagcgaggtttgacagcagagtttgtggaaaaaggcgacgggactatatccgctcccgcgacccgggatgactggcagtgtgatgtcgtatttagccttattttgaacaccaactttgctcaacatattgaccaagatacgttagttacatcactaccaaagcgattggctcggggttcagcaaaaattgcgattgatgactttaaacatatcaactcattctcgacattagaaacagcgatcgaatctctgccaatagaagctggtaggtggttatcactttacgcacagtcaaacaataatctaagtgatctattagcagccatgacagaggaccatcagctcatggcaagctgcgtcggttaccacttgttagaagagcccaaagataaaccaaactccctcagaggttacaaacacgctatcgccgagtgcatcattggactcattaactcaatcacctttagctcagagactgatcccaacacaatcttttggtcgctaaagaactatcaaaactacctagtggtacagccaaggagtatcaacgatgaaactaccgacaaatctagcctatgagcgctctatcgacccatcagatgtctgtttttttgtcgtctggcccgatgatagaaaaacacctttaacctacaattctcgtactctgctcgggcaaatggaagcggcatcattagcctatgatgtctcaggtcaaccaataaaaagtgccaccgctgaggcgttagctcaagggaaccctcatcaagttgatttctgccacgttccatacggtgcgagtcatattgaatgcagtttctccgtctcgttttcttctgaactacgtcaaccatataagtgtaactcaagcaaagttaaacaaacgctagtgcaattagtcgagctctacgaaacgaaaatcggctggactgagctagcaacccgatatttgatgaacatttgcaacggtaaatggctgtggaaaaatacccgtaaagcctattgctggaacattgtacttacaccttggccttggaacggggaaaaggttggatttgaagatattcgtactaactacacctcacggcaagactttaaaaataataaaaattggtctgctatagttgaaatgatcaaaaccgcattttctagtactgatgggctggcgatatttgaagtcagggccaccttgcacttgccaacgaatgctatggtgcggccaagccaagttttcacagaaaaagaaagtggcagtaaaagtaaatctaaaactcaaaacagtcgagtttttcagagtacaactattgatggtgaacgatcgccaatactaggggcctttaaaacgggagcagctattgcaaccattgacgactggtatcctgaagccactgagccactaagggtcggacggtttggggttcatcgcgaagatgtcacttgctaccgtcatccgtctaccggaaaagattttttctcgatattacaacaagcagagcactatattgaagtgttgagcgccaacaaaactcccgctcaagaaactatcaacgacatgcactttttaatggctaacctgattaagggtgggatgttccagcataaaggagactgactgtgaaatggtattataagacaatcacctttctgccagagttgtgcaacaacgagtcactggctgcaaagtgtctccgcgttctgcatggatttaactatcagtatgagacacgaaatatcggcgtttcatttccgctttggtgtgatgcaacggttggaaaaaagatttcatttgtcagcaagaacaagatagaactcgacttactacttaaacaacactatttcgtccaaatggaacaacttcaatactttcatatatccaacactgttctcgtcccagaagattgtacatacgtttcctttagacgctgtcaatctatagataagctcacagcagcagggctggcaaggaaaatcagacgcctggagaaacgtgctctatctagaggcgagcaatttgacccatcatcttttgctcaaaaagagcatactgcaatagcgcactaccactcacttggggagtccagcaaacagacgaaccgcaactttcgactcaatatcaggatgctctcggagcaaccccgtgaggggaactcgatttttagtagctatggcttatcaaattcagaaaactcgtttcagcctgtacccttaatctgacctttaataaggagatataccatggcgacaagtttacctacgccctcagcaattacgacttcggcgttagagtatgcattccatactcccgctcgcaatctaacgaaatctcgcggaaaaaacattcatcgttatgtcagtgtaaagatgagtaagaggattacggtagaatctactctagagtgtgatgcctgctatcactttgattttgagccaagtattgttcgcttttgcgctcaaccgattcgatttttatattatctcaatggtcagtctcactcctatgttcctgactttctagttcaatttgataccaacgagtttgttctatatgaagtaaagtcagcttatgctaagaacaaacctgattttgatgttgaatgggaggcgaaagtaaaagcagcaactgaactagggctagaattggagcttgttgaagagagtgatattagggatacggttgtattaaataatcttaagcgcatgcatcgttatgcttcgaaagatgagctgaataacgtacataactctctcttaaaaataataaagtacaatggcgcccaatctgcaagatgcttgggagaacagttgggtttaaaaggccgaactgttttaccaattttgtgcgatttgctgtcaaggtgtttactcgatacacgtttggataagcctctatctcttgaatctcgatttgagttggccagttatggctaagaaagggttctcaagtttccatagaaaagcagtctcttcccaagatacgcttgaatcgatagagcttgtctctagcgctaattgtctagaaagtgttacgtatcaagatatatcagcatttcccgaaacaattgcggtagagattaatttccgattaagcattcttcgctttttagcgcgaaagtgcgaaaccattgtggccaaatcaattgaaccacatcgtgtagagctacagcaaaactatagtagaaaaatacccagtgcaataacgatatatcgatggtggcttgcttttcgaaaatcagactacaaccccattagcttagcacctaatatcaaggatagaggtaatagagagacaaaagtgtcaacagttgttgattctattatggaacaggcagttgaaagagttatatctggacgaaaagtcaatgttagctctgcatataaacgtgttcgacgaaaagttcgtcaatacaatctaactcatggaacgaaatacacgtatcctaagtacgaatctgtaagaaagcgagtaaaaaagaaaaccccatttgagttattagccgcagggaaaggggagagagtagctaagagagagtttcgccgaatgggaaaaaagatcctcacgtctagcgtgctagagagggttgaaatagatcacactgtcgttgacctttttgcagtacacgaagagtatcgaatcccattgggccgaccttggcttactcaattggttgattgttacagtaaagctgtaatcggtttttatttaggtttcgagcctcctagctatgtgtcggtttcccttgcacttaagaatgcaatacaacgcaaagatgacttaatctcctcgtatgaatcgatcgagaatgaatggctatgttatggcatcccagacctactcgtaactgataatggtaaagagtttttgtcgaaagcatttgatcaagcatgtgaatcactattgatcaatgtgcatcaaaataaagttgagacgcccgacaacaaacctcatgttgaacgtaactacgggactattaatacttctctgttagacgatttacctgggaaatccttcagccagtaccttcaaagagaagggtacgactctgtgggagaagctacccttacactcaatgagattagagaaatttacttaatttggttggtggatatttatcataaaaaacccaatcagagaggcactaattgtcctaatgttgcgtggaaaaagggttgtcaagaatgggaaccagaggagttctctggttctaaagacgaattagactttaaatttgctattgttgattacaaacaacttactaaagtagggataactgtctacaaagaactgagttatagcaatgaccgtttagctgaatatagagggaagaaaggaaaccataaagttcagttcaagtataaccctgagtgtatggcagttatttgggtgttggatgaggatatgaatgagtactttacagttaatgcgattgactacgaatatgcaagtagagtatcactttggcaacataaatataacatgaaatatcaagcagaactaaattcagcagaatatgatgaggacaaggaaattgatgcagaaataaaaattgaagaaatcgcagatcgttcaattgttaagactaacaaaatcagagctcggaggcgtggcgctaggcatcaagagaatagcgcaagggctaagtcaatcagtaatgcgaacccggcctcgatacaaaaacatgaagatgaaatcgttagtgcagataatgacgattgggatattgattatgtctgagaaatcgtcaaatgagtgaaacgcgtgaggctcgtatatcaagagctaaaagggcatttgtatccacaccgagcgttaggaaaatcttgagttacatggatagatgtagagatctatcagacctagagtctgagcctacatgcatgatggtctatggtgcttcgggtgtaggtaaaacgaccgtcatcaagaaatacttaaatcaaaacagaagagagtccgaagccgggggcgatataataccggttttgcatattgagttgccagacaatgcgaagccagtagatgcagcaagggaattgctggttgaaatgggtgacccgctagcactttatgaaactgacttagctagattgacgaaaagactgactgaattaatccctgcggtcggcgtgaagctgattattatcgatgagttccaacatttggtggaagaaaggtcaaatcgggttcttacccaagtaggtaattggctaaaaatgatacttaacaaaacgaaatgtccaattgttatatttggtatgccatactcaaaagttgtactgcaagcaaactcgcaacttcacgggcgattttccattcaggttgaactgcgcccctttagctaccagggaggtagaggtgtatttaaaacttttttggaataccttgataaagccctaccttttgaaaaacaggctggcttagccaacgaaagtttgcagaaaaaattgtatgcattctctcagggaaacatgcgttcgttgagaaaccttatttatcaagcatctatcgaagcaattgataatcagcatgagacgataaccgaagaagatttcgtttttgcatcgaagttgacatcgggcgataaacccaactcatggaaaaatccttttgaggagggtgttgaggtaacagaagatatgttacgaccgccaccaaaagatattggttgggaggactatttgagacattcaaccccgagagtgagtaaaccaggtagaaataaaaactttttcgaataacctaggctgctgcgctgctgccaccgctgagcaataactagcataaccccttggggcctctaaacgggtcttgaggggttttttgctgaaacctcaggcatttgttgttgatacaaccataaaatgataattacacccataaattgataattatcacacccataaattgatattgcctcttcatggtctaaacttcagtaagtttacgacattttcctcgaggtcatttccggggatccatggagaaaaaaatcactggatataccaccgttgatatatcccaatggcatcgtaaagaacattttgaggcatttcagtcagttgctcaatgtacctataaccagaccgttcagctggatattacggcctttttaaagaccgtaaagaaaaataagcacaagttttatccggcctttattcacattcttgcccgcctgatgaatgctcatccggagttccgtatggcaatgaaagacggtgagctggtgatatgggatagtgttcacccttgttacaccgttttccatgagcaaactgaaacgttttcatcgctctggagtgaataccacgacgatttccggcagtttctacacatatattcgcaagatgtggcgtgttacggtgaaaacctggcctatttccctaaagggtttattgagaatatgtttttcgtctcagccaatccctgggtgagtttcaccagttttgatttaaacgtggccaatatggacaacttcttcgcccccgttttcactatgggcaaatattatacgcaaggcgacaaggtgctgatgccgctggcgattcaggttcatcatgccgtttgtgatggcttccatgtcggcagaatgcttaatgaattacaacagtactgcgatgagtggcagggcggggcgtaatttttttaaggcagttattggtgcccttctagagtccttactgcagtagttttgctgaaatactcgattcacaaaaatatcaacttatggttgttttgtgagatatcaatatatggttgttttgtggttaagttgctgattataaataattattaaatatcactttatggttgcatcaacaggtaccgagctcgaattcactggccgtcgttttacaacgtcgtgactgggaaaaccctggcgttacccaacttaatcgccttgctatcgtggccggatcttgcggcccctcggcttgaacgaattgttagacattatttgccgactaccttggtgatctcgcctttcacgtagtggacaaattcttccaactgatctgcgcgcgaggccaagcgatcttcttcttgtccaagataagcctgtctagcttcaagtatgacgggctgatactgggccggcaggcgctccattgcccagtcggcagcgacatccttcggcgcgattttgccggttactgcgctgtaccaaatgcgggacaacgtaagcactacatttcgctcatcgccagcccagtcgggcggcgagttccatagcgttaaggtttcatttagcgcctcaaatagatcctgttcaggaaccggatcaaagagttcctccgccgctggacctaccaaggcaacgctatgttctcttgcttttgtcagcaagatagccagatcaatgtcgatcgtggctggctcgaagatacctgcaagaatgtcattgcgctgccattctccaaattgcagttcgcgcttagctggataacgccacggaatgatgtcgtcgtgcacaacaatggtgacttctacagcgcggagaatctcgctctctccaggggaagccgaagtttccaaaaggtcgttgatcaaagctcgccgcgttgtttcatcaagccttacggtcaccgtaaccagcaaatcaatatcactgtgtggcttcaggccgccatccactgcggagccgtacaaatgtacggccagcaacgtcggttcgagatggcgctcgatgacgccaactacctctgatagttgagtcgatacttcggcgatcaccgcttccctcatactcttcctttttcaatattattgaagcatttatcagggttattgtctcatgagcggatacatatttgaatgtatttagaaaaataaacaaatagctagctcactcggtcgctacgctccgggcgtgagactgcggcgggcgctgcggacacatacaaagttacccacagattccgtggataagcaggggactaacatgtgaggcaaaacagcagggccgcgccggtggcgtttttccataggctccgccctcctgccagagttcacataaacagacgcttttccggtgcatctgtgggagccgtgaggctcaaccatgaatctgacagtacgggcgaaacccgacaggacttaaagatccccaccgtttccggcgggtcgctccctcttgcgctctcctgttccgaccctgccgtttaccggatacctgttccgcctttctcccttacgggaagtgtggcgctttctcatagctcacacactggtatctcggctcggtgtaggtcgttcgctccaagctgggctgtaagcaagaactccccgttcagcccgactgctgcgccttatccggtaactgttcacttgagtccaacccggaaaagcacggtaaaacgccactggcagcagccattggtaactgggagttcgcagaggatttgtttagctaaacacgcggttgctcttgaagtgtgcgccaaagtccggctacactggaaggacagatttggttgctgtgctctgcgaaagccagttaccacggttaagcagttccccaactgacttaaccttcgatcaaaccacctccccaggtggttttttcgtttacagggcaaaagattacgcgcagaaaaaaaggatctcaagaagatcctttgatcttttctactgaaccgctctagatttcagtgcaatttatctcttcaaatgtagcacctgaagtcagccccatacgatataagttgtaattctcatgttagtcatgccccgcgcccaccggaaggagctgactgggttgaaggctctcaagggcatcggtcgagatcccggtgcctaatgagtgagctaacttacattaattgcgttgcgctcactgcccgctttccagtcgggaaacctgtcgtgccagctgcattaatgaatcggccaacgcgcggggagaggcggtttgcgtattgggcgccagggtggtttttcttttcaccagtgagacgggcaacagctgattgcccttcaccgcctggccctgagagagttgcagcaagcggtccacgctggtttgccccagcaggcgaaaatcctgtttgatggtggttaacggcgggatataacatgagctgtcttcggtatcgtcgtatcccactaccgagatgtccgcaccaacgcgcagcccggactcggtaatggcgcgcattgcgcccagcgccatctgatcgttggcaaccagcatcgcagtgggaacgatgccctcattcagcatttgcatggtttgttgaaaaccggacatggcactccagtcgccttcccgttccgctatcggctgaatttgattgcgagtgagatatttatgccagccagccagacgcagacgcgccgagacagaacttaatgggcccgctaacagcgcgatttgctggtgacccaatgcgaccagatgctccacgcccagtcgcgtaccgtcttcatgggagaaaataatactgttgatgggtgtctggtcagagacatcaagaaataacgccggaacattagtgcaggcagcttccacagcaatggcatcctggtcatccagcggatagttaatgatcagcccactgacgcgttgcgcgagaagattgtgcaccgccgctttacaggcttcgacgccgcttcgttctaccatcgacaccaccacgctggcacccagttgatcggcgcgagatttaatcgccgcgacaatttgcgacggcgcgtgcagggccagactggaggtggcaacgccaatcagcaacgactgtttgcccgccagttgttgtgccacgcggttgggaatgtaattcagctccgccatcgccgcttccactttttcccgcgttttcgcaga

SEQ ID NO: 1751 - DNA, 12874 bp, Synthetic construct
  source 1..12874: mol_type = other DNA
aacgtggctggcctggttcaccacgcgggaaacggtctgataagagacaccggcatactctgcgacatcgtataacgttactggtttcacattcaccaccctgaattgactctcttccgggcgctatcatgccataccgcgaaaggttttgcgccattcgatggtgtccgggatctcgacgctctcccttatgcgactcctgcattaggaatggataaccgtattaccgcctttgagtgagctgataccgctcgccgcagccgaacgaccgagcgcagcgagtcagtgagcgaggagcgactcctgcattaggaaattaatacgactcactataggggaattgtgagcggataacaattcccctgtagaaataattttgtttaactttaataaggagatataccatgggtgaactgccgagtaggtagctgataacagtacagcgcggctgaaatcatcattaaagcggtgaactgccgagtaggtagctgataacggatccgaattcgagcgaaggagatatacatatgtttttgcaaagacctaaaccttacagcgatgaaagtttagaaagtttctttatccgagtggctaacaaaaatggctacggtgatgtccatcgcttcctagaagccactaaacgattccttcaagacattgaccataatggctatcaaacctttccgactgatataactcggataaacccatactcagctaaaaacagttccagcgcacgaactgcgtcattcctgaaacttgcacaattgacatttaatgaaccgccagagctacttgggttggcaattaacagaacaaacatgaaatactcgccgtcaactagcgcggttgttagaggtgcagaagtctttcctcgcagtttactacggacgcactccatcccctgctgtcctttgtgtctgcgagaaaatggctacgcctcctacctttggcactttcaggggtacgaatactgccacagccataacgtacctttaattaccacttgtagctgtggtaaggagtttgactaccgagtatctgggttaaagggcatttgctgcaaatgcaaggagcctatcaccttaaccagcagggagaacggtcatgaggcagcgtgtactgtttcaaactggcttgctggccatgaatctaaacctctgccaaatcttcctaaaagctaccgatggggtttagttcattggtggatgggtattaaagatagcgagttcgatcacttttcgttcgttcaatttttctcaaactggccaaggtcattccactcgataatcgaagatgaagtagagttcaaccttgagcatgctgttgtcagcacgtctgaattacgactaaaagatcttcttggtcgattgtttttcggttcaattcggttacctgagcggaatcttcaacacaatatcatccttggtgagcttctctgctatttagaaaatcgtttatggcaagacaagggattaatcgccaacctcaaaatgaacgcgttagaggcgactgtaatgttaaattgtagcctcgatcagattgcatcaatggttgaacaacgcatcttgaagccaaatcgaaaaagcaagcccaacagccctcttgatgttaccgattatctatttcatttcggcgatattttctgtctttggttagctgagttccaaagcgatgagtttaaccgttcgttttatgtgtcgaggtggtaaatgcaaactctgaaagaactaatcgcatccaatcctgacgacttaacaactgaacttaagagagcatttcgtccactcacaccgcatattgcaattgatggtaatgaacttgacgcactgacgatattagtcaatttaaccgataagactgatgatcagaaagacctgctcgatcgagccaaatgcaagcaaaaacttcgagatgaaaaatggtgggctagctgcataaattgcgttaattacagacaaagccataacccaaaattcccggatatacgttctgaaggcgtgattcgaacccaagccctgggtgaattaccgagtttcctactctcgtcctcaaaaatcccaccataccattggtcatatagccatgattcaaaatacgtcaacaaaagcgcattcctcaccaatgagttttgttgggatggtgagatctcatgtttgggtgagcttcttaaagatgcagatcacccactttggaatactttgaaaaagttaggttgttctcaaaaaacttgcaaagcaatggcaaaacaactagctgatattactctcacgactatcaatgtcacactcgcaccaaattacctgactcaaatatctctccccgatagtgatacatcctacatttcactctctcctgttgcatcgctatcgatgcaaagccactttcatcagaggctccaagatgaaaatcggcatagcgcgataacgcggtttagccgaactaccaacatgggggtcactgcgatgacatgtggcggcgcatttagaatgttaaagtctggcgctaagttttccagcccccctcatcaccgattaaacagtaaacgaagttggttgacgtcagagcatgttcagtcattaaaacagtaccagcgcctcaacaaaagcctcatacctgaaaactctcggattgcactccgtagaaaatacaaaatcgagcttcaaaatatggtcagatcttggtttgcaatgcaagaccatacccttgattcgaacatacttatccaacatttgaatcatgacctatcttacttaggagccacaaaacgttttgcatacgatccagcgatgaccaagctctttactgagcttttgaaacgagagttatcaaattcaatcaataatggtgagcaacacactaatggatcgtttttagtcctaccgaatatcagggtttgtggcgcaacagctttaagctccccggtaacggtggggattccatcacttacagctttctttggcttcgttcacgcatttgaacggaatataaatcgcaccacctcatcgtttcgtgttgaatcctttgcgatatgcgtccatcaactacatgtcgagaagcgaggtttgacagcagagtttgtggaaaaaggcgacgggactatatccgctcccgcgacccgggatgactggcagtgtgatgtcgtatttagccttattttgaacaccaactttgctcaacatattgaccaagatacgttagttacatcactaccaaagcgattggctcggggttcagcaaaaattgcgattgatgactttaaacatatcaactcattctcgacattagaaacagcgatcgaatctctgccaatagaagctggtaggtggttatcactttacgcacagtcaaacaataatctaagtgatctattagcagccatgacagaggaccatcagctcatggcaagctgcgtcggttaccacttgttagaagagcccaaagataaaccaaactccctcagaggttacaaacacgctatcgccgagtgcatcattggactcattaactcaatcacctttagctcagagactgatcccaacacaatcttttggtcgctaaagaactatcaaaactacctagtggtacagccaaggagtatcaacgatgaaactaccgacaaatctagcctatgagcgctctatcgacccatcagatgtctgtttttttgtcgtctggcccgatgatagaaaaacacctttaacctacaattctcgtactctgctcgggcaaatggaagcggcatcattagcctatgatgtctcaggtcaaccaataaaaagtgccaccgctgaggcgttagctcaagggaaccctcatcaagttgatttctgccacgttccatacggtgcgagtcatattgaatgcagtttctccgtctcgttttcttctgaactacgtcaaccatataagtgtaactcaagcaaagttaaacaaacgctagtgcaattagtcgagctctacgaaacgaaaatcggctggactgagctagcaacccgatatttgatgaacatttgcaacggtaaatggctgtggaaaaatacccgtaaagcctattgctggaacattgtacttacaccttggccttggaacggggaaaaggttggatttgaagatattcgtactaactacacctcacggcaagactttaaaaataataaaaattggtctgctatagttgaaatgatcaaaaccgcattttctagtactgatgggctggcgatatttgaagtcagggccaccttgcacttgccaacgaatgctatggtgcggccaagccaagttttcacagaaaaagaaagtggcagtaaaagtaaatctaaaactcaaaacagtcgagtttttcagagtacaactattgatggtgaacgatcgccaatactaggggcctttaaaacgggagcagctattgcaaccattgacgactggtatcctgaagccactgagccactaagggtcggacggtttggggttcatcgcgaagatgtcacttgctaccgtcatccgtctaccggaaaagattttttctcgatattacaacaagcagagcactatattgaagtgttgagcgccaacaaaactcccgctcaagaaactatcaacgacatgcactttttaatggctaacctgattaagggtgggatgttccagcataaaggagactgactgtgaaatggtattataagacaatcacctttctgccagagttgtgcaacaacgagtcactggctgcaaagtgtctccgcgttctgcatggatttaactatcagtatgagacacgaaatatcggcgtttcatttccgctttggtgtgatgcaacggttggaaaaaagatttcatttgtcagcaagaacaagatagaactcgacttactacttaaacaacactatttcgtccaaatggaacaacttcaatactttcatatatccaacactgttctcgtcccagaagattgtacatacgtttcctttagacgctgtcaatctatagataagctcacagcagcagggctggcaaggaaaatcagacgcctggagaaacgtgctctatctagaggcgagcaatttgacccatcatcttttgctcaaaaagagcatactgcaatagcgcactaccactcacttggggagtccagcaaacagacgaaccgcaactttcgactcaatatcaggatgctctcggagcaaccccgtgaggggaactcgatttttagtagctatggcttatcaaattcagaaaactcgtttcagcctgtacccttaatctgacctttaataaggagatataccatggcgacaagtttacctacgccctcagcaattacgacttcggcgttagagtatgcattccatactcccgctcgcaatctaacgaaatctcgcggaaaaaacattcatcgttatgtcagtgtaaagatgagtaagaggattacggtagaatctactctagagtgtgatgcctgctatcactttgattttgagccaagtattgttcgcttttgcgctcaaccgattcgatttttatattatctcaatggtcagtctcactcctatgttcctgactttctagttcaatttgataccaacgagtttgttctatatgaagtaaagtcagcttatgctaagaacaaacctgattttgatgttgaatgggaggcgaaagtaaaagcagcaactgaactagggctagaattggagcttgttgaagagagtgatattagggatacggttgtattaaataatcttaagcgcatgcatcgttatgcttcgaaagatgagctgaataacgtacataactctctcttaaaaataataaagtacaatggcgcccaatctgcaagatgcttgggagaacagttgggtttaaaaggccgaactgttttaccaattttgtgcgatttgctgtcaaggtgtttactcgatacacgtttggataagcctctatctcttgaatctcgatttgagttggccagttatggctaagaaagggttctcaagtttccatagaaaagcagtctcttcccaagatacgcttgaatcgatagagcttgtctctagcgctaattgtctagaaagtgttacgtatcaagatatatcagcatttcccgaaacaattgcggtagagattaatttccgattaagcattcttcgctttttagcgcgaaagtgcgaaaccattgtggccaaatcaattgaaccacatcgtgtagagctacagcaaaactatagtagaaaaatacccagtgcaataacgatatatcgatggtggcttgcttttcgaaaatcagactacaaccccattagcttagcacctaatatcaaggatagaggtaatagagagacaaaagtgtcaacagttgttgattctattatggaacaggcagttgaaagagttatatctggacgaaaagtcaatgttagctctgcatataaacgtgttcgacgaaaagttcgtcaatacaatctaactcatggaacgaaatacacgtatcctaagtacgaatctgtaagaaagcgagtaaaaaagaaaaccccatttgagttattagccgcagggaaaggggagagagtagctaagagagagtttcgccgaatgggaaaaaagatcctcacgtctagcgtgctagagagggttgaaatagatcacactgtcgttgacctttttgcagtacacgaagagtatcgaatcccattgggccgaccttggcttactcaattggttgattgttacagtaaagctgtaatcggtttttatttaggtttcgagcctcctagctatgtgtcggtttcccttgcacttaagaatgcaatacaacgcaaagatgacttaatctcctcgtatgaatcgatcgagaatgaatggctatgttatggcatcccagacctactcgtaactgataatggtaaagagtttttgtcgaaagcatttgatcaagcatgtgaatcactattgatcaatgtgcatcaaaataaagttgagacgcccgacaacaaacctcatgttgaacgtaactacgggactattaatacttctctgttagacgatttacctgggaaatccttcagccagtaccttcaaagagaagggtacgactctgtgggagaagctacccttacactcaatgagattagagaaatttacttaatttggttggtggatatttatcataaaaaacccaatcagagaggcactaattgtcctaatgttgcgtggaaaaagggttgtcaagaatgggaaccagaggagttctctggttctaaagacgaattagactttaaatttgctattgttgattacaaacaacttactaaagtagggataactgtctacaaagaactgagttatagcaatgaccgtttagctgaatatagagggaagaaaggaaaccataaagttcagttcaagtataaccctgagtgtatggcagttatttgggtgttggatgaggatatgaatgagtactttacagttaatgcgattgactacgaatatgcaagtagagtatcactttggcaacataaatataacatgaaatatcaagcagaactaaattcagcagaatatgatgaggacaaggaaattgatgcagaaataaaaattgaagaaatcgcagatcgttcaattgttaagactaacaaaatcagagctcggaggcgtggcgctaggcatcaagagaatagcgcaagggctaagtcaatcagtaatgcgaacccggcctcgatacaaaaacatgaagatgaaatcgttagtgcagataatgacgattgggatattgattatgtctgagaaatcgtcaaatgagtgaaacgcgtgaggctcgtatatcaagagctaaaagggcatttgtatccacaccgagcgttaggaaaatcttgagttacatggatagatgtagagatctatcagacctagagtctgagcctacatgcatgatggtctatggtgcttcgggtgtaggtaaaacgaccgtcatcaagaaatacttaaatcaaaacagaagagagtccgaagccgggggcgatataataccggttttgcatattgagttgccagacaatgcgaagccagtagatgcagcaagggaattgctggttgaaatgggtgacccgctagcactttatgaaactgacttagctagattgacgaaaagactgactgaattaatccctgcggtcggcgtgaagctgattattatcgatgagttccaacatttggtggaagaaaggtcaaatcgggttcttacccaagtaggtaattggctaaaaatgatacttaacaaaacgaaatgtccaattgttatatttggtatgccatactcaaaagttgtactgcaagcaaactcgcaacttcacgggcgattttccattcaggttgaactgcgcccctttagctaccagggaggtagaggtgtatttaaaacttttttggaataccttgataaagccctaccttttgaaaaacaggctggcttagccaacgaaagtttgcagaaaaaattgtatgcattctctcagggaaacatgcgttcgttgagaaaccttatttatcaagcatctatcgaagcaattgataatcagcatgagacgataaccgaagaagatttcgtttttgcatcgaagttgacatcgggcgataaacccaactcatggaaaaatccttttgaggagggtgttgaggtaacagaagatatgttacgaccgccaccaaaagatattggttgggaggactatttgagacattcaaccccgagagtgagtaaaccaggtagaaataaaaactttttcgaataacctaggctgctgcgctgctgccaccgctgagcaataactagcataaccccttggggcctctaaacgggtcttgaggggttttttgctgaaacctcaggcatttgttgttgatacaaccataaaatgataattacacccataaattgataattatcacacccataaattgatattgcctcttcatggtctaaacttcagtaagtttacgacattttcctcgaggtcatttccggggatccatggagaaaaaaatcactggatataccaccgttgatatatcccaatggcatcgtaaagaacattttgaggcatttcagtcagttgctcaatgtacctataaccagaccgttcagctggatattacggcctttttaaagaccgtaaagaaaaataagcacaagttttatccggcctttattcacattcttgcccgcctgatgaatgctcatccggagttccgtatggcaatgaaagacggtgagctggtgatatgggatagtgttcacccttgttacaccgttttccatgagcaaactgaaacgttttcatcgctctggagtgaataccacgacgatttccggcagtttctacacatatattcgcaagatgtggcgtgttacggtgaaaacctggcctatttccctaaagggtttattgagaatatgtttttcgtctcagccaatccctgggtgagtttcaccagttttgatttaaacgtggccaatatggacaacttcttcgcccccgttttcactatgggcaaatattatacgcaaggcgacaaggtgctgatgccgctggcgattcaggttcatcatgccgtttgtgatggcttccatgtcggcagaatgcttaatgaattacaacagtactgcgatgagtggcagggcggggcgtaatttttttaaggcagttattggtgcccttctagagtccttactgcagtagttttgctgaaatactcgattcacaaaaatatcaacttatggttgttttgtgagatatcaatatatggttgttttgtggttaagttgctgattataaataattattaaatatcactttatggttgcatcaacaggtaccgagctcgaattcactggccgtcgttttacaacgtcgtgactgggaaaaccctggcgttacccaacttaatcgccttgctatcgtggccggatcttgcggcccctcggcttgaacgaattgttagacattatttgccgactaccttggtgatctcgcctttcacgtagtggacaaattcttccaactgatctgcgcgcgaggccaagcgatcttcttcttgtccaagataagcctgtctagcttcaagtatgacgggctgatactgggccggcaggcgctccattgcccagtcggcagcgacatccttcggcgcgattttgccggttactgcgctgtaccaaatgcgggacaacgtaagcactacatttcgctcatcgccagcccagtcgggcggcgagttccatagcgttaaggtttcatttagcgcctcaaatagatcctgttcaggaaccggatcaaagagttcctccgccgctggacctaccaaggcaacgctatgttctcttgcttttgtcagcaagatagccagatcaatgtcgatcgtggctggctcgaagatacctgcaagaatgtcattgcgctgccattctccaaattgcagttcgcgcttagctggataacgccacggaatgatgtcgtcgtgcacaacaatggtgacttctacagcgcggagaatctcgctctctccaggggaagccgaagtttccaaaaggtcgttgatcaaagctcgccgcgttgtttcatcaagccttacggtcaccgtaaccagcaaatcaatatcactgtgtggcttcaggccgccatccactgcggagccgtacaaatgtacggccagcaacgtcggttcgagatggcgctcgatgacgccaactacctctgatagttgagtcgatacttcggcgatcaccgcttccctcatactcttcctttttcaatattattgaagcatttatcagggttattgtctcatgagcggatacatatttgaatgtatttagaaaaataaacaaatagctagctcactcggtcgctacgctccgggcgtgagactgcggcgggcgctgcggacacatacaaagttacccacagattccgtggataagcaggggactaacatgtgaggcaaaacagcagggccgcgccggtggcgtttttccataggctccgccctcctgccagagttcacataaacagacgcttttccggtgcatctgtgggagccgtgaggctcaaccatgaatctgacagtacgggcgaaacccgacaggacttaaagatccccaccgtttccggcgggtcgctccctcttgcgctctcctgttccgaccctgccgtttaccggatacctgttccgcctttctcccttacgggaagtgtggcgctttctcatagctcacacactggtatctcggctcggtgtaggtcgttcgctccaagctgggctgtaagcaagaactccccgttcagcccgactgctgcgccttatccggtaactgttcacttgagtccaacccggaaaagcacggtaaaacgccactggcagcagccattggtaactgggagttcgcagaggatttgtttagctaaacacgcggttgctcttgaagtgtgcgccaaagtccggctacactggaaggacagatttggttgctgtgctctgcgaaagccagttaccacggttaagcagttccccaactgacttaaccttcgatcaaaccacctccccaggtggttttttcgtttacagggcaaaagattacgcgcagaaaaaaaggatctcaagaagatcctttgatcttttctactgaaccgctctagatttcagtgcaatttatctcttcaaatgtagcacctgaagtcagccccatacgatataagttgtaattctcatgttagtcatgccccgcgcccaccggaaggagctgactgggttgaaggctctcaagggcatcggtcgagatcccggtgcctaatgagtgagctaacttacattaattgcgttgcgctcactgcccgctttccagtcgggaaacctgtcgtgccagctgcattaatgaatcggccaacgcgcggggagaggcggtttgcgtattgggcgccagggtggtttttcttttcaccagtgagacgggcaacagctgattgcccttcaccgcctggccctgagagagttgcagcaagcggtccacgctggtttgccccagcaggcgaaaatcctgtttgatggtggttaacggcgggatataacatgagctgtcttcggtatcgtcgtatcccactaccgagatgtccgcaccaacgcgcagcccggactcggtaatggcgcgcattgcgcccagcgccatctgatcgttggcaaccagcatcgcagtgggaacgatgccctcattcagcatttgcatggtttgttgaaaaccggacatggcactccagtcgccttcccgttccgctatcggctgaatttgattgcgagtgagatatttatgccagccagccagacgcagacgcgccgagacagaacttaatgggcccgctaacagcgcgatttgctggtgacccaatgcgaccagatgctccacgcccagtcgcgtaccgtcttcatgggagaaaataatactgttgatgggtgtctggtcagagacatcaagaaataacgccggaacattagtgcaggcagcttccacagcaatggcatcctggtcatccagcggatagttaatgatcagcccactgacgcgttgcgcgagaagattgtgcaccgccgctttacaggcttcgacgccgcttcgttctaccatcgacaccaccacgctggcacccagttgatcggcgcgagatttaatcgccgcgacaatttgcgacggcgcgtgcagggccagactggaggtggcaacgccaatcagcaacgactgtttgcccgccagttgttgtgccacgcggttgggaatgtaattcagctccgccatcgccgcttccactttttcccgcgttttcgcaga

SEQ ID NO: 1752 - DNA, 12980 bp, Synthetic construct
  source 1..12980: mol_type = other DNA
gctcagaagaactcgtcaagaaggcgatagaaggcgatgcgctgcgaatcgggagcggcgataccgtaaagcacgaggaagcggtcagcccattcgccgccaagctcttcagcaatatcacgggtagccaacgctatgtcctgatagcggtccgccacacccagccggccacagtcgatgaatccagaaaagcggccattttccaccatgatattcggcaagcaggcatcgccatgggtcacgacgagatcctcgccgtcgggcatgcgcgccttgagcctggcgaacagttcggctggcgcgagcccctgatgctcttcgtccagatcatcctgatcgacaagaccggcttccatccgagtacgtgctcgctcgatgcgatgtttcgcttggtggtcgaatgggcaggtagccggatcaagcgtatgcagccgccgcattgcatcagccatgatggatactttctcggcaggagcaaggtgagatgacaggagatcctgccccggcacttcgcccaatagcagccagtcccttcccgcttcagtgacaacgtcgagcacagctgcgcaaggaacgcccgtcgtggccagccacgatagccgcgctgcctcgtcttgcagttcattcagggcaccggacaggtcggtcttgacaaaaagaaccgggcgcccctgcgctgacagccggaacacggcggcatcagagcagccgattgtctgttgtgcccagtcatagccgaatagcctctccacccaagcggccggagaacctgcgtgcaatccatcttgttcaatcatactccttcctttttcaatattattgaagcatttatcagggttattgtctcatgagcggatacatatttgaatgtatttagaaaaataaacaaataggggttccgcgcacatttccccgaaaagtgccacctgacgtctaagaaaccattattatcatgacattaacctataaaaataggcgtatcacgaggcagaatttcagataaaaaaaatccttagctttcgctaaggatgatttctggtggataaccgtattaccgcctttgagtgagctgataccgctcgccgcagccgaactaccgagcgcagcgagtcagtgagcgaggagcgactcctgcattaggaaattaatacgactcactataggggaattgtgagcggataacaattcccctgtagaaataactcgacgtggagatataccatgggtgaactgccgagtaggtagctgataacagtacagcgcggctgaaatcatcattaaagcggtgaactgccgagtaggtagctgataacggatccgaattcgagcgaaggagatatacatatgtttttgcaaagacctaaaccttacagcgatgaaagtttagaaagtttctttatccgagtggctaacaaaaatggctacggtgatgtccatcgcttcctagaagccactaaacgattccttcaagacattgaccataatggctatcaaacctttccgactgatataactcggataaacccatactcagctaaaaacagttccagcgcacgaactgcgtcattcctgaaacttgcacaattgacatttaatgaaccgccagagctacttgggttggcaattaacagaacaaacatgaaatactcgccgtcaactagcgcggttgttagaggtgcagaagtctttcctcgcagtttactacggacgcactccatcccctgctgtcctttgtgtctgcgagaaaatggctacgcctcctacctttggcactttcaggggtacgaatactgccacagccataacgtacctttaattaccacttgtagctgtggtaaggagtttgactaccgagtatctgggttaaagggcatttgctgcaaatgcaaggagcctatcaccttaaccagcagggagaacggtcatgaggcagcgtgtactgtttcaaactggcttgctggccatgaatctaaacctctgccaaatcttcctaaaagctaccgatggggtttagttcattggtggatgggtattaaagatagcgagttcgatcacttttcgttcgttcaatttttctcaaactggccaaggtcattccactcgataatcgaagatgaagtagagttcaaccttgagcatgctgttgtcagcacgtctgaattacgactaaaagatcttcttggtcgattgtttttcggttcaattcggttacctgagcggaatcttcaacacaatatcatccttggtgagcttctctgctatttagaaaatcgtttatggcaagacaagggattaatcgccaacctcaaaatgaacgcgttagaggcgactgtaatgttaaattgtagcctcgatcagattgcatcaatggttgaacaacgcatcttgaagccaaatcgaaaaagcaagcccaacagccctcttgatgttaccgattatctatttcatttcggcgatattttctgtctttggttagctgagttccaaagcgatgagtttaaccgttcgttttatgtgtcgaggtggtaaatgcaaactctgaaagaactaatcgcatccaatcctgacgacttaacaactgaacttaagagagcatttcgtccactcacaccgcatattgcaattgatggtaatgaacttgacgcactgacgatattagtcaatttaaccgataagactgatgatcagaaagacctgctcgatcgagccaaatgcaagcaaaaacttcgagatgaaaaatggtgggctagctgcataaattgcgttaattacagacaaagccataacccaaaattcccggatatacgttctgaaggcgtgattcgaacccaagccctgggtgaattaccgagtttcctactctcgtcctcaaaaatcccaccataccattggtcatatagccatgattcaaaatacgtcaacaaaagcgcattcctcaccaatgagttttgttgggatggtgagatctcatgtttgggtgagcttcttaaagatgcagatcacccactttggaatactttgaaaaagttaggttgttctcaaaaaacttgcaaagcaatggcaaaacaactagctgatattactctcacgactatcaatgtcacactcgcaccaaattacctgactcaaatatctctccccgatagtgatacatcctacatttcactctctcctgttgcatcgctatcgatgcaaagccactttcatcagaggctccaagatgaaaatcggcatagcgcgataacgcggtttagccgaactaccaacatgggggtcactgcgatgacatgtggcggcgcatttagaatgttaaagtctggcgctaagttttccagcccccctcatcaccgattaaacagtaaacgaagttggttgacgtcagagcatgttcagtcattaaaacagtaccagcgcctcaacaaaagcctcatacctgaaaactctcggattgcactccgtagaaaatacaaaatcgagcttcaaaatatggtcagatcttggtttgcaatgcaagaccatacccttgattcgaacatacttatccaacatttgaatcatgacctatcttacttaggagccacaaaacgttttgcatacgatccagcgatgaccaagctctttactgagcttttgaaacgagagttatcaaattcaatcaataatggtgagcaacacactaatggatcgtttttagtcctaccgaatatcagggtttgtggcgcaacagctttaagctccccggtaacggtggggattccatcacttacagctttctttggcttcgttcacgcatttgaacggaatataaatcgcaccacctcatcgtttcgtgttgaatcctttgcgatatgcgtccatcaactacatgtcgagaagcgaggtttgacagcagagtttgtggaaaaaggcgacgggactatatccgctcccgcgacccgggatgactggcagtgtgatgtcgtatttagccttattttgaacaccaactttgctcaacatattgaccaagatacgttagttacatcactaccaaagcgattggctcggggttcagcaaaaattgcgattgatgactttaaacatatcaactcattctcgacattagaaacagcgatcgaatctctgccaatagaagctggtaggtggttatcactttacgcacagtcaaacaataatctaagtgatctattagcagccatgacagaggaccatcagctcatggcaagctgcgtcggttaccacttgttagaagagcccaaagataaaccaaactccctcagaggttacaaacacgctatcgccgagtgcatcattggactcattaactcaatcacctttagctcagagactgatcccaacacaatcttttggtcgctaaagaactatcaaaactacctagtggtacagccaaggagtatcaacgatgaaactaccgacaaatctagcctatgagcgctctatcgacccatcagatgtctgtttttttgtcgtctggcccgatgatagaaaaacacctttaacctacaattctcgtactctgctcgggcaaatggaagcggcatcattagcctatgatgtctcaggtcaaccaataaaaagtgccaccgctgaggcgttagctcaagggaaccctcatcaagttgatttctgccacgttccatacggtgcgagtcatattgaatgcagtttctccgtctcgttttcttctgaactacgtcaaccatataagtgtaactcaagcaaagttaaacaaacgctagtgcaattagtcgagctctacgaaacgaaaatcggctggactgagctagcaacccgatatttgatgaacatttgcaacggtaaatggctgtggaaaaatacccgtaaagcctattgctggaacattgtacttacaccttggccttggaacggggaaaaggttggatttgaagatattcgtactaactacacctcacggcaagactttaaaaataataaaaattggtctgctatagttgaaatgatcaaaaccgcattttctagtactgatgggctggcgatatttgaagtcagggccaccttgcacttgccaacgaatgctatggtgcggccaagccaagttttcacagaaaaagaaagtggcagtaaaagtaaatctaaaactcaaaacagtcgagtttttcagagtacaactattgatggtgaacgatcgccaatactaggggcctttaaaacgggagcagctattgcaaccattgacgactggtatcctgaagccactgagccactaagggtcggacggtttggggttcatcgcgaagatgtcacttgctaccgtcatccgtctaccggaaaagattttttctcgatattacaacaagcagagcactatattgaagtgttgagcgccaacaaaactcccgctcaagaaactatcaacgacatgcactttttaatggctaacctgattaagggtgggatgttccagcataaaggagactgactgtgaaatggtattataagacaatcacctttctgccagagttgtgcaacaacgagtcactggctgcaaagtgtctccgcgttctgcatggatttaactatcagtatgagacacgaaatatcggcgtttcatttccgctttggtgtgatgcaacggttggaaaaaagatttcatttgtcagcaagaacaagatagaactcgacttactacttaaacaacactatttcgtccaaatggaacaacttcaatactttcatatatccaacactgttctcgtcccagaagattgtacatacgtttcctttagacgctgtcaatctatagataagctcacagcagcagggctggcaaggaaaatcagacgcctggagaaacgtgctctatctagaggcgagcaatttgacccatcatcttttgctcaaaaagagcatactgcaatagcgcactaccactcacttggggagtccagcaaacagacgaaccgcaactttcgactcaatatcaggatgctctcggagcaaccccgtgaggggaactcgatttttagtagctatggcttatcaaattcagaaaactcgtttcagcctgtacccttaatctgacctttaataaggagatataccatggcgacaagtttacctacgccctcagcaattacgacttcggcgttagagtatgcattccatactcccgctcgcaatctaacgaaatctcgcggaaaaaacattcatcgttatgtcagtgtaaagatgagtaagaggattacggtagaatctactctagagtgtgatgcctgctatcactttgattttgagccaagtattgttcgcttttgcgctcaaccgattcgatttttatattatctcaatggtcagtctcactcctatgttcctgactttctagttcaatttgataccaacgagtttgttctatatgaagtaaagtcagcttatgctaagaacaaacctgattttgatgttgaatgggaggcgaaagtaaaagcagcaactgaactagggctagaattggagcttgttgaagagagtgatattagggatacggttgtattaaataatcttaagcgcatgcatcgttatgcttcgaaagatgagctgaataacgtacataactctctcttaaaaataataaagtacaatggcgcccaatctgcaagatgcttgggagaacagttgggtttaaaaggccgaactgttttaccaattttgtgcgatttgctgtcaaggtgtttactcgatacacgtttggataagcctctatctcttgaatctcgatttgagttggccagttatggctaagaaagggttctcaagtttccatagaaaagcagtctcttcccaagatacgcttgaatcgatagagcttgtctctagcgctaattgtctagaaagtgttacgtatcaagatatatcagcatttcccgaaacaattgcggtagagattaatttccgattaagcattcttcgctttttagcgcgaaagtgcgaaaccattgtggccaaatcaattgaaccacatcgtgtagagctacagcaaaactatagtagaaaaatacccagtgcaataacgatatatcgatggtggcttgcttttcgaaaatcagactacaaccccattagcttagcacctaatatcaaggatagaggtaatagagagacaaaagtgtcaacagttgttgattctattatggaacaggcagttgaaagagttatatctggacgaaaagtcaatgttagctctgcatataaacgtgttcgacgaaaagttcgtcaatacaatctaactcatggaacgaaatacacgtatcctaagtacgaatctgtaagaaagcgagtaaaaaagaaaaccccatttgagttattagccgcagggaaaggggagagagtagctaagagagagtttcgccgaatgggaaaaaagatcctcacgtctagcgtgctagagagggttgaaatagatcacactgtcgttgacctttttgcagtacacgaagagtatcgaatcccattgggccgaccttggcttactcaattggttgattgttacagtaaagctgtaatcggtttttatttaggtttcgagcctcctagctatgtgtcggtttcccttgcacttaagaatgcaatacaacgcaaagatgacttaatctcctcgtatgaatcgatcgagaatgaatggctatgttatggcatcccagacctactcgtaactgataatggtaaagagtttttgtcgaaagcatttgatcaagcatgtgaatcactattgatcaatgtgcatcaaaataaagttgagacgcccgacaacaaacctcatgttgaacgtaactacgggactattaatacttctctgttagacgatttacctgggaaatccttcagccagtaccttcaaagagaagggtacgactctgtgggagaagctacccttacactcaatgagattagagaaatttacttaatttggttggtggatatttatcataaaaaacccaatcagagaggcactaattgtcctaatgttgcgtggaaaaagggttgtcaagaatgggaaccagaggagttctctggttctaaagacgaattagactttaaatttgctattgttgattacaaacaacttactaaagtagggataactgtctacaaagaactgagttatagcaatgaccgtttagctgaatatagagggaagaaaggaaaccataaagttcagttcaagtataaccctgagtgtatggcagttatttgggtgttggatgaggatatgaatgagtactttacagttaatgcgattgactacgaatatgcaagtagagtatcactttggcaacataaatataacatgaaatatcaagcagaactaaattcagcagaatatgatgaggacaaggaaattgatgcagaaataaaaattgaagaaatcgcagatcgttcaattgttaagactaacaaaatcagagctcggaggcgtggcgctaggcatcaagagaatagcgcaagggctaagtcaatcagtaatgcgaacccggcctcgatacaaaaacatgaagatgaaatcgttagtgcagataatgacgattgggatattgattatgtctgagaaatcgtcaaatgagtgaaacgcgtgaggctcgtatatcaagagctaaaagggcatttgtatccacaccgagcgttaggaaaatcttgagttacatggatagatgtagagatctatcagacctagagtctgagcctacatgcatgatggtctatggtgcttcgggtgtaggtaaaacgaccgtcatcaagaaatacttaaatcaaaacagaagagagtccgaagccgggggcgatataataccggttttgcatattgagttgccagacaatgcgaagccagtagatgcagcaagggaattgctggttgaaatgggtgacccgctagcactttatgaaactgacttagctagattgacgaaaagactgactgaattaatccctgcggtcggcgtgaagctgattattatcgatgagttccaacatttggtggaagaaaggtcaaatcgggttcttacccaagtaggtaattggctaaaaatgatacttaacaaaacgaaatgtccaattgttatatttggtatgccatactcaaaagttgtactgcaagcaaactcgcaacttcacgggcgattttccattcaggttgaactgcgcccctttagctaccagggaggtagaggtgtatttaaaacttttttggaataccttgataaagccctaccttttgaaaaacaggctggcttagccaacgaaagtttgcagaaaaaattgtatgcattctctcagggaaacatgcgttcgttgagaaaccttatttatcaagcatctatcgaagcaattgataatcagcatgagacgataaccgaagaagatttcgtttttgcatcgaagttgacatcgggcgataaacccaactcatggaaaaatccttttgaggagggtgttgaggtaacagaagatatgttacgaccgccaccaaaagatattggttgggaggactatttgagacattcaaccccgagagtgagtaaaccaggtagaaataaaaactttttcgaataacctaggctgctgcgctgctgccaccgctgagcaataactagcataaccccttggggcctctaaacgggtcttgaggggttttttgctgaaacctcaggcatttgttgttgatacaaccataaaatgataattacacccataaattgataattatcacacccataaattgatattgcctcttcatggtctaaacttcagtaagtttacgacattttcctcgaggtcatttccggggatccatggagaaaaaaatcactggatataccaccgttgatatatcccaatggcatcgtaaagaacattttgaggcatttcagtcagttgctcaatgtacctataaccagaccgttcagctggatattacggcctttttaaagaccgtaaagaaaaataagcacaagttttatccggcctttattcacattcttgcccgcctgatgaatgctcatccggagttccgtatggcaatgaaagacggtgagctggtgatatgggatagtgttcacccttgttacaccgttttccatgagcaaactgaaacgttttcatcgctctggagtgaataccacgacgatttccggcagtttctacacatatattcgcaagatgtggcgtgttacggtgaaaacctggcctatttccctaaagggtttattgagaatatgtttttcgtctcagccaatccctgggtgagtttcaccagttttgatttaaacgtggccaatatggacaacttcttcgcccccgttttcactatgggcaaatattatacgcaaggcgacaaggtgctgatgccgctggcgattcaggttcatcatgccgtttgtgatggcttccatgtcggcagaatgcttaatgaattacaacagtactgcgatgagtggcagggcggggcgtaatttttttaaggcagttattggtgcccttctagagtccttactgcagtagttttgctgaaatactcgattcacaaaaatatcaacttatggttgttttgtgagatatcaatatatggttgttttgtggttaagttgctgattataaataattattaaatatcactttatggttgcatcaacaggtaccgagctcgaattcactggccgtcgttttacaacgtcgtgactgggaaaaccctggcgttacccaacttaatcgccttgcgtataatctagtagctgcggaatcgacgttttagagctagaaatagcaagttaaaataaggctagtccgttatcaacttgaaaaagtggcaccgagtcggtgctttttttataaaacgaaaggctcagtcgaaagactgggcctttcgttttatccgaatacgggttcttgcatgttacattgtcgatctgttcatggtgaacagctttgaatgcaccaaaaactcgtaaaagctctgatgtatctatcttttttacaccgttttcatctgtgcatatggacagttttccctttgatatgtaacggtgaacagttgttctacttttgtttgttagtcttgatgcttcactgatagatacaagagccataagaacctcagatccttccgtatttagccagtatgttctctagtgtggttcgttgtttttgcgtgagccatgagaacgaaccattgagatcatgcttactttgcatgtcactcaaaaattttgcctcaaaactggtgagctgaatttttgcagttaaagcatcgtgtagtgtttttcttagtccgttacgtaggtaggaatctgatgtaatggttgttggtattttgtcaccattcatttttatctggttgttctcaagttcggttacgagatccatttgtctatctagttcaacttggaaaatcaacgtatcagtcgggcggcctcgcttatcaaccaccaatttcatattgctgtaagtgtttaaatctttacttattggtttcaaaacccattggttaagccttttaaactcatggtagttattttcaagcattaacatgaacttaaattcatcaaggctaatctctatatttgccttgtgagttttcttttgtgttagttcttttaataaccactcataaatcctcatagagtatttgttttcaaaagacttaacatgttccagattatattttatgaatttttttaactggaaaagataaggcaatatctcttcactaaaaactaattctaatttttcgcttgagaacttggcatagtttgtccactggaaaatctcaaagcctttaaccaaaggattcctgatttccacagttctcgtcatcagctctctggttgctttagctaatacaccataagcattttccctactgatgttcatcatctgagcgtattggttataagtgaacgataccgtccgttctttccttgtagggttttcaatcgtggggttgagtagtgccacacagcataaaattagcttggtttcatgctccgttaagtcatagcgactaatcgctagttcatttgctttgaaaacaactaattcagacatacatctcaattggtctaggtgattttaatcactataccaattgagatgggctagtcaatgataattactagtccttttcccgggagatctgggtatctgtaaattctgctagacctttgctggaaaacttgtaaattctgctagaccctctgtaaattccgctagacctttgtgtgttttttttgtttatattcaagtggttataatttatagaataaagaaagaataaaaaaagataaaaagaatagatcccagccctgtgtataactcactactttagtcagttccgcagtattacaaaaggatgtcgcaaacgctgtttgctcctctacaaaacagaccttaaaaccctaaaggcttaagtagcaccctcgcaagctcgggcaaatcgctgaatattccttttgtctccgaccatcaggcacctgagtcgctgtctttttcgtgacattcagttcgctgcgctcacggctctggcagtgaatgggggtaaatggcactacaggcgccttttatggattcatgcaaggaaactacccataatacaagaaaagcccgtcacgggcttctcagggcgttttatggcgggtctgctatgtggtgctatctgactttttgctgttcagcagttcctgccctctgattttccagtctgaccacttcggattatcccgtgacaggtcattcagactggctaatgcacccagtaaggcagcggtatcatcaacaggcttacccgtcttactgtccctagtgcttggattctcaccaataaaaaacgcccggcggcaaccgagcgttctgaacaaatccagatggagttctgaggtcattactggatctatcaacaggagtccaagcgagctctcgaaccccagagtccc

SEQ ID NO: 1753 - DNA, 14340 bp, Synthetic construct
  source 1..14340: mol_type = other DNA
cacaacagacaatcggctgctctgatgccgccgtgttccggctgtcagcgcaggggcgcccggttctttttgtcaagaccgacctgtccggtgccctgaatgaactgcaagacgaggcagcgcggctatcgtggctggccacgacgggcgttccttgcgcagctgtgctcgacgttgtcactgaagcgggaagggactggctgctattgggcgaagtgccggggcaggatctcctgtcatctcaccttgctcctgccgagaaagtatccatcatggctgatgcaatgcggcggctgcatacgcttgatccggctacctgcccattcgaccaccaagcgaaacatcgcatcgagcgagcacgtactcggatggaagccggtcttgtcgatcaggatgatctggacgaagagcatcaggggctcgcgccagccgaactgttcgccaggctcaaggcgcgcatgcccgacggcgaggatctcgtcgtgacccatggcgatgcctgcttgccgaatatcatggtggaaaatggccgcttttctggattcatcgactgtggccggctgggtgtggcggaccgctatcaggacatagcgttggctacccgtgatattgctgaagagcttggcggcgaatgggctgaccgcttcctcgtgctttacggtatcgccgctcccgattcgcagcgcatcgccttctatcgccttcttgacgagttcttctgagcgggactctggggttcgaaatgaccgaccaagcgacgcccaacctgccatcacgagatttcgattccaccgccgccttctatgaaaggttgggcttcggaatcgttttccgggacgccggctggatgatcctccagcgcggggatctcatgctggagttcttcgcccacccccatgggcaaatattatacgcaaggcgacaaggtgctgatgccgctggcgattcaggttcatcatgccgtttgtgatggcttccatgtcggcagaatgcttaatgaattacaacagtttttatgcatgcgcccaatacgcaaaccgcctctccccgcgcgttggccgattcattaatgcagctggcacgacaggtttcccgactggtggataaccgtattaccgcctttgagtgagctgataccgctcgccgcagccgaactaccgagcgcagcgagtcagtgagcgaggagcgactcctgcattaggaaattaatacgactcactataggggaattgtgagcggataacaattcccctgtagaaataattttgtttaactttaataaggagatataccatgggtgaactgccgagtaggtagctgataacagtacagcgcggctgaaatcatcattaaagcggtgaactgccgagtaggtagctgataacggatccgaattcgagcgaaggagatatacatatgtttttgcaaagacctaaaccttacagcgatgaaagtttagaaagtttctttatccgagtggctaacaaaaatggctacggtgatgtccatcgcttcctagaagccactaaacgattccttcaagacattgaccataatggctatcaaacctttccgactgatataactcggataaacccatactcagctaaaaacagttccagcgcacgaactgcgtcattcctgaaacttgcacaattgacatttaatgaaccgccagagctacttgggttggcaattaacagaacaaacatgaaatactcgccgtcaactagcgcggttgttagaggtgcagaagtctttcctcgcagtttactacggacgcactccatcccctgctgtcctttgtgtctgcgagaaaatggctacgcctcctacctttggcactttcaggggtacgaatactgccacagccataacgtacctttaattaccacttgtagctgtggtaaggagtttgactaccgagtatctgggttaaagggcatttgctgcaaatgcaaggagcctatcaccttaaccagcagggagaacggtcatgaggcagcgtgtactgtttcaaactggcttgctggccatgaatctaaacctctgccaaatcttcctaaaagctaccgatggggtttagttcattggtggatgggtattaaagatagcgagttcgatcacttttcgttcgttcaatttttctcaaactggccaaggtcattccactcgataatcgaagatgaagtagagttcaaccttgagcatgctgttgtcagcacgtctgaattacgactaaaagatcttcttggtcgattgtttttcggttcaattcggttacctgagcggaatcttcaacacaatatcatccttggtgagcttctctgctatttagaaaatcgtttatggcaagacaagggattaatcgccaacctcaaaatgaacgcgttagaggcgactgtaatgttaaattgtagcctcgatcagattgcatcaatggttgaacaacgcatcttgaagccaaatcgaaaaagcaagcccaacagccctcttgatgttaccgattatctatttcatttcggcgatattttctgtctttggttagctgagttccaaagcgatgagtttaaccgttcgttttatgtgtcgaggtggtaaatgcaaactctgaaagaactaatcgcatccaatcctgacgacttaacaactgaacttaagagagcatttcgtccactcacaccgcatattgcaattgatggtaatgaacttgacgcactgacgatattagtcaatttaaccgataagactgatgatcagaaagacctgctcgatcgagccaaatgcaagcaaaaacttcgagatgaaaaatggtgggctagctgcataaattgcgttaattacagacaaagccataacccaaaattcccggatatacgttctgaaggcgtgattcgaacccaagccctgggtgaattaccgagtttcctactctcgtcctcaaaaatcccaccataccattggtcatatagccatgattcaaaatacgtcaacaaaagcgcattcctcaccaatgagttttgttgggatggtgagatctcatgtttgggtgagcttcttaaagatgcagatcacccactttggaatactttgaaaaagttaggttgttctcaaaaaacttgcaaagcaatggcaaaacaactagctgatattactctcacgactatcaatgtcacactcgcaccaaattacctgactcaaatatctctccccgatagtgatacatcctacatttcactctctcctgttgcatcgctatcgatgcaaagccactttcatcagaggctccaagatgaaaatcggcatagcgcgataacgcggtttagccgaactaccaacatgggggtcactgcgatgacatgtggcggcgcatttagaatgttaaagtctggcgctaagttttccagcccccctcatcaccgattaaacagtaaacgaagttggttgacgtcagagcatgttcagtcattaaaacagtaccagcgcctcaacaaaagcctcatacctgaaaactctcggattgcactccgtagaaaatacaaaatcgagcttcaaaatatggtcagatcttggtttgcaatgcaagaccatacccttgattcgaacatacttatccaacatttgaatcatgacctatcttacttaggagccacaaaacgttttgcatacgatccagcgatgaccaagctctttactgagcttttgaaacgagagttatcaaattcaatcaataatggtgagcaacacactaatggatcgtttttagtcctaccgaatatcagggtttgtggcgcaacagctttaagctccccggtaacggtggggattccatcacttacagctttctttggcttcgttcacgcatttgaacggaatataaatcgcaccacctcatcgtttcgtgttgaatcctttgcgatatgcgtccatcaactacatgtcgagaagcgaggtttgacagcagagtttgtggaaaaaggcgacgggactatatccgctcccgcgacccgggatgactggcagtgtgatgtcgtatttagccttattttgaacaccaactttgctcaacatattgaccaagatacgttagttacatcactaccaaagcgattggctcggggttcagcaaaaattgcgattgatgactttaaacatatcaactcattctcgacattagaaacagcgatcgaatctctgccaatagaagctggtaggtggttatcactttacgcacagtcaaacaataatctaagtgatctattagcagccatgacagaggaccatcagctcatggcaagctgcgtcggttaccacttgttagaagagcccaaagataaaccaaactccctcagaggttacaaacacgctatcgccgagtgcatcattggactcattaactcaatcacctttagctcagagactgatcccaacacaatcttttggtcgctaaagaactatcaaaactacctagtggtacagccaaggagtatcaacgatgaaactaccgacaaatctagcctatgagcgctctatcgacccatcagatgtctgtttttttgtcgtctggcccgatgatagaaaaacacctttaacctacaattctcgtactctgctcgggcaaatggaagcggcatcattagcctatgatgtctcaggtcaaccaataaaaagtgccaccgctgaggcgttagctcaagggaaccctcatcaagttgatttctgccacgttccatacggtgcgagtcatattgaatgcagtttctccgtctcgttttcttctgaactacgtcaaccatataagtgtaactcaagcaaagttaaacaaacgctagtgcaattagtcgagctctacgaaacgaaaatcggctggactgagctagcaacccgatatttgatgaacatttgcaacggtaaatggctgtggaaaaatacccgtaaagcctattgctggaacattgtacttacaccttggccttggaacggggaaaaggttggatttgaagatattcgtactaactacacctcacggcaagactttaaaaataataaaaattggtctgctatagttgaaatgatcaaaaccgcattttctagtactgatgggctggcgatatttgaagtcagggccaccttgcacttgccaacgaatgctatggtgcggccaagccaagttttcacagaaaaagaaagtggcagtaaaagtaaatctaaaactcaaaacagtcgagtttttcagagtacaactattgatggtgaacgatcgccaatactaggggcctttaaaacgggagcagctattgcaaccattgacgactggtatcctgaagccactgagccactaagggtcggacggtttggggttcatcgcgaagatgtcacttgctaccgtcatccgtctaccggaaaagattttttctcgatattacaacaagcagagcactatattgaagtgttgagcgccaacaaaactcccgctcaagaaactatcaacgacatgcactttttaatggctaacctgattaagggtgggatgttccagcataaaggagactgactgtgaaatggtattataagacaatcacctttctgccagagttgtgcaacaacgagtcactggctgcaaagtgtctccgcgttctgcatggatttaactatcagtatgagacacgaaatatcggcgtttcatttccgctttggtgtgatgcaacggttggaaaaaagatttcatttgtcagcaagaacaagatagaactcgacttactacttaaacaacactatttcgtccaaatggaacaacttcaatactttcatatatccaacactgttctcgtcccagaagattgtacatacgtttcctttagacgctgtcaatctatagataagctcacagcagcagggctggcaaggaaaatcagacgcctggagaaacgtgctctatctagaggcgagcaatttgacccatcatcttttgctcaaaaagagcatactgcaatagcgcactaccactcacttggggagtccagcaaacagacgaaccgcaactttcgactcaatatcaggatgctctcggagcaaccccgtgaggggaactcgatttttagtagctatggcttatcaaattcagaaaactcgtttcagcctgtacccttaatctgacctttaataaggagatataccatggcgacaagtttacctacgccctcagcaattacgacttcggcgttagagtatgcattccatactcccgctcgcaatctaacgaaatctcgcggaaaaaacattcatcgttatgtcagtgtaaagatgagtaagaggattacggtagaatctactctagagtgtgatgcctgctatcactttgattttgagccaagtattgttcgcttttgcgctcaaccgattcgatttttatattatctcaatggtcagtctcactcctatgttcctgactttctagttcaatttgataccaacgagtttgttctatatgaagtaaagtcagcttatgctaagaacaaacctgattttgatgttgaatgggaggcgaaagtaaaagcagcaactgaactagggctagaattggagcttgttgaagagagtgatattagggatacggttgtattaaataatcttaagcgcatgcatcgttatgcttcgaaagatgagctgaataacgtacataactctctcttaaaaataataaagtacaatggcgcccaatctgcaagatgcttgggagaacagttgggtttaaaaggccgaactgttttaccaattttgtgcgatttgctgtcaaggtgtttactcgatacacgtttggataagcctctatctcttgaatctcgatttgagttggccagttatggctaagaaagggttctcaagtttccatagaaaagcagtctcttcccaagatacgcttgaatcgatagagcttgtctctagcgctaattgtctagaaagtgttacgtatcaagatatatcagcatttcccgaaacaattgcggtagagattaatttccgattaagcattcttcgctttttagcgcgaaagtgcgaaaccattgtggccaaatcaattgaaccacatcgtgtagagctacagcaaaactatagtagaaaaatacccagtgcaataacgatatatcgatggtggcttgcttttcgaaaatcagactacaaccccattagcttagcacctaatatcaaggatagaggtaatagagagacaaaagtgtcaacagttgttgattctattatggaacaggcagttgaaagagttatatctggacgaaaagtcaatgttagctctgcatataaacgtgttcgacgaaaagttcgtcaatacaatctaactcatggaacgaaatacacgtatcctaagtacgaatctgtaagaaagcgagtaaaaaagaaaaccccatttgagttattagccgcagggaaaggggagagagtagctaagagagagtttcgccgaatgggaaaaaagatcctcacgtctagcgtgctagagagggttgaaatagatcacactgtcgttgacctttttgcagtacacgaagagtatcgaatcccattgggccgaccttggcttactcaattggttgattgttacagtaaagctgtaatcggtttttatttaggtttcgagcctcctagctatgtgtcggtttcccttgcacttaagaatgcaatacaacgcaaagatgacttaatctcctcgtatgaatcgatcgagaatgaatggctatgttatggcatcccagacctactcgtaactgataatggtaaagagtttttgtcgaaagcatttgatcaagcatgtgaatcactattgatcaatgtgcatcaaaataaagttgagacgcccgacaacaaacctcatgttgaacgtaactacgggactattaatacttctctgttagacgatttacctgggaaatccttcagccagtaccttcaaagagaagggtacgactctgtgggagaagctacccttacactcaatgagattagagaaatttacttaatttggttggtggatatttatcataaaaaacccaatcagagaggcactaattgtcctaatgttgcgtggaaaaagggttgtcaagaatgggaaccagaggagttctctggttctaaagacgaattagactttaaatttgctattgttgattacaaacaacttactaaagtagggataactgtctacaaagaactgagttatagcaatgaccgtttagctgaatatagagggaagaaaggaaaccataaagttcagttcaagtataaccctgagtgtatggcagttatttgggtgttggatgaggatatgaatgagtactttacagttaatgcgattgactacgaatatgcaagtagagtatcactttggcaacataaatataacatgaaatatcaagcagaactaaattcagcagaatatgatgaggacaaggaaattgatgcagaaataaaaattgaagaaatcgcagatcgttcaattgttaagactaacaaaatcagagctcggaggcgtggcgctaggcatcaagagaatagcgcaagggctaagtcaatcagtaatgcgaacccggcctcgatacaaaaacatgaagatgaaatcgttagtgcagataatgacgattgggatattgattatgtctgagaaatcgtcaaatgagtgaaacgcgtgaggctcgtatatcaagagctaaaagggcatttgtatccacaccgagcgttaggaaaatcttgagttacatggatagatgtagagatctatcagacctagagtctgagcctacatgcatgatggtctatggtgcttcgggtgtaggtaaaacgaccgtcatcaagaaatacttaaatcaaaacagaagagagtccgaagccgggggcgatataataccggttttgcatattgagttgccagacaatgcgaagccagtagatgcagcaagggaattgctggttgaaatgggtgacccgctagcactttatgaaactgacttagctagattgacgaaaagactgactgaattaatccctgcggtcggcgtgaagctgattattatcgatgagttccaacatttggtggaagaaaggtcaaatcgggttcttacccaagtaggtaattggctaaaaatgatacttaacaaaacgaaatgtccaattgttatatttggtatgccatactcaaaagttgtactgcaagcaaactcgcaacttcacgggcgattttccattcaggttgaactgcgcccctttagctaccagggaggtagaggtgtatttaaaacttttttggaataccttgataaagccctaccttttgaaaaacaggctggcttagccaacgaaagtttgcagaaaaaattgtatgcattctctcagggaaacatgcgttcgttgagaaaccttatttatcaagcatctatcgaagcaattgataatcagcatgagacgataaccgaagaagatttcgtttttgcatcgaagttgacatcgggcgataaacccaactcatggaaaaatccttttgaggagggtgttgaggtaacagaagatatgttacgaccgccaccaaaagatattggttgggaggactatttgagacattcaaccccgagagtgagtaaaccaggtagaaataaaaactttttcgaataacctaggctgctgcgctgctgccaccgctgagcaataactagcataaccccttggggcctctaaacgggtcttgaggggttttttgctgaaacctcaggcatttgttgttgatacaaccataaaatgataattacacccataaattgataattatcacacccataaattgatattgcctcttcatggtctaaacttcagtaagtttacgacattttcctcgaggtcatttccggggatccatggagaaaaaaatcactggatataccaccgttgatatatcccaatggcatcgtaaagaacattttgaggcatttcagtcagttgctcaatgtacctataaccagaccgttcagctggatattacggcctttttaaagaccgtaaagaaaaataagcacaagttttatccggcctttattcacattcttgcccgcctgatgaatgctcatccggagttccgtatggcaatgaaagacggtgagctggtgatatgggatagtgttcacccttgttacaccgttttccatgagcaaactgaaacgttttcatcgctctggagtgaataccacgacgatttccggcagtttctacacatatattcgcaagatgtggcgtgttacggtgaaaacctggcctatttccctaaagggtttattgagaatatgtttttcgtctcagccaatccctgggtgagtttcaccagttttgatttaaacgtggccaatatggacaacttcttcgcccccgttttcactatgggcaaatattatacgcaaggcgacaaggtgctgatgccgctggcgattcaggttcatcatgccgtttgtgatggcttccatgtcggcagaatgcttaatgaattacaacagtactgcgatgagtggcagggcggggcgtaatttttttaaggcagttattggtgcccttctagagtccttactgcagtagttttgctgaaatactcgattcacaaaaatatcaacttatggttgttttgtgagatatcaatatatggttgttttgtggttaagttgctgattataaataattattaaatatcactttatggttgcatcaacaggtaccgagctcgaattcactggccgtcgttttacaacgtcgtgactgggaaaaccctggcgttacccaacttaatcgccttgccattttttaaccaataggccgtactgcgatgagtggcagggcggggcgtaatttttttaaggcagttattggtgcccttaaacgcctggttgctacgcctgaataagtgataataagcggatgaatggcagaaattcgaaagcaaattcgacccggtcgtcggttcagggcagggtcgttaaatagccgcttatgtctattgctggtttaccggtttattgactaccggaagcagtgtgaccgtgtgcttctcaaatgcctgaggccagtttgctcaggctctccccgtggaggtaataattgacgatatgatcatttattctgcctcccagagcctgataaaaacggtgaatccgttagcgaggtgccgccggcttccattcaggtcgaggtggcccggctccatgcaccgcgacgcaacgcggggaggcagacaaggtatagggcggcgaggcggctacagccgatagtctggaacagcgcacttacgggttgctgcgcaacccaagtgctaccggcgcggcagcgtgacccgtgtcggcggctccaacggctcgccatcgtccagaaaacacggctcatcgggcatcggcaggcgctgctgcccgcgccgttcccattcctccgtttcggtcaaggctggcaggtctggttccatgcccggaatgccgggctggctgggcggctcctcgccggggccggtcggtagttgctgctcgcccggatacagggtcgggatgcggcgcaggtcgccatgccccaacagcgattcgtcctggtcgtcgtgatcaaccaccacggcggcactgaacaccgacaggcgcaactggtcgcggggctggccccacgccacgcggtcattgaccacgtaggccgacacggtgccggggccgttgagcttcacgacggagatccagcgctcggccaccaagtccttgactgcgtattggaccgtccgcaaagaacgtccgatgagcttggaaagtgtcttctggctgaccaccacggcgttctggtggcccatctgcgccacgaggtgatgcagcagcattgccgccgtgggtttcctcgcaataagcccggcccacgcctcatgcgctttgcgttccgtttgcacccagtgaccgggcttgttcttggcttgaatgccgatttctctggactgcgtggccatgcttatctccatgcggtaggggtgccgcacggttgcggcaccatgcgcaatcagctgcaacttttcggcagcgcgacaacaattatgcgttgcgtaaaagtggcagtcaattacagattttctttaacctacgcaatgagctattgcggggggtgccgcaatgagctgttgcgtaccccccttttttaagttgttgatttttaagtctttcgcatttcgccctatatctagttctttggtgcccaaagaagggcacccctgcggggttcccccacgccttcggcgcggctccccctccggcaaaaagtggcccctccggggcttgttgatcgactgcgcggccttcggccttgcccaaggtggcgctgcccccttggaacccccgcactcgccgccgtgaggctcggggggcaggcgggcgggcttcgcccttcgactgcccccactcgcataggcttgggtcgttccaggcgcgtcaaggccaagccgctgcgcggtcgctgcgcgagccttgacccgccttccacttggtgtccaaccggcaagcgaagcgcgcaggccgcaggccggaggcttttccccagagaaaattaaaaaaattgatggggcaaggccgcaggccgcgcagttggagccggtgggtatgtggtcgaaggctgggtagccggtgggcaatccctgtggtcaagctcgtgggcaggcgcagcctgtccatcagcttgtccagcagggttgtccacgggccgagcgaagcgagccagccggtggccgctcgcggccatcgtccacatatccacgggctggcaagggagcgcagcgaccgcgcagggcgaagcccggagagcaagcccgtagggcgccgcagccgccgtaggcggtcacgactttgcgaagcaaagtctagtgagtatactcaagcattgagtggcccgccggaggcaccgccttgcgctgcccccgtcgagccggttggacaccaaaagggaggggcaggcatggcggcatacgcgatcatgcgatgcaagaagctggcgaaaatgggcaacgtggcggccagtctcaagcacgcctaccgcgagcgcgagacgcccaacgctgacgccagcaggacgccagagaacgagcactgggcggccagcagcaccgatgaagcgatgggccgactgcgcgagttgctgccagagaagcggcgcaaggacgctgtgttggcggtcgagtacgtcatgacggccagcccggaatggtggaagtcggccagccaagaacagcaggcggcgttcttcgagaaggcgcacaagtggctggcggacaagtacggggcggatcgcatcgtgacggccagcatccaccgtgacgaaaccagcccgcacatgaccgcgttcgtggtgccgctgacgcaggacggcaggctgtcggccaaggagttcatcggcaacaaagcgcagatgacccgcgaccagaccacgtttgcggccgctgtggccgatctagggctgcaacggggcatcgagggcagcaaggcacgtcacacgcgcattcaggcgttctacgaggccctggagcggccaccagtgggccacgtcaccatcagcccgcaagcggtcgagccacgcgcctatgcaccgcagggattggccgaaaagctgggaatctcaaagcgcgttgagacgccggaagccgtggccgaccggctgacaaaagcggttcggcaggggtatgagcctgccctacaggccgccgcaggagcgcgtgagatgcgcaagaaggccgatcaagcccaagagacggcccgagaccttcgggagcgcctgaagcccgttctggacgccctggggccgttgaatcgggatatgcaggccaaggccgccgcgatcatcaaggccgtgggcgaaaagctgctgacggaacagcgggaagtccagcgccagaaacaggcccagcgccagcaggaacgcgggcgcgcacatttccccgaaaagtgccacctgggatgaatgtcagctactgggctatctggacaagggaaaacgcaagcgcaaagagaaagcaggtagcttgcagtgggcttacatggcgatagctagactgggcggttttatggacagcaagcgaaccggaattgccagctggggcgccctctggtaaggttgggaagccctgcaaagtaaactggatggctttcttgccgccaaggatctgatggcgcaggggatcaagatctgatcaagagacaggatgaggatcgtttcgcatgattgaacaagatggattgcacgcaggttctccggccgcttgggtggagaggctattcggctatgactggg

SEQ ID NO: 1754 - DNA, 12747 bp, Synthetic construct
  source 1..12747: mol_type = other DNA
tttctgccagagttgtgcaacaacgagtcactggctgcaaagtgtctccgcgttctgcatggatttaactatcagtatgagacacgaaatatcggcgtttcatttccgctttggtgtgatgcaacggttggaaaaaagatttcatttgtcagcaagaacaagatagaactcgacttactacttaaacaacactatttcgtccaaatggaacaacttcaatactttcatatatccaacactgttctcgtcccagaagattgtacatacgtttcctttagacgctgtcaatctatagataagctcacagcagcagggctggcaaggaaaatcagacgcctggagaaacgtgctctatctagaggcgagcaatttgacccatcatcttttgctcaaaaagagcatactgcaatagcgcactaccactcacttggggagtccagcaaacagacgaaccgcaactttcgactcaatatcaggatgctctcggagcaaccccgtgaggggaactcgatttttagtagctatggcttatcaaattcagaaaactcgtttcagcctgtacccttaatctgacctttaataaggagatataccatggcgacaagtttacctacgccctcagcaattacgacttcggcgttagagtatgcattccatactcccgctcgcaatctaacgaaatctcgcggaaaaaacattcatcgttatgtcagtgtaaagatgagtaagaggattacggtagaatctactctagagtgtgatgcctgctatcactttgattttgagccaagtattgttcgcttttgcgctcaaccgattcgatttttatattatctcaatggtcagtctcactcctatgttcctgactttctagttcaatttgataccaacgagtttgttctatatgaagtaaagtcagcttatgctaagaacaaacctgattttgatgttgaatgggaggcgaaagtaaaagcagcaactgaactagggctagaattggagcttgttgaagagagtgatattagggatacggttgtattaaataatcttaagcgcatgcatcgttatgcttcgaaagatgagctgaataacgtacataactctctcttaaaaataataaagtacaatggcgcccaatctgcaagatgcttgggagaacagttgggtttaaaaggccgaactgttttaccaattttgtgcgatttgctgtcaaggtgtttactcgatacacgtttggataagcctctatctcttgaatctcgatttgagttggccagttatggctaagaaagggttctcaagtttccatagaaaagcagtctcttcccaagatacgcttgaatcgatagagcttgtctctagcgctaattgtctagaaagtgttacgtatcaagatatatcagcatttcccgaaacaattgcggtagagattaatttccgattaagcattcttcgctttttagcgcgaaagtgcgaaaccattgtggccaaatcaattgaaccacatcgtgtagagctacagcaaaactatagtagaaaaatacccagtgcaataacgatatatcgatggtggcttgcttttcgaaaatcagactacaaccccattagcttagcacctaatatcaaggatagaggtaatagagagacaaaagtgtcaacagttgttgattctattatggaacaggcagttgaaagagttatatctggacgaaaagtcaatgttagctctgcatataaacgtgttcgacgaaaagttcgtcaatacaatctaactcatggaacgaaatacacgtatcctaagtacgaatctgtaagaaagcgagtaaaaaagaaaaccccatttgagttattagccgcagggaaaggggagagagtagctaagagagagtttcgccgaatgggaaaaaagatcctcacgtctagcgtgctagagagggttgaaatagatcacactgtcgttgacctttttgcagtacacgaagagtatcgaatcccattgggccgaccttggcttactcaattggttgattgttacagtaaagctgtaatcggtttttatttaggtttcgagcctcctagctatgtgtcggtttcccttgcacttaagaatgcaatacaacgcaaagatgacttaatctcctcgtatgaatcgatcgagaatgaatggctatgttatggcatcccagacctactcgtaactgataatggtaaagagtttttgtcgaaagcatttgatcaagcatgtgaatcactattgatcaatgtgcatcaaaataaagttgagacgcccgacaacaaacctcatgttgaacgtaactacgggactattaatacttctctgttagacgatttacctgggaaatccttcagccagtaccttcaaagagaagggtacgactctgtgggagaagctacccttacactcaatgagattagagaaatttacttaatttggttggtggatatttatcataaaaaacccaatcagagaggcactaattgtcctaatgttgcgtggaaaaagggttgtcaagaatgggaaccagaggagttctctggttctaaagacgaattagactttaaatttgctattgttgattacaaacaacttactaaagtagggataactgtctacaaagaactgagttatagcaatgaccgtttagctgaatatagagggaagaaaggaaaccataaagttcagttcaagtataaccctgagtgtatggcagttatttgggtgttggatgaggatatgaatgagtactttacagttaatgcgattgactacgaatatgcaagtagagtatcactttggcaacataaatataacatgaaatatcaagcagaactaaattcagcagaatatgatgaggacaaggaaattgatgcagaaataaaaattgaagaaatcgcagatcgttcaattgttaagactaacaaaatcagagctcggaggcgtggcgctaggcatcaagagaatagcgcaagggctaagtcaatcagtaatgcgaacccggcctcgatacaaaaacatgaagatgaaatcgttagtgcagataatgacgattgggatattgattatgtctgagaaatcgtcaaatgagtgaaacgcgtgaggctcgtatatcaagagctaaaagggcatttgtatccacaccgagcgttaggaaaatcttgagttacatggatagatgtagagatctatcagacctagagtctgagcctacatgcatgatggtctatggtgcttcgggtgtaggtaaaacgaccgtcatcaagaaatacttaaatcaaaacagaagagagtccgaagccgggggcgatataataccggttttgcatattgagttgccagacaatgcgaagccagtagatgcagcaagggaattgctggttgaaatgggtgacccgctagcactttatgaaactgacttagctagattgacgaaaagactgactgaattaatccctgcggtcggcgtgaagctgattattatcgatgagttccaacatttggtggaagaaaggtcaaatcgggttcttacccaagtaggtaattggctaaaaatgatacttaacaaaacgaaatgtccaattgttatatttggtatgccatactcaaaagttgtactgcaagcaaactcgcaacttcacgggcgattttccattcaggttgaactgcgcccctttagctaccagggaggtagaggtgtatttaaaacttttttggaataccttgataaagccctaccttttgaaaaacaggctggcttagccaacgaaagtttgcagaaaaaattgtatgcattctctcagggaaacatgcgttcgttgagaaaccttatttatcaagcatctatcgaagcaattgataatcagcatgagacgataaccgaagaagatttcgtttttgcatcgaagttgacatcgggcgataaacccaactcatggaaaaatccttttgaggagggtgttgaggtaacagaagatatgttacgaccgccaccaaaagatattggttgggaggactatttgagacattcaaccccgagagtgagtaaaccaggtagaaataaaaactttttcgaataacctaggctgctgcgctgctgccaccgctgagcaataactagcataaccccttggggcctctaaacgggtcttgaggggttttttgctgaaacctcaggcatttgttgttgatacaaccataaaatgataattacacccataaattgataattatcacacccataaattgatattgcctcttcatggtctaaacttcagtaagtttacgacattttcctcgaggtcatttccggggatccatggagaaaaaaatcactggatataccaccgttgatatatcccaatggcatcgtaaagaacattttgaggcatttcagtcagttgctcaatgtacctataaccagaccgttcagctggatattacggcctttttaaagaccgtaaagaaaaataagcacaagttttatccggcctttattcacattcttgcccgcctgatgaatgctcatccggagttccgtatggcaatgaaagacggtgagctggtgatatgggatagtgttcacccttgttacaccgttttccatgagcaaactgaaacgttttcatcgctctggagtgaataccacgacgatttccggcagtttctacacatatattcgcaagatgtggcgtgttacggtgaaaacctggcctatttccctaaagggtttattgagaatatgtttttcgtctcagccaatccctgggtgagtttcaccagttttgatttaaacgtggccaatatggacaacttcttcgcccccgttttcactatgggcaaatattatacgcaaggcgacaaggtgctgatgccgctggcgattcaggttcatcatgccgtttgtgatggcttccatgtcggcagaatgcttaatgaattacaacagtactgcgatgagtggcagggcggggcgtaatttttttaaggcagttattggtgcccttctagagtccttactgcagtagttttgctgaaatactcgattcacaaaaatatcaacttatggttgttttgtgagatatcaatatatggttgttttgtggttaagttgctgattataaataattattaaatatcactttatggttgcatcaacaggtaccgagctcgaattcactggccgtcgttttacaacgtcgtgactgggaaaaccctggcgttacccaacttaatcgccttgccagttcaccgacaaacgaaagctgataatctcatgaccaaaatcccttaacgtgagttttcgttccactgagcgtcagaccccgttgatgataccgctgccttactgggtgcattagccagtctgaatgacctgtcacgggataatccgaagtggtcagactggaaaatcagagggcaggaactgctgaacagcaaaaagtcagatagcaccacatagcagacccgccataaaacgccctgagaagcccgtgacgggcttttcttgtattatgggtagtttccttgcatgaatccataaaaggcgcctgtagtgccatttacccccattcactgccagagccgtgagcgcagcgaactgaatgtcacgaaaaagacagcgactcaggtgcctgatggtcggagacaaaaggaatattcagcgatttgcccgattgcggccgcaaccgagcttgcgagggtgctacttaagcctttagggttttaaggtctgttttgtagaggagcaaacagcgtttgcgacatccttttgtaatactgcggaactgactaaagtagtgagttatacacagggctgggatctattctttttatctttttttattctttctttattctataaattataaccacttgaatataaacaaaaaaaacacacaaaggtctagcggaatttacagagggtctagcagaatttacaagttttccagcaaaggtctagcagaatttacagatacccacaactcaaaggaaaaggactagtaattatcattgactagcccatctcaattggtatagtgattaaaatcacctagaccaattgagatgtatgtctgaattagttgttttcaaagcaaatgaactagcgattagtcgctatgacttaacggagcatgaaaccaagctaattttatgctgtgtggcactactcaaccccacgattgaaaaccctacaaggaaagaacggacggtatcgttcacttataaccaatacgttcagatgatgaacatcagtagggaaaatgcttatggtgtattagctaaagcaaccagagagctgatgacgagaactgtggaaatcaggaatcctttggttaaaggctttgagattttccagtggacaaactatgccaagttctcaagcgaaaaattagaattagtttttagtgaagagatattgccttatcttttccagttaaaaaaattcataaaatataatctggaacatgttaagtcttttgaaaacaaatactctatgaggatttatgagtggttattaaaagaactaacacaaaagaaaactcacaaggcaaatatagagattagccttgatgaatttaagttcatgttaatgcttgaaaataactaccatgagtttaaaaggcttaaccaatgggttttgaaaccaataagtaaagatttaaacacttacagcaatatgaaattggtggttgataagcgaggccgcccgactgatacgttgattttccaagttgaactagatagacaaatggatctcgtaaccgaacttgagaacaaccagataaaaatgaatggtgacaaaataccaacaaccattacatcagattcctacctacataacggactaagaaaaacactacacgatgctttaactgcaaaaattcagctcaccagttttgaggcaaaatttttgagtgacatgcaaagtaagtatgatctcaatggttcgttctcatggctcacgcaaaaacaacgaaccacactagagaacatactggctaaatacggaaggatctgaggttcttatggctcttgtatctatcagtgaagcatcaagactaacaaacaaaagtagaacaactgttcaccgttacatatcaaagggaaaactgtccatacccatggattcttcgtctgtttctactggtattggcacaaacctgatatcgatgcaggtggcacttttcggggaaatgtgcgcggaacccctatttgtttatttttctaaatacattcaaatatgtatccgctcatgagacaataaccctggtagcgaccgagtgagctagctatttgtttatttttctaaatacattcaaatatgtatccgctcatgagacaataaccctgataaatgcttcaataatattgaaaaaggaagagtatgagggaagcggtgatcgccgaagtatcgactcaactatcagaggtagttggcgtcatcgagcgccatctcgaaccgacgttgctggccgtacatttgtacggctccgcagtggatggcggcctgaagccacacagtgatattgatttgctggttacggtgaccgtaaggcttgatgaaacaacgcggcgagctttgatcaacgaccttttggaaacttcggcttcccctggagagagcgagattctccgcgctgtagaagtcaccattgttgtgcacgacgacatcattccgtggcgttatccagctaagcgcgaactgcaatttggagaatggcagcgcaatgacattcttgcaggtatcttcgagccagccacgatcgacattgatctggctatcttgctgacaaaagcaagagaacatagcgttgccttggtaggtccagcggcggaggaactctttgatccggttcctgaacaggatctatttgaggcgctaaatgaaaccttaacgctatggaactcgccgcccgactgggctggcgatgagcgaaatgtagtgcttacgttgtcccgcatttggtacagcgcagtaaccggcaaaatcgcgccgaaggatgtcgctgccgactgggcaatggagcgcctgccggcccagtatcagcccgtcatacttgaagctagacaggcttatcttggacaagaagaagatcgcttggcctcgcgcgcagatcagttggaagaatttgtccactacgtgaaaggcgagatcaccaaggtagtcggcaaataatgtcctgtcagaccaagtttactcatatatactttagattgatttaaaacttcatttttaatttaaaaggatctaggtgaagatccgcctgcatggataaccgtattaccgcctttgagtgagctgataccgctcgccgcagccgaactaccgagcgcagcgagtcagtgagcgaggagcgactcctgcattaggaaattaatacgactcactataggggaattgtgagcggataacaattccctcgacgtggagatataccatgggtgaactgccgagtaggtagctgataacagtacagcgcggctgaaatcatcattaaagcggtgaactgccgagtaggtagctgataacggatccgaattcgagcgaaggagatatacatatgtttttgcaaagacctaaaccttacagcgatgaaagtttagaaagtttctttatccgagtggctaacaaaaatggctacggtgatgtccatcgcttcctagaagccactaaacgattccttcaagacattgaccataatggctatcaaacctttccgactgatataactcggataaacccatactcagctaaaaacagttccagcgcacgaactgcgtcattcctgaaacttgcacaattgacatttaatgaaccgccagagctacttgggttggcaattaacagaacaaacatgaaatactcgccgtcaactagcgcggttgttagaggtgcagaagtctttcctcgcagtttactacggacgcactccatcccctgctgtcctttgtgtctgcgagaaaatggctacgcctcctacctttggcactttcaggggtacgaatactgccacagccataacgtacctttaattaccacttgtagctgtggtaaggagtttgactaccgagtatctgggttaaagggcatttgctgcaaatgcaaggagcctatcaccttaaccagcagggagaacggtcatgaggcagcgtgtactgtttcaaactggcttgctggccatgaatctaaacctctgccaaatcttcctaaaagctaccgatggggtttagttcattggtggatgggtattaaagatagcgagttcgatcacttttcgttcgttcaatttttctcaaactggccaaggtcattccactcgataatcgaagatgaagtagagttcaaccttgagcatgctgttgtcagcacgtctgaattacgactaaaagatcttcttggtcgattgtttttcggttcaattcggttacctgagcggaatcttcaacacaatatcatccttggtgagcttctctgctatttagaaaatcgtttatggcaagacaagggattaatcgccaacctcaaaatgaacgcgttagaggcgactgtaatgttaaattgtagcctcgatcagattgcatcaatggttgaacaacgcatcttgaagccaaatcgaaaaagcaagcccaacagccctcttgatgttaccgattatctatttcatttcggcgatattttctgtctttggttagctgagttccaaagcgatgagtttaaccgttcgttttatgtgtcgaggtggtaaatgcaaactctgaaagaactaatcgcatccaatcctgacgacttaacaactgaacttaagagagcatttcgtccactcacaccgcatattgcaattgatggtaatgaacttgacgcactgacgatattagtcaatttaaccgataagactgatgatcagaaagacctgctcgatcgagccaaatgcaagcaaaaacttcgagatgaaaaatggtgggctagctgcataaattgcgttaattacagacaaagccataacccaaaattcccggatatacgttctgaaggcgtgattcgaacccaagccctgggtgaattaccgagtttcctactctcgtcctcaaaaatcccaccataccattggtcatatagccatgattcaaaatacgtcaacaaaagcgcattcctcaccaatgagttttgttgggatggtgagatctcatgtttgggtgagcttcttaaagatgcagatcacccactttggaatactttgaaaaagttaggttgttctcaaaaaacttgcaaagcaatggcaaaacaactagctgatattactctcacgactatcaatgtcacactcgcaccaaattacctgactcaaatatctctccccgatagtgatacatcctacatttcactctctcctgttgcatcgctatcgatgcaaagccactttcatcagaggctccaagatgaaaatcggcatagcgcgataacgcggtttagccgaactaccaacatgggggtcactgcgatgacatgtggcggcgcatttagaatgttaaagtctggcgctaagttttccagcccccctcatcaccgattaaacagtaaacgaagttggttgacgtcagagcatgttcagtcattaaaacagtaccagcgcctcaacaaaagcctcatacctgaaaactctcggattgcactccgtagaaaatacaaaatcgagcttcaaaatatggtcagatcttggtttgcaatgcaagaccatacccttgattcgaacatacttatccaacatttgaatcatgacctatcttacttaggagccacaaaacgttttgcatacgatccagcgatgaccaagctctttactgagcttttgaaacgagagttatcaaattcaatcaataatggtgagcaacacactaatggatcgtttttagtcctaccgaatatcagggtttgtggcgcaacagctttaagctccccggtaacggtggggattccatcacttacagctttctttggcttcgttcacgcatttgaacggaatataaatcgcaccacctcatcgtttcgtgttgaatcctttgcgatatgcgtccatcaactacatgtcgagaagcgaggtttgacagcagagtttgtggaaaaaggcgacgggactatatccgctcccgcgacccgggatgactggcagtgtgatgtcgtatttagccttattttgaacaccaactttgctcaacatattgaccaagatacgttagttacatcactaccaaagcgattggctcggggttcagcaaaaattgcgattgatgactttaaacatatcaactcattctcgacattagaaacagcgatcgaatctctgccaatagaagctggtaggtggttatcactttacgcacagtcaaacaataatctaagtgatctattagcagccatgacagaggaccatcagctcatggcaagctgcgtcggttaccacttgttagaagagcccaaagataaaccaaactccctcagaggttacaaacacgctatcgccgagtgcatcattggactcattaactcaatcacctttagctcagagactgatcccaacacaatcttttggtcgctaaagaactatcaaaactacctagtggtacagccaaggagtatcaacgatgaaactaccgacaaatctagcctatgagcgctctatcgacccatcagatgtctgtttttttgtcgtctggcccgatgatagaaaaacacctttaacctacaattctcgtactctgctcgggcaaatggaagcggcatcattagcctatgatgtctcaggtcaaccaataaaaagtgccaccgctgaggcgttagctcaagggaaccctcatcaagttgatttctgccacgttccatacggtgcgagtcatattgaatgcagtttctccgtctcgttttcttctgaactacgtcaaccatataagtgtaactcaagcaaagttaaacaaacgctagtgcaattagtcgagctctacgaaacgaaaatcggctggactgagctagcaacccgatatttgatgaacatttgcaacggtaaatggctgtggaaaaatacccgtaaagcctattgctggaacattgtacttacaccttggccttggaacggggaaaaggttggatttgaagatattcgtactaactacacctcacggcaagactttaaaaataataaaaattggtctgctatagttgaaatgatcaaaaccgcattttctagtactgatgggctggcgatatttgaagtcagggccaccttgcacttgccaacgaatgctatggtgcggccaagccaagttttcacagaaaaagaaagtggcagtaaaagtaaatctaaaactcaaaacagtcgagtttttcagagtacaactattgatggtgaacgatcgccaatactaggggcctttaaaacgggagcagctattgcaaccattgacgactggtatcctgaagccactgagccactaagggtcggacggtttggggttcatcgcgaagatgtcacttgctaccgtcatccgtctaccggaaaagattttttctcgatattacaacaagcagagcactatattgaagtgttgagcgccaacaaaactcccgctcaagaaactatcaacgacatgcactttttaatggctaacctgattaagggtgggatgttccagcataaaggagactgactgtgaaatggtattataagacaatcacc

SEQ ID NO: 1755 - DNA, 3453 bp, Synthetic construct
  source 1..3453: mol_type = other DNA
gacgaaagggcctcgtgatacgcctatttttataggttaatgtcatgataataatggtttcttagacgtcaggtggcacttttcggggaaatgtgcgcggaacccctatttgtttatttttctaaatacattcaaatatgtatccgctcatgagacaataaccctgataaatgcttcaataatattgaaaaaggaagagtatgagtattcaacatttccgtgtcgcccttattcccttttttgcggcattttgccttcctgtttttgctcacccagaaacgctggtgaaagtaaaagatgctgaagatcagttgggtgcacgagtgggttacatcgaactggatctcaacagcggtaagatccttgagagttttcgccccgaagaacgttttccaatgatgagcacttttaaagttctgctatgtggcgcggtattatcccgtattgacgccgggcaagagcaactcggtcgccgcatacactattctcagaatgacttggttgagtactcaccagtcacagaaaagcatcttacggatggcatgacagtaagagaattatgcagtgctgccataaccatgagtgataacactgcggccaacttacttctgacaacgatcggaggaccgaaggagctaaccgcttttttgcacaacatgggggatcatgtaactcgccttgatcgttgggaaccggagctgaatgaagccataccaaacgacgagcgtgacaccacgatgcctgtagcaatggcaacaacgttgcgcaaactattaactggcgaactacttactctagcttcccggcaacaattaatagactggatggaggcggataaagttgcaggaccacttctgcgctcggcccttccggctggctggtttattgctgataaatctggagccggtgagcgtggctctcgcggtatcattgcagcactggggccagatggtaagccctcccgtatcgtagttatctacacgacggggagtcaggcaactatggatgaacgaaatagacagatcgctgagataggtgcctcactgattaagcattggtaactgtcagaccaagtttactcatatatactttagattgatttaaaacttcatttttaatttaaaaggatctaggtgaagatcctttttgataatctcatgaccaaaatcccttaacgtgagttttcgttccactgagcgtcagaccccgtagaaaagatcaaaggatcttcttgagatcctttttttctgcgcgtaatctgctgcttgcaaacaaaaaaaccaccgctaccagcggtggtttgtttgccggatcaagagctaccaactctttttccgaaggtaactggcttcagcagagcgcagataccaaatactgttcttctagtgtagccgtagttaggccaccacttcaagaactctgtagcaccgcctacatacctcgctctgctaatcctgttaccagtggctgctgccagtggcgataagtcgtgtcttaccgggttggactcaagacgatagttaccggataaggcgcagcggtcgggctgaacggggggttcgtgcacacagcccagcttggagcgaacgacctacaccgaactgagatacctacagcgtgagctatgagaaagcgccacgcttcccgaagggagaaaggcggacaggtatccggtaagcggcagggtcggaacaggagagcgcacgagggagcttccagggggaaacgcctggtatctttatagtcctgtcgggtttcgccacctctgacttgagcgtcgatttttgtgatgctcgtcaggggggcggagcctatggaaaaacgccagcaacgcggcctttttacggttcctggccttttgctggccttttgctcacatgttctttcctgcgttatcccctgattctgtggataaccgtattaccgcctttgagtgagctgataccgctcgccgcagccgaactaccgagcgcagcgagtcagtgagcgaggaagcggaagagcgcccaatacgcaaaccgcctctccccgcgcgttggccgattcattaatgcagcccaagctttgttgatacaaccataaaatgataattacacccataaattgataattatcacacccataaattgatattgcctcttcatggtctaaacttcagtaagtttacgacattttcctcgaggtcatttccggggatccatggagaaaaaaatcactggatataccaccgttgatatatcccaatggcatcgtaaagaacattttgaggcatttcagtcagttgctcaatgtacctataaccagaccgttcagctggatattacggcctttttaaagaccgtaaagaaaaataagcacaagttttatccggcctttattcacattcttgcccgcctgatgaatgctcatccggagttccgtatggcaatgaaagacggtgagctggtgatatgggatagtgttcacccttgttacaccgttttccatgagcaaactgaaacgttttcatcgctctggagtgaataccacgacgatttccggcagtttctacacatatattcgcaagatgtggcgtgttacggtgaaaacctggcctatttccctaaagggtttattgagaatatgtttttcgtctcagccaatccctgggtgagtttcaccagttttgatttaaacgtggccaatatggacaacttcttcgcccccgttttcactatgggcaaatattatacgcaaggcgacaaggtgctgatgccgctggcgattcaggttcatcatgccgtttgtgatggcttccatgtcggcagaatgcttaatgaattacaacagtactgcgatgagtggcagggcggggcgtaatttttttaaggcagttattggtgcccttctagagtccttactgcagtagttttgctgaaatactcgattcacaaaaatatcaacttatggttgttttgtgagatatcaatatatggttgttttgtggttaagttgctgattataaataattattaaatatcactttatggttgcatcaacaggtaccgagctcgaattcactggccgtcgttttacaacgtcgtgactgggaaaaccctggcgttacccaacttaatcgccttgcagcacatccccctttcgccagctggcgtaatagcgaagaggcccgcaccgatcgcccttcccaacagttgcgcagcctgaatggcgaatggcgcctgatgcggtattttctccttacgcatctgtgcggtatttcacaccgcatatggtgcactctcagtacaatctgctctgatgccgcatagttaagccagccccgacacccgccaacacccgctgacgcgccctgacgggcttgtctgctcccggcatccgcttacagacaagctgtgaccgtctccgggagctgcatgtgtcagaggttttcaccgtcatcaccgaaacgcgcga

(The sequence listing continues in the following parts.)
